(19) United States
(12) Patent Application Publication
(10) Pub. No.: US 2007/0031842 A1
(43) Pub. Date: Feb. 8, 2007

(54) 379 human secreted proteins

(76) Inventors: Craig A. Rosen, Laytonsville, MD (US); Steven M. Ruben, Olney, MD (US)

Correspondence Address: HUMAN GENOME SCIENCES INC;INTELLECTUAL PROPERTY DEPT., 14200 SHADY GROVE ROAD, ROCKVILLE, MD, 20850, US

(21) Appl. No.: 10/670,186

(22) Filed: Sep. 25, 2003

Related U.S. Application Data
(63) Continuation-in-part of application No. PCT/US02/09188, filed on Mar. 26, 2002.
Application No. PCT/US02/09188 is a continuation-in-part of application No. 10/105,299, filed on Mar. 26, 2002.
Application No. PCT/US02/09188 is a continuation-in-part of application No. 09/950,082, filed on Sep. 12, 2001, now abandoned.
Application No. PCT/US02/09188 is a continuation-in-part of application No. PCT/US00/06043, filed on Mar. 9, 2000.
Application No. 09/950,082 is a continuation-in-part of application No. PCT/US00/06012, filed on Mar. 9, 2000.
Application No. 09/950,082 is a continuation-in-part of application No. PCT/US00/06058, filed on Mar. 9, 2000.
Application No. 09/950,082 is a continuation-in-part of application No. PCT/US00/06044, filed on Mar. 9, 2000.
Application No. 09/950,082 is a continuation-in-part of application No. PCT/US00/06059, filed on Mar. 9, 2000.
Application No. 09/950,082 is a continuation-in-part of application No. PCT/US00/06042, filed on Mar. 9, 2000.
Application No. 09/950,082 is a continuation-in-part of application No. PCT/US00/06014, filed on Mar. 9, 2000.
Application No. 09/950,082 is a continuation-in-part of application No. PCT/US00/06013, filed on Mar. 9, 2000.
Application No. 09/950,082 is a continuation of application No. PCT/US00/06049, filed on Mar. 9, 2000.
Application No. 09/950,082 is a continuation of application No. PCT/US00/06057, filed on Mar. 9, 2000.
Application No. 09/950,082 is a continuation-in-part of application No. PCT/US00/06824, filed on Mar. 16, 2000.
Application No. PCT/US00/06824 is a continuation-in-part of application No. 60/168,664, filed on Dec. 3, 1999.
Application No. 09/950,082 is a continuation-in-part of application No. PCT/US00/06765, filed on Mar. 16, 2000.
Application No. 09/950,082 is a continuation-in-part of application No. PCT/US00/06792, filed on Mar. 16, 2000.
Application No. 09/950,082 is a continuation-in-part of application No. PCT/US00/06830, filed on Mar. 16, 2000.
Application No. 09/950,082 is a continuation-in-part of application No. PCT/US00/06782, filed on Mar. 16, 2000.
Application No. 09/950,082 is a continuation-in-part of application No. PCT/US00/06822, filed on Mar. 16, 2000.
Application No. 09/950,082 is a continuation-in-part of application No. PCT/US00/06791, filed on Mar. 16, 2000.
Application No. 09/950,082 is a continuation-in-part of application No. PCT/US00/06828, filed on Mar. 16, 2000.
Application No. 09/950,082 is a continuation-in-part of application No. PCT/US00/06823, filed on Mar. 16, 2000.
Application No. 09/950,082 is a continuation-in-part of application No. PCT/US00/06781, filed on Mar. 16, 2000.
Application No. 09/950,082 is a continuation-in-part of application No. PCT/US00/07505, filed on Mar. 22, 2000.
Application No. 09/950,082 is a continuation-in-part of application No. PCT/US00/07440, filed on Mar. 22, 2000.
Application No. 09/950,082 is a continuation-in-part of application No. PCT/US00/07506, filed on Mar. 22, 2000.
Application No. 09/950,082 is a continuation-in-part of application No. PCT/US00/07507, filed on Mar. 22, 2000.
Application No. 09/950,082 is a continuation-in-part of application No. PCT/US00/07535, filed on Mar. 22, 2000.
Application No. 09/950,082 is a continuation-in-part of application No. PCT/US00/07525, filed on Mar. 22, 2000.
Application No. 09/950,082 is a continuation-in-part of application No. PCT/US00/07534, filed on Mar. 22, 2000.
Application No. 09/950,082 is a continuation-in-part of application No. PCT/US00/07483, filed on Mar. 22, 2000.
Application No. 09/950,082 is a continuation-in-part of application No. PCT/US00/07526, filed on Mar. 22, 2000.
Application No. 09/950,082 is a continuation-in-part of application No. PCT/US00/07527, filed on Mar. 22, 2000.
Application No. 09/950,082 is a continuation-in-part of application No. PCT/US00/07661, filed on Mar. 23, 2000.
Application No. 09/950,082 is a continuation-in-part of application No. PCT/US00/07579, filed on Mar. 23, 2000.
Application No. 09/950,082 is a continuation-in-part of application No. PCT/US00/07723, filed on Mar. 23, 2000.
Application No. 09/950,082 is a continuation-in-part of application No. PCT/US00/07724, filed on Mar. 23, 2000.
Application No. 09/950,082 is a continuation-in-part of application No. PCT/US00/14929, filed on Jun. 1, 2000.
Application No. 09/950,082 is a continuation-in-part of application No. PCT/US00/07722, filed on Mar. 23, 2000.
Application No. 09/950,082 is a continuation-in-part of application No. PCT/US00/07578, filed on Mar. 23, 2000.
Application No. 09/950,082 is a continuation-in-part of application No. PCT/US00/07726, filed on Mar. 23, 2000.
Application No. 09/950,082 is a continuation-in-part of application No. PCT/US00/07677, filed on Mar. 23, 2000.
Application No. 09/950,082 is a continuation-in-part of application No. PCT/US00/07725, filed on Mar. 23, 2000.
Application No. 09/950,082 is a continuation-in-part of application No. PCT/US00/09070, filed on Apr. 6, 2000.
Application No. 09/950,082 is a continuation-in-part of application No. PCT/US00/08982, filed on Apr. 6, 2000.
Application No. 09/950,082 is a continuation-in-part of application No. PCT/US00/08983, filed on Apr. 6, 2000.
Application No. 09/950,082 is a continuation-in-part of application No. PCT/US00/09067, filed on Apr. 6, 2000.
Application No. 09/950,082 is a continuation-in-part of application No. PCT/US00/09066, filed on Apr. 6, 2000.
Application No. 09/950,082 is a continuation-in-part of application No. PCT/US00/09068, filed on Apr. 6, 2000.
Application No. 09/950,082 is a continuation-in-part of application No. PCT/US00/08981, filed on Apr. 6, 2000.
Application No. 09/950,082 is a continuation-in-part of application No. PCT/US00/08980, filed on Apr. 6, 2000.
Application No. 09/950,082 is a continuation-in-part of application No. PCT/US00/09071, filed on Apr. 6, 2000.
Application No. 09/950,082 is a continuation-in-part of application No. PCT/US00/09069, filed on Apr. 6, 2000.
Application No. 09/950,082 is a continuation-in-part of application No. PCT/US00/15136, filed on Jun. 1, 2000.
Application No. 09/950,082 is a continuation-in-part of application No. PCT/US00/14926, filed on Jun. 1, 2000.
Application No. 09/950,082 is a continuation-in-part of application No. PCT/US00/14963, filed on Jun. 1, 2000.
Application No. 09/950,082 is a continuation-in-part of application No. PCT/US00/15135, filed on Jun. 1, 2000.
Application No. 09/950,082 is a continuation-in-part of application No. PCT/US00/14934, filed on Jun. 1, 2000.
Application No. 09/950,082 is a continuation-in-part of application No. PCT/US00/14933, filed on Jun. 1, 2000.
Application No. 09/950,082 is a continuation-in-part of application No. PCT/US00/15137, filed on Jun. 1, 2000.
Application No. 09/950,082 is a continuation-in-part of application No. PCT/US00/14928, filed on Jun. 1, 2000.
Application No. 09/950,082 is a continuation-in-part of application No. PCT/US00/14973, filed on Jun. 1, 2000.
Application No. 09/950,082 is a continuation-in-part of application No. PCT/US00/14964, filed on Jun. 1, 2000.
Application No. 09/950,082 is a continuation-in-part of application No. PCT/US00/26376, filed on Sep. 26, 2000.
Application No. 09/950,082 is a continuation-in-part of application No. PCT/US00/26371, filed on Sep. 26, 2000.
Application No. 09/950,082 is a continuation-in-part of application No. PCT/US00/26324, filed on Sep. 26, 2000.
Application No. 09/950,082 is a continuation-in-part of application No. PCT/US00/26323, filed on Sep. 26, 2000.
Application No. 09/950,082 is a continuation-in-part of application No. PCT/US00/26337, filed on Sep. 26, 2000.
Application No. 10/105,299 is a continuation-in-part of application No. 09/950,083, filed on Sep. 12, 2001, now abandoned.
Application No. 10/105,299 is a continuation-in-part of application No. PCT/US00/06043, filed on Mar. 9, 2000.
Application No. 09/950,083 is a continuation-in-part of application No. PCT/US00/06012, filed on Mar. 9, 2000.
Application No. 09/950,083 is a continuation-in-part of application No. PCT/US00/06058, filed on Mar. 9, 2000.
Application No. 09/950,083 is a continuation-in-part of application No. PCT/US00/06044, filed on Mar. 9, 2000.
Application No. 09/950,083 is a continuation-in-part of application No. PCT/US00/06059, filed on Mar. 9, 2000.
Application No. 09/950,083 is a continuation-in-part of application No. PCT/US00/06042, filed on Mar. 9, 2000.
Application No. 09/950,083 is a continuation-in-part of application No. PCT/US00/06014, filed on Mar. 9, 2000.
Application No. 09/950,083 is a continuation-in-part of application No. PCT/US00/06013, filed on Mar. 9, 2000.
Application No. 09/950,083 is a continuation-in-part of application No. PCT/US00/06049, filed on Mar. 9, 2000.
Application No. 09/950,083 is a continuation-in-part of application No. PCT/US00/06057, filed on Mar. 9, 2000.
Application No. 09/950,083 is a continuation-in-part of application No. PCT/US00/06824, filed on Mar. 16, 2000.
Application No. 09/950,083 is a continuation-in-part of application No. PCT/US00/06765, filed on Mar. 16, 2000.
Application No. 09/950,083 is a continuation-in-part of application No. PCT/US00/06792, filed on Mar. 16, 2000.
Application No. 09/950,083 is a continuation-in-part of application No. PCT/US00/06830, filed on Mar. 16, 2000.
Application No. 09/950,083 is a continuation-in-part of application No. PCT/US00/06782, filed on Mar. 16, 2000.
Application No. 09/950,083 is a continuation-in-part of application No. PCT/US00/06822, filed on Mar. 16, 2000.
Application No. 09/950,083 is a continuation-in-part of application No. PCT/US00/06791, filed on Mar. 16, 2000.
Application No. 09/950,083 is a continuation-in-part of application No. PCT/US00/06828, filed on Mar. 16, 2000.
Application No. 09/950,083 is a continuation-in-part of application No. PCT/US00/06823, filed on Mar. 16, 2000.
Application No. 09/950,083 is a continuation-in-part of application No. PCT/US00/06781, filed on Mar. 16, 2000.
Application No. 09/950,083 is a continuation-in-part of application No. PCT/US00/07505, filed on Mar. 22, 2000.
Application No. 09/950,083 is a continuation-in-part of application No. PCT/US00/07440, filed on Mar. 22, 2000.
Application No. 09/950,083 is a continuation-in-part of application No. PCT/US00/07506, filed on Mar. 22, 2000.
Application No. 09/950,083 is a continuation-in-part of application No. PCT/US00/07507, filed on Mar. 22, 2000.
Application No. 09/950,083 is a continuation-in-part of application No. PCT/US00/07535, filed on Mar. 22, 2000.
Application No. 09/950,083 is a continuation-in-part of application No. PCT/US00/07525, filed on Mar. 22, 2000.
Application No. 09/950,083 is a continuation-in-part of application No. PCT/US00/07534, filed on Mar. 22, 2000.
Application No. 09/950,083 is a continuation-in-part of application No. PCT/US00/07483, filed on Mar. 22, 2000.
Application No. 09/950,083 is a continuation-in-part of application No. PCT/US00/07526, filed on Mar. 22, 2000.
Application No. 09/950,083 is a continuation-in-part of application No. PCT/US00/07527, filed on Mar. 22, 2000.
Application No. 09/950,083 is a continuation-in-part of application No. PCT/US00/07661, filed on Mar. 23, 2000.
Application No. 09/950,083 is a continuation-in-part of application No. PCT/US00/07579, filed on Mar. 23, 2000.
Application No. 09/950,083 is a continuation-in-part of application No. PCT/US00/07723, filed on Mar. 23, 2000.
Application No. 09/950,083 is a continuation-in-part of application No. PCT/US00/07724, filed on Mar. 23, 2000.
Application No. 09/950,083 is a continuation-in-part of application No. PCT/US00/14929, filed on Jun. 1, 2000.
Application No. 09/950,083 is a continuation-in-part of application No. PCT/US00/07722, filed on Mar. 23, 2000.
Application No. 09/950,083 is a continuation-in-part of application No. PCT/US00/07578, filed on Mar. 23, 2000.
Application No. 09/950,083 is a continuation-in-part of application No. PCT/US00/07726, filed on Mar. 23, 2000.
Application No. 09/950,083 is a continuation-in-part of application No. PCT/US00/07677, filed on Mar. 23, 2000.
Application No. 09/950,083 is a continuation-in-part of application No. PCT/US00/07725, filed on Mar. 23, 2000.
Application No. 09/950,083 is a continuation-in-part of application No. PCT/US00/09070, filed on Apr. 6, 2000.
Application No. 09/950,083 is a continuation-in-part of application No. PCT/US00/08982, filed on Apr. 6, 2000.
Application No. 09/950,083 is a continuation-in-part of application No. PCT/US00/08983, filed on Apr. 6, 2000.
Application No. 09/950,083 is a continuation-in-part of application No. PCT/US00/09067, filed on Apr. 6, 2000.
Application No. 09/950,083 is a continuation-in-part of application No. PCT/US00/09066, filed on Apr. 6, 2000.
Application No. 09/950,083 is a continuation-in-part of application No. PCT/US00/09068, filed on Apr. 6, 2000.
Application No. 09/950,083 is a continuation-in-part of application No. PCT/US00/08981, filed on Apr. 6, 2000.
Application No. 09/950,083 is a continuation-in-part of application No. PCT/US00/08980, filed on Apr. 6, 2000.
Application No. 09/950,083 is a continuation-in-part of application No. PCT/US00/09071, filed on Apr. 6, 2000.
Application No. 09/950,083 is a continuation-in-part of application No. PCT/US00/09069, filed on Apr. 6, 2000.
Application No. 09/950,083 is a continuation-in-part of application No. PCT/US00/15136, filed on Jun. 1, 2000.
Application No. 09/950,083 is a continuation-in-part of application No. PCT/US00/14926, filed on Jun. 1, 2000.
Application No. 09/950,083 is a continuation-in-part of application No. PCT/US00/14963, filed on Jun. 1, 2000.
Application No. 09/950,083 is a continuation-in-part of application No. PCT/US00/15135, filed on Jun. 1, 2000.
Application No. 09/950,083 is a continuation-in-part of application No. PCT/US00/14934, filed on Jun. 1, 2000.
Application No. 09/950,083 is a continuation-in-part of application No. PCT/US00/14933, filed on Jun. 1, 2000.
Application No. 09/950,083 is a continuation-in-part of application No. PCT/US00/15137, filed on Jun. 1, 2000.
Application No. 09/950,083 is a continuation-in-part of application No. PCT/US00/14928, filed on Jun. 1, 2000.
Application No. 09/950,083 is a continuation-in-part of application No. PCT/US00/14973, filed on Jun. 1, 2000.
Application No. 09/950,083 is a continuation-in-part of application No. PCT/US00/14964, filed on Jun. 1, 2000.
Application No. 09/950,083 is a continuation-in-part of application No. PCT/US00/26376, filed on Sep. 26, 2000.
Application No. 09/950,083 is a continuation-in-part of application No. PCT/US00/26371, filed on Sep. 26, 2000.
Application No. 09/950,083 is a continuation-in-part of application No. PCT/US00/26324, filed on Sep. 26, 2000.
Application No. 09/950,083 is a continuation-in-part of application No. PCT/US00/26323, filed on Sep. 26, 2000.
Application No. 09/950,083 is a continuation-in-part of application No. PCT/US00/26337, filed on Sep. 26, 2000.
Application No. 09/950,083 is a continuation-in-part of application No. PCT/US01/13318, filed on Apr. 26, 2001.
(60) Provisional application No. 60/278,650, filed on Mar. 27, 2001.
(60) Provisional application No. 60/278,650, filed on Mar. 27, 2001.
(60) Provisional application No. 60/167,061, filed on Nov. 23, 1999.
(60) Provisional application No. 60/124,146, filed on Mar. 12, 1999.
(60) Provisional application No. 60/166,989, filed on Nov. 23, 1999.
(60) Provisional application No. 60/124,093, filed on Mar. 12, 1999.
(60) Provisional application No. 60/168,654, filed on Dec. 3, 1999.
(60) Provisional application No. 60/124,145, filed on Mar. 12, 1999.
(60) Provisional application No. 60/168,661, filed on Dec. 3, 1999.
(60) Provisional application No. 60/124,099, filed on Mar. 12, 1999.
(60) Provisional application No. 60/168,622, filed on Dec. 3, 1999.
(60) Provisional application No. 60/124,096, filed on Mar. 12, 1999.
(60) Provisional application No. 60/168,663, filed on Dec. 3, 1999.
(60) Provisional application No. 60/124,143, filed on Mar. 12, 1999.
(60) Provisional application No. 60/168,665, filed on Dec. 3, 1999.
(60) Provisional application No. 60/138,598, filed on Jun. 11, 1999.
(60) Provisional application No. 60/124,095, filed on Mar. 12, 1999.
(60) Provisional application No. 60/168,662, filed on Dec. 3, 1999.
(60) Provisional application No. 60/138,626, filed on Jun. 11, 1999.
(60) Provisional application No. 60/125,360, filed on Mar. 19, 1999.
(60) Provisional application No. 60/168,667, filed on Dec. 3, 1999.
(60) Provisional application No. 60/138,574, filed on Jun. 11, 1999.
(60) Provisional application No. 60/124,144, filed on Mar. 12, 1999.
(60) Provisional application No. 60/168,666, filed on Dec. 3, 1999.
(60) Provisional application No. 60/138,597, filed on Jun. 11, 1999.
(60) Provisional application No. 60/124,142, filed on Mar. 12, 1999.
(60) Provisional application No. 60/125,359, filed on Mar. 19, 1999.
(60) Provisional application No. 60/169,906, filed on Dec. 10, 1999.
(60) Provisional application No. 60/126,051, filed on Mar. 23, 1999.
(60) Provisional application No. 60/169,980, filed on Dec. 10, 1999.
(60) Provisional application No. 60/125,362, filed on Mar. 19, 1999.
(60) Provisional application No. 60/169,910, filed on Dec. 10, 1999.
(60) Provisional application No. 60/125,361, filed on Mar. 19, 1999.
(60) Provisional application No. 60/169,936, filed on Dec. 10, 1999.
(60) Provisional application No. 60/125,812, filed on Mar. 23, 1999.
(60) Provisional application No. 60/169,916, filed on Dec. 10, 1999.
(60) Provisional application No. 60/126,054, filed on Mar. 23, 1999.
(60) Provisional application No. 60/169,946, filed on Dec. 10, 1999.
(60) Provisional application No. 60/125,815, filed on Mar. 23, 1999.
(60) Provisional application No. 60/169,616, filed on Dec. 8, 1999.
(60) Provisional application No. 60/125,358, filed on Mar. 19, 1999.
(60) Provisional application No. 60/169,623, filed on Dec. 8, 1999.
(60) Provisional application No. 60/125,364, filed on Mar. 19, 1999.
(60) Provisional application No. 60/169,617, filed on Dec. 8, 1999.
(60) Provisional application No. 60/125,363, filed on Mar. 19, 1999.
(60) Provisional application No. 60/172,410, filed on Dec. 17, 1999.
(60) Provisional application No. 60/126,502, filed on Mar. 26, 1999.
(60) Provisional application No. 60/172,409, filed on Dec. 17, 1999.
(60) Provisional application No. 60/126,503, filed on Mar. 26, 1999.
(60) Provisional application No. 60/172,412, filed on Dec. 17, 1999.
(60) Provisional application No. 60/126,505, filed on Mar. 26, 1999.
(60) Provisional application No. 60/172,408, filed on Dec. 17, 1999.
(60) Provisional application No. 60/126,594, filed on Mar. 26, 1999.
(60) Provisional application No. 60/172,413, filed on Dec. 17, 1999.
(60) Provisional application No. 60/126,511, filed on Mar. 26, 1999.
(60) Provisional application No. 60/171,549, filed on Dec. 22, 1999.
(60) Provisional application No. 60/126,595, filed on Mar. 26, 1999.
(60) Provisional application No. 60/171,504, filed on Dec. 22, 1999.
(60) Provisional application No. 60/126,598, filed on Mar. 26, 1999.
(60) Provisional application No. 60/171,552, filed on Dec. 22, 1999.
(60) Provisional application No. 60/126,596, filed on Mar. 26, 1999.
(60) Provisional application No. 60/171,550, filed on Dec. 22, 1999.
(60) Provisional application No. 60/126,600, filed on Mar. 26, 1999.
(60) Provisional application No. 60/171,551, filed on Dec. 22, 1999.
(60) Provisional application No. 60/126,501, filed on Mar. 26, 1999.
(60) Provisional application No. 60/174,847, filed on Jan. 7, 2000.
(60) Provisional application No. 60/126,504, filed on Mar. 26, 1999.
(60) Provisional application No. 60/174,853, filed on Jan. 7, 2000.
(60) Provisional application No. 60/126,509, filed on Mar. 26, 1999.
(60) Provisional application No. 60/174,852, filed on Jan. 7, 2000.
(60) Provisional application No. 60/126,506, filed on Mar. 26, 1999.
(60) Provisional application No. 60/126,510, filed on Mar. 26, 1999.
(60) Provisional application No. 60/174,850, filed on Jan. 7, 2000.
(60) Provisional application No. 60/138,573, filed on Jun. 11, 1999.
(60) Provisional application No. 60/174,851, filed on Jan. 7, 2000.
(60) Provisional application No. 60/126,508, filed on Mar. 26, 1999.
(60) Provisional application No. 60/174,871, filed on Jan. 7, 2000.
(60) Provisional application No. 60/126,507, filed on Mar. 26, 1999.
(60) Provisional application No. 60/174,872, filed on Jan. 7, 2000.
(60) Provisional application No. 60/126,597, filed on Mar. 26, 1999.
(60) Provisional application No. 60/174,877, filed on Jan. 7, 2000.
(60) Provisional application No. 60/126,601, filed on Mar. 26, 1999.
(60) Provisional application No. 60/176,064, filed on Jan. 14, 2000.
(60) Provisional application No. 60/154,373, filed on Sep. 17, 1999.
(60) Provisional application No. 60/126,602, filed on Mar. 26, 1999.
(60) Provisional application No. 60/176,063, filed on Jan. 14, 2000.
(60) Provisional application No. 60/128,695, filed on Apr. 9, 1999.
(60) Provisional application No. 60/176,052, filed on Jan. 14, 2000.
(60) Provisional application No. 60/128,696, filed on Apr. 9, 1999.
(60) Provisional application No. 60/176,069, filed on Jan. 14, 2000.
(60) Provisional application No. 60/128,703, filed on Apr. 9, 1999.
(60) Provisional application No. 60/176,068, filed on Jan. 14, 2000.
(60) Provisional application No. 60/128,697, filed on Apr. 9, 1999.
(60) Provisional application No. 60/176,929, filed on Jan. 20, 2000.
(60) Provisional application No. 60/128,698, filed on Apr. 9, 1999.
(60) Provisional application No. 60/176,926, filed on Jan. 20, 2000.
(60) Provisional application No. 60/128,699, filed on Apr. 9, 1999.
(60) Provisional application No. 60/177,050, filed on Jan. 20, 2000.
(60) Provisional application No. 60/128,701, filed on Apr. 9, 1999.
(60) Provisional application No. 60/177,166, filed on Jan. 20, 2000.
(60) Provisional application No. 60/128,700, filed on Apr. 9, 1999.
(60) Provisional application No. 60/176,930, filed on Jan. 20, 2000.
(60) Provisional application No. 60/128,694, filed on Apr. 9, 1999.
(60) Provisional application No. 60/176,931, filed on Jan. 20, 2000.
(60) Provisional application No. 60/128,702, filed on Apr. 9, 1999.
(60) Provisional application No. 60/177,049, filed on Jan. 20, 2000.
(60) Provisional application No. 60/138,629, filed on Jun. 11, 1999.
(60) Provisional application No. 60/138,628, filed on Jun. 11, 1999.
(60) Provisional application No. 60/138,631, filed on Jun. 11, 1999.
(60) Provisional application No. 60/138,632, filed on Jun. 11, 1999.
(60) Provisional application No. 60/138,599, filed on Jun. 11, 1999.
(60) Provisional application No. 60/138,572, filed on Jun. 11, 1999.
(60) Provisional application No. 60/138,625, filed on Jun. 11, 1999.
(60) Provisional application No. 60/138,633, filed on Jun. 11, 1999.
(60) Provisional application No. 60/138,630, filed on Jun. 11, 1999.
(60) Provisional application No. 60/138,627, filed on Jun. 11, 1999.
(60) Provisional application No. 60/155,808, filed on Sep. 27, 1999.
(60) Provisional application No. 60/155,804, filed on Sep. 27, 1999.
(60) Provisional application No. 60/155,807, filed on Sep. 27, 1999.
(60) Provisional application No. 60/155,805, filed on Sep. 27, 1999.
(60) Provisional application No. 60/155,806, filed on Sep. 27, 1999.
(60) Provisional application No. 60/278,650, filed on Mar. 27, 2001.
(60) Provisional application No. 60/167,061, filed on Nov. 23, 1999.
(60) Provisional application No. 60/124,146, filed on Mar. 12, 1999.
(60) Provisional application No. 60/166,989, filed on Nov. 23, 1999.
(60) Provisional application No. 60/124,093, filed on Mar. 12, 1999.
(60) Provisional application No. 60/168,654, filed on Dec. 3, 1999.
(60) Provisional application No. 60/124,145, filed on Mar. 12, 1999.
(60) Provisional application No. 60/168,661, filed on Dec. 3, 1999.
(60) Provisional application No. 60/124,099, filed on Mar. 12, 1999.
(60) Provisional application No. 60/168,622, filed on Dec. 3, 1999.
(60) Provisional application No. 60/124,096, filed on Mar. 12, 1999.
(60) Provisional application No. 60/168,663, filed on Dec. 3, 1999.
(60) Provisional application No. 60/124,143, filed on Mar. 12, 1999.
(60) Provisional application No. 60/168,665, filed on Dec. 3, 1999.
(60) Provisional application No. 60/138,598, filed on Jun. 11, 1999.
(60) Provisional application No. 60/124,095, filed on Mar. 12, 1999.
(60) Provisional application No. 60/168,662, filed on Dec. 3, 1999.
(60) Provisional application No. 60/138,626, filed on Jun. 11, 1999.
(60) Provisional application No. 60/125,360, filed on Mar. 19, 1999.
(60) Provisional application No. 60/168,667, filed on Dec. 3, 1999.
(60) Provisional application No. 60/138,574, filed on Jun. 11, 1999.
(60) Provisional application No. 60/124,144, filed on Mar. 12, 1999.
(60) Provisional application No. 60/168,666, filed on Dec. 3, 1999.
(60) Provisional application No. 60/138,597, filed on Jun. 11, 1999.
(60) Provisional application No. 60/124,142, filed on Mar. 12, 1999.
(60) Provisional application No. 60/168,664, filed on Dec. 3, 1999.
(60) Provisional application No. 60/125,359, filed on Mar. 19, 1999.
(60) Provisional application No. 60/169,906, filed on Dec. 10, 1999.
(60) Provisional application No. 60/126,051, filed on Mar. 23, 1999.
(60) Provisional application No. 60/169,980, filed on Dec. 10, 1999.
(60) Provisional application No. 60/125,362, filed on Mar. 19, 1999.
(60) Provisional application No. 60/169,910, filed on Dec. 10, 1999.
(60) Provisional application No. 60/125,361, filed on Mar. 19, 1999.
(60) Provisional application No. 60/169,936, filed on Dec. 10, 1999.
(60) Provisional application No. 60/125,812, filed on Mar. 23, 1999.
(60) Provisional application No. 60/169,916, filed on Dec. 10, 1999.
(60) Provisional application No. 60/126,054, filed on Mar. 23, 1999.
(60) Provisional application No. 60/169,946, filed on Dec. 10, 1999.
(60) Provisional application No. 60/125,815, filed on Mar. 23, 1999.
(60) Provisional application No. 60/169,616, filed on Dec. 8, 1999.
(60) Provisional application No. 60/125,358, filed on Mar. 19, 1999.
(60) Provisional application No. 60/169,623, filed on Dec. 8, 1999.
(60) Provisional application No. 60/125,364, filed on Mar. 19, 1999.
(60) Provisional application No. 60/169,617, filed on Dec. 8, 1999.
(60) Provisional application No. 60/125,363, filed on Mar. 19, 1999.
(60) Provisional application No. 60/172,410, filed on Dec. 17, 1999.
(60) Provisional application No. 60/126,502, filed on Mar. 26, 1999.
(60) Provisional application No. 60/172,409, filed on Dec. 17, 1999.
(60) Provisional application No. 60/126,503, filed on Mar. 26, 1999.
(60) Provisional application No. 60/172,412, filed on Dec. 17, 1999.
(60) Provisional application No. 60/126,505, filed on Mar. 26, 1999.
(60) Provisional application No. 60/172,408, filed on Dec. 17, 1999.
(60) Provisional application No. 60/126,594, filed on Mar. 26, 1999.
(60) Provisional application No. 60/172,413, filed on Dec. 17, 1999.
(60) Provisional application No. 60/126,511, filed on Mar. 26, 1999.
(60) Provisional application No. 60/171,549, filed on Dec. 22, 1999.
(60) Provisional application No. 60/126,595, filed on Mar. 26, 1999.
(60) Provisional application No. 60/171,504, filed on Dec. 22, 1999.
(60) Provisional application No. 60/126,598, filed on Mar. 26, 1999.
(60) Provisional application No. 60/171,552, filed on Dec. 22, 1999.
(60) Provisional application No. 60/126,596, filed on Mar. 26, 1999.
(60) Provisional application No. 60/171,550, filed on Dec. 22, 1999.
(60) Provisional application No. 60/126,600, filed on Mar. 26, 1999.
(60) Provisional application No. 60/171,551, filed on Dec. 22, 1999.
(60) Provisional application No. 60/126,501, filed on Mar. 26, 1999.
(60) Provisional application No. 60/174,847, filed on Jan. 7, 2000.
(60) Provisional application No. 60/126,504, filed on Mar. 26, 1999.
(60) Provisional application No. 60/174,853, filed on Jan. 7, 2000.
(60) Provisional application No. 60/126,509, filed on Mar. 26, 1999.
(60) Provisional application No. 60/174,852, filed on Jan. 7, 2000.
(60) Provisional application No. 60/126,506, filed on Mar. 26, 1999.
(60) Provisional application No. 60/126,510, filed on Mar. 26, 1999.
(60) Provisional application No. 60/174,850, filed on Jan. 7, 2000.
(60) Provisional application No. 60/138,573, filed on Jun. 11, 1999.
(60) Provisional application No. 60/174,851, filed on Jan. 7, 2000.
(60) Provisional application No. 60/126,508, filed on Mar. 26, 1999.
(60) Provisional application No. 60/174,871, filed on Jan. 7, 2000.
(60) Provisional application No. 60/126,507, filed on Mar. 26, 1999.
(60) Provisional application No. 60/174,872, filed on Jan. 7, 2000.
(60) Provisional application No. 60/126,597, filed on Mar. 26, 1999.
(60) Provisional application No. 60/174,877, filed on Jan. 7, 2000.
(60) Provisional application No. 60/126,601, filed on Mar. 26, 1999.
(60) Provisional application No. 60/176,064, filed on Jan. 14, 2000.
(60) Provisional application No. 60/154,373, filed on Sep. 17, 1999.
(60) Provisional application No. 60/126,602, filed on Mar. 26, 1999.
(60) Provisional application No. 60/176,063, filed on Jan. 14, 2000.
(60) Provisional application No. 60/128,695, filed on Apr. 9, 1999.
(60) Provisional application No. 60/176,052, filed on Jan. 14, 2000.
(60) Provisional application No. 60/128,696, filed on Apr. 9, 1999.
(60) Provisional application No. 60/176,069, filed on Jan. 14, 2000.
(60) Provisional application No. 60/128,703, filed on Apr. 9, 1999.
(60) Provisional application No. 60/176,068, filed on Jan. 14, 2000.
(60) Provisional application No. 60/128,697, filed on Apr. 9, 1999.
(60) Provisional application No. 60/176,929, filed on Jan. 20, 2000.
(60) Provisional application No. 60/128,698, filed on Apr. 9, 1999.
(60) Provisional application No. 60/176,926, filed on Jan. 20, 2000.
(60) Provisional application No. 60/128,699, filed on Apr. 9, 1999.
(60) Provisional application No. 60/177,050, filed on Jan. 20, 2000.
(60) Provisional application No. 60/128,701, filed on Apr. 9, 1999.
(60) Provisional application No. 60/177,166, filed on Jan. 20, 2000.
(60) Provisional application No. 60/128,700, filed on Apr. 9, 1999.
(60) Provisional application No. 60/176,930, filed on Jan. 20, 2000.
(60) Provisional application No. 60/128,694, filed on Apr. 9, 1999.
(60) Provisional application No. 60/176,931, filed on Jan. 20, 2000.
(60) Provisional application No. 60/128,702, filed on Apr. 9, 1999.
(60) Provisional application No. 60/177,049, filed on Jan. 20, 2000.
(60) Provisional application No. 60/138,629, filed on Jun. 11, 1999.
(60) Provisional application No. 60/138,628, filed on Jun. 11, 1999.
(60) Provisional application No. 60/138,631, filed on Jun. 11, 1999.
(60) Provisional application No. 60/138,632, filed on Jun. 11, 1999.
(60) Provisional application No. 60/138,599, filed on Jun. 11, 1999.
(60) Provisional application No. 60/138,572, filed on Jun. 11, 1999.
(60) Provisional application No. 60/138,625, filed on Jun. 11, 1999.
(60) Provisional application No. 60/138,633, filed on Jun. 11, 1999.
(60) Provisional application No. 60/138,630, filed on Jun. 11, 1999.
(60) Provisional application No. 60/138,627, filed on Jun. 11, 1999.
(60) Provisional application No. 60/155,808, filed on Sep. 27, 1999.
(60) Provisional application No. 60/155,804, filed on Sep. 27, 1999.
(60) Provisional application No. 60/155,807, filed on Sep. 27, 1999.
(60) Provisional application No. 60/155,805, filed on Sep. 27, 1999.
(60) Provisional application No. 60/155,806, filed on Sep. 27, 1999.
(60) Provisional application No. 60/201,194, filed on May 2, 2000.
(60) Provisional application No. 60/212,142, filed on Jun. 16, 2000.

(51) Int. Cl. C12Q 1/68; C07H 21/04; C07K 14/705; C07K 14/47; C07K 16/18; C12N 9/00

(52) U.S. Cl. 435/6; 435/69.1; 435/183; 435/320.1; 435/325; 530/350; 530/388.22; 536/23.2

(57) ABSTRACT

The present invention relates to human secreted polypeptides, and isolated nucleic acid molecules encoding said polypeptides, useful for diagnosing and treating immune disorders and diseases. Antibodies that bind these polypeptides are also encompassed by the present invention. Also encompassed by the invention are vectors, host cells, and recombinant and synthetic methods for producing said polynucleotides, polypeptides, and/or antibodies. The invention further encompasses screening methods for identifying agonists and antagonists of polynucleotides and polypeptides of the invention. The present invention further encompasses methods and compositions for inhibiting or enhancing the production and function of the polypeptides of the present invention.

### RELATED APPLICATIONS

[0001] This application is a continuation-in-part of PCT/US02/09188, filed Mar. 26, 2002, which in turn claims benefit of the following:

| Application:: | Continuity Type:: | Parent Application:: | Parent Filing Date:: |
|---|---|---|---|
| PCT/US02/09188 | Continuation-in-part of | 10/105,299 | Mar. 26, 2002 |
| 10/105,299 | Non-provisional of | US60/278,650 | Mar. 27, 2001 |
| 10/105,299 | Continuation-in-part of | US09/950,082 | Sep. 12, 2001 |
| US09/950,082 | Non-provisional of | US60/278,650 | Mar. 27, 2001 |
| US09/950,082 | Continuation-in-part of | PCT/US00/06043 | Mar. 09, 2000 |
| US00/06043 | Non-provisional of | US60/167,061 | Nov. 23, 1999 |
| US00/06043 | Non-provisional of | US60/124,146 | Mar. 12, 1999 |
| US09/950,082 | Continuation-in-part of | PCT/US00/06012 | Mar. 09, 2000 |
| US00/06012 | Non-provisional of | US60/166,989 | Nov. 23, 1999 |
| US00/06012 | Non-provisional of | US60/124,093 | Mar. 12, 1999 |
| US09/950,082 | Continuation-in-part of | PCT/US00/06058 | Mar. 09, 2000 |
| US00/06058 | Non-provisional of | US60/168,654 | Dec. 03, 1999 |
| US00/06058 | Non-provisional of | US60/124,145 | Mar. 12, 1999 |
| US09/950,082 | Continuation-in-part of | PCT/US00/06044 | Mar. 09, 2000 |
| US00/06044 | Non-provisional of | US60/168,661 | Dec. 03, 1999 |
| US00/06044 | Non-provisional of | US60/124,099 | Mar. 12, 1999 |
| US09/950,082 | Continuation-in-part of | PCT/US00/06059 | Mar. 09, 2000 |
| US00/06059 | Non-provisional of | US60/168,622 | Dec. 03, 1999 |
| US00/06059 | Non-provisional of | US60/124,096 | Mar. 12, 1999 |
| US09/950,082 | Continuation-in-part of | PCT/US00/06042 | Mar. 09, 2000 |
| US00/06042 | Non-provisional of | US60/168,663 | Dec. 03, 1999 |
| US00/06042 | Non-provisional of | US60/124,143 | Mar. 12, 1999 |
| US09/950,082 | Continuation-in-part of | PCT/US00/06014 | Mar. 09, 2000 |
| US00/06014 | Non-provisional of | US60/168,665 | Dec. 03, 1999 |
| US00/06014 | Non-provisional of | US60/138,598 | Jun. 11, 1999 |
| US00/06014 | Non-provisional of | US60/124,095 | Mar. 12, 1999 |
| US09/950,082 | Continuation-in-part of | PCT/US00/06013 | Mar. 09, 2000 |
| US00/06013 | Non-provisional of | US60/168,662 | Dec. 03, 1999 |
| US00/06013 | Non-provisional of | US60/138,626 | Jun. 11, 1999 |
| US00/06013 | Non-provisional of | US60/125,360 | Mar. 19, 1999 |
| US09/950,082 | Continuation-in-part of | PCT/US00/06049 | Mar. 09, 2000 |
| US00/06049 | Non-provisional of | US60/168,667 | Dec. 03, 1999 |
| US00/06049 | Non-provisional of | US60/138,574 | Jun. 11, 1999 |
| US00/06049 | Non-provisional of | US60/124,144 | Mar. 12, 1999 |
| US09/950,082 | Continuation-in-part of | PCT/US00/06057 | Mar. 09, 2000 |
| US00/06057 | Non-provisional of | US60/168,666 | Dec. 03, 1999 |
| US00/06057 | Non-provisional of | US60/138,597 | Jun. 11, 1999 |
| US00/06057 | Non-provisional of | US60/124,142 | Mar. 12, 1999 |
| US09/950,082 | Continuation-in-part of | PCT/US00/06824 | Mar. 16, 2000 |
| US00/06824 | Non-provisional of | US60/168,664 | Dec. 03, 1999 |
| US00/06824 | Non-provisional of | US60/125,359 | Mar. 19, 1999 |
| US09/950,082 | Continuation-in-part of | PCT/US00/06765 | Mar. 16, 2000 |
| US00/06765 | Non-provisional of | US60/169,906 | Dec. 10, 1999 |
| US00/06765 | Non-provisional of | US60/126,051 | Mar. 23, 1999 |
| US09/950,082 | Continuation-in-part of | PCT/US00/06792 | Mar. 16, 2000 |
| US00/06792 | Non-provisional of | US60/169,980 | Dec. 10, 1999 |
| US00/06792 | Non-provisional of | US60/125,362 | Mar. 19, 1999 |
| US09/950,082 | Continuation-in-part of | PCT/US00/06830 | Mar. 16, 2000 |
| US00/06830 | Non-provisional of | US60/169,910 | Dec. 10, 1999 |
| US00/06830 | Non-provisional of | US60/125,361 | Mar. 19, 1999 |
| US09/950,082 | Continuation-in-part of | PCT/US00/06782 | Mar. 16, 2000 |
| US00/06782 | Non-provisional of | US60/169,936 | Dec. 10, 1999 |
| US00/06782 | Non-provisional of | US60/125,812 | Mar. 23, 1999 |
| US09/950,082 | Continuation-in-part of | PCT/US00/06822 | Mar. 16, 2000 |
| US00/06822 | Non-provisional of | US60/169,916 | Dec. 10, 1999 |
| US00/06822 | Non-provisional of | US60/126,054 | Mar. 23, 1999 |
| US09/950,082 | Continuation-in-part of | PCT/US00/06791 | Mar. 16, 2000 |
| US00/06791 | Non-provisional of | US60/169,946 | Dec. 10, 1999 |
| US00/06791 | Non-provisional of | US60/125,815 | Mar. 23, 1999 |
| US09/950,082 | Continuation-in-part of | PCT/US00/06828 | Mar. 16, 2000 |
| US00/06828 | Non-provisional of | US60/169,616 | Dec. 08, 1999 |
| US00/06828 | Non-provisional of | US60/125,358 | Mar. 19, 1999 |
| US09/950,082 | Continuation-in-part of | PCT/US00/06823 | Mar. 16, 2000 |
| US00/06823 | Non-provisional of | US60/169,623 | Dec. 08, 1999 |
| US00/06823 | Non-provisional of | US60/125,364 | Mar. 19, 1999 |
| US09/950,082 | Continuation-in-part of | PCT/US00/06781 | Mar. 16, 2000 |
| US00/06781 | Non-provisional of | US60/169,617 | Dec. 08, 1999 |
| US00/06781 | Non-provisional of | US60/125,363 | Mar. 19, 1999 |
| US09/950,082 | Continuation-in-part of | PCT/US00/07505 | Mar. 22, 2000 |
| US00/07505 | Non-provisional of | US60/172,410 | Dec. 17, 1999 |
| US00/07505 | Non-provisional of | US60/126,502 | Mar. 26, 1999 |
| US09/950,082 | Continuation-in-part of | PCT/US00/07440 | Mar. 22, 2000 |
| US00/07440 | Non-provisional of | US60/172,409 | Dec. 17, 1999 |
| US00/07440 | Non-provisional of | US60/126,503 | Mar. 26, 1999 |
| US09/950,082 | Continuation-in-part of | PCT/US00/07506 | Mar. 22, 2000 |
| US00/07506 | Non-provisional of | US60/172,412 | Dec. 17, 1999 |
| US00/07506 | Non-provisional of | US60/126,505 | Mar. 26, 1999 |
| US09/950,082 | Continuation-in-part of | PCT/US00/07507 | Mar. 22, 2000 |
| US00/07507 | Non-provisional of | US60/172,408 | Dec. 17, 1999 |
| US00/07507 | Non-provisional of | US60/126,594 | Mar. 26, 1999 |
| US09/950,082 | Continuation-in-part of | PCT/US00/07535 | Mar. 22, 2000 |
| US00/07535 | Non-provisional of | US60/172,413 | Dec. 17, 1999 |
| US00/07535 | Non-provisional of | US60/126,511 | Mar. 26, 1999 |
| US09/950,082 | Continuation-in-part of | PCT/US00/07525 | Mar. 22, 2000 |
| US00/07525 | Non-provisional of | US60/171,549 | Dec. 22, 1999 |
| US00/07525 | Non-provisional of | US60/126,595 | Mar. 26, 1999 |
| US09/950,082 | Continuation-in-part of | PCT/US00/07534 | Mar. 22, 2000 |
| US00/07534 | Non-provisional of | US60/171,504 | Dec. 22, 1999 |
| US00/07534 | Non-provisional of | US60/126,598 | Mar. 26, 1999 |
| US09/950,082 | Continuation-in-part of | PCT/US00/07483 | Mar. 22, 2000 |
| US00/07483 | Non-provisional of | US60/171,552 | Dec. 22, 1999 |
| US00/07483 | Non-provisional of | US60/126,596 | Mar. 26, 1999 |
| US09/950,082 | Continuation-in-part of | PCT/US00/07526 | Mar. 22, 2000 |
| US00/07526 | Non-provisional of | US60/171,550 | Dec. 22, 1999 |
| US00/07526 | Non-provisional of | US60/126,600 | Mar. 26, 1999 |
| US09/950,082 | Continuation-in-part of | PCT/US00/07527 | Mar. 22, 2000 |
| US00/07527 | Non-provisional of | US60/171,551 | Dec. 22, 1999 |
| US00/07527 | Non-provisional of | US60/126,501 | Mar. 26, 1999 |
| US09/950,082 | Continuation-in-part of | PCT/US00/07661 | Mar. 23, 2000 |
| US00/07661 | Non-provisional of | US60/174,847 | Jan. 07, 2000 |
| US00/07661 | Non-provisional of | US60/126,504 | Mar. 26, 1999 |
| US09/950,082 | Continuation-in-part of | PCT/US00/07579 | Mar. 23, 2000 |
| US00/07579 | Non-provisional of | US60/174,853 | Jan. 07, 2000 |
| US00/07579 | Non-provisional of | US60/126,509 | Mar. 26, 1999 |
| US09/950,082 | Continuation-in-part of | PCT/US00/07723 | Mar. 23, 2000 |
| US00/07723 | Non-provisional of | US60/242,710 | Oct. 25, 2000 |
| US00/07723 | Non-provisional of | US60/174,852 | Jan. 07, 2000 |
| US00/07723 | Non-provisional of | US60/126,506 | Mar. 26, 1999 |
| US09/950,082 | Continuation-in-part of | PCT/US00/07724 | Mar. 23, 2000 |
| US00/07724 | Non-provisional of | US60/174,850 | Jan. 07, 2000 |
| US00/07724 | Non-provisional of | US60/126,510 | Mar. 26, 1999 |
| US09/950,082 | Continuation-in-part of | PCT/US00/14929 | Jun. 01, 2000 |
| US00/14929 | Non-provisional of | US60/174,851 | Jan. 07, 2000 |
| US00/14929 | Non-provisional of | US60/138,573 | Jun. 11, 1999 |
| US09/950,082 | Continuation-in-part of | PCT/US00/07722 | Mar. 23, 2000 |
| US00/07722 | Non-provisional of | US60/174,871 | Jan. 07, 2000 |
| US00/07722 | Non-provisional of | US60/126,508 | Mar. 26, 1999 |
| US09/950,082 | Continuation-in-part of | PCT/US00/07578 | Mar. 23, 2000 |
| US00/07578 | Non-provisional of | US60/174,872 | Jan. 07, 2000 |
| US00/07578 | Non-provisional of | US60/126,507 | Mar. 26, 1999 |
| US09/950,082 | Continuation-in-part of | PCT/US00/07726 | Mar. 23, 2000 |
| US00/07726 | Non-provisional of | US60/174,877 | Jan. 07, 2000 |
| US00/07726 | Non-provisional of | US60/126,597 | Mar. 26, 1999 |
| US09/950,082 | Continuation-in-part of | PCT/US00/07677 | Mar. 23, 2000 |
| US00/07677 | Non-provisional of | US60/176,064 | Jan. 14, 2000 |
| US00/07677 | Non-provisional of | US60/154,373 | Sep. 17, 1999 |
| US00/07677 | Non-provisional of | US60/126,601 | Mar. 26, 1999 |
| US09/950,082 | Continuation-in-part of | PCT/US00/07725 | Mar. 23, 2000 |
| US00/07725 | Non-provisional of | US60/176,063 | Jan. 14, 2000 |
| US00/07725 | Non-provisional of | US60/126,602 | Mar. 26, 1999 |
| US09/950,082 | Continuation-in-part of | PCT/US00/09070 | Apr. 06, 2000 |
| US00/09070 | Non-provisional of | US60/176,052 | Jan. 14, 2000 |
| US00/09070 | Non-provisional of | US60/128,695 | Apr. 09, 1999 |
| US09/950,082 | Continuation-in-part of | PCT/US00/08982 | Apr. 06, 2000 |
| US00/08982 | Non-provisional of | US60/176,069 | Jan. 14, 2000 |
| US00/08982 | Non-provisional of | US60/128,696 | Apr. 09, 1999 |
| US09/950,082 | Continuation-in-part of | PCT/US00/08983 | Apr. 06, 2000 |
| US00/08983 | Non-provisional of | US60/176,068 | Jan. 14, 2000 |
| US00/08983 | Non-provisional of | US60/128,703 | Apr. 09, 1999 |
| US09/950,082 | Continuation-in-part of | PCT/US00/09067 | Apr. 06, 2000 |
| US00/09067 | Non-provisional of | US60/176,929 | Jan. 20, 2000 |
| US00/09067 | Non-provisional of | US60/128,697 | Apr. 09, 1999 |
| US09/950,082 | Continuation-in-part of | PCT/US00/09066 | Apr. 06, 2000 |
| US00/09066 | Non-provisional of | US60/176,926 | Jan. 20, 2000 |
| US00/09066 | Non-provisional of | US60/128,698 | Apr. 09, 1999 |
| US09/950,082 | Continuation-in-part of | PCT/US00/09068 | Apr. 06, 2000 |
| US00/09068 | Non-provisional of | US60/177,050 | Jan. 20, 2000 |
| US00/09068 | Non-provisional of | US60/128,699 | Apr. 09, 1999 |
| US09/950,082 | Continuation-in-part of | PCT/US00/08981 | Apr. 06, 2000 |
| US00/08981 | Non-provisional of | US60/177,166 | Jan. 20, 2000 |
| US00/08981 | Non-provisional of | US60/128,701 | Apr. 09, 1999 |
| US09/950,082 | Continuation-in-part of | PCT/US00/08980 | Apr. 06, 2000 |
| US00/08980 | Non-provisional of | US60/176,930 | Jan. 20, 2000 |
| US00/08980 | Non-provisional of | US60/128,700 | Apr. 09, 1999 |
| US09/950,082 | Continuation-in-part of | PCT/US00/09071 | Apr. 06, 2000 |
| US00/09071 | Non-provisional of | US60/176,931 | Jan. 20, 2000 |
| US00/09071 | Non-provisional of | US60/128,694 | Apr. 09, 1999 |
| US09/950,082 | Continuation-in-part of | PCT/US00/09069 | Apr. 06, 2000 |
| US00/09069 | Non-provisional of | US60/177,049 | Jan. 20, 2000 |
| US00/09069 | Non-provisional of | US60/128,702 | Apr. 09, 1999 |
| US09/950,082 | Continuation-in-part of | PCT/US00/15136 | Jun. 01, 2000 |
| US00/15136 | Non-provisional of | US60/138,629 | Jun. 11, 1999 |
| US09/950,082 | Continuation-in-part of | PCT/US00/14926 | Jun. 01, 2000 |
| US00/14926 | Non-provisional of | US60/138,628 | Jun. 11, 1999 |
| US09/950,082 | Continuation-in-part of | PCT/US00/14963 | Jun. 01, 2000 |
| US00/14963 | Non-provisional of | US60/138,631 | Jun. 11 1999 |
| US09/950,082 | Continuation-in-part of | PCT/US00/15135 | Jun. 01, 2000 |
| US00/15135 | Non-provisional of | US60/138,632 | Jun. 11 1999 |
| US09/950,082 | Continuation-in-part of | PCT/US00/14934 | Jun. 01, 2000 |
| US00/14934 | Non-provisional of | US60/138,599 | Jun. 11 1999 |
| US09/950,082 | Continuation-in-part of | PCT/US00/14933 | Jun. 01, 2000 |
| US00/14933 | Non-provisional of | US60/138,572 | Jun. 11 1999 |
| US09/950,082 | Continuation-in-part of | PCT/US00/15137 | Jun. 01, 2000 |
| US00/15137 | Non-provisional of | US60/138,625 | Jun. 11 1999 |
| US09/950,082 | Continuation-in-part of | PCT/US00/14928 | Jun. 01, 2000 |
| US00/14928 | Non-provisional of | US60/138,633 | Jun. 11 1999 |
| US09/950,082 | Continuation-in-part of | PCT/US00/14973 | Jun. 01, 2000 |
| US00/14973 | Non-provisional of | US60/,138,630 | Jun. 11 1999 |
| US09/950,082 | Continuation-in-part of | PCT/US00/14964 | Jun. 01, 2000 |
| US00/14964 | Non-provisional of | US60/138,627 | Jun. 11 1999 |
| US09/950,082 | Continuation-in-part of | PCT/US00/26376 | Sep. 26, 2000 |
| US00/26376 | Non-provisional of | US60/155,808 | Sep. 27, 1999 |
| US09/950,082 | Continuation-in-part of | PCT/US00/26371 | Sep. 26, 2000 |
| US00/26371 | Non-provisional of | US60/155,804 | Sep. 27, 1999 |
| US09/950,082 | Continuation-in-part of | PCT/US00/26324 | Sep. 26, 2000 |
| US00/26324 | Non-provisional of | US60/155,807 | Sep. 27, 1999 |
| US09/950,082 | Continuation-in-part of | PCT/US00/26323 | Sep. 26, 2000 |
| US00/26323 | Non-provisional of | US60/155,805 | Sep. 27, 1999 |
| US09/950,082 | Continuation-in-part of | PCT/US00/26337 | Sep. 26, 2000 |
| US00/26337 | Non-provisional of | US60/155,806 | Sep. 27, 1999 |
| US09/950,082 | Continuation-in-part of | US01/13318 | Apr. 27, 2001 |
| US01/13318 | Non-provisional of | US60/212,142 | Jun. 16, 2000 |
| US01/13318 | Non-provisional of | US60/201,194 | May 02, 2000 |
| 10/105,299 | Continuation-in-part of | US09/950,083 | Sep. 12, 2001 |
| US09/950,083 | Non-provisional of | US60/278,650 | Mar. 27, 2001 |
| US09/950,083 | Continuation-in-part of | PCT/US00/06043 | Mar. 09, 2000 |
| US00/06043 | Non-provisional of | US60/167,061 | Nov. 23, 1999 |
| US00/06043 | Non-provisional of | US60/124,146 | Mar. 12, 1999 |
| US09/950,083 | Continuation-in-part of | PCT/US00/06012 | Mar. 09, 2000 |
| US00/06012 | Non-provisional of | US60/166,989 | Nov. 23, 1999 |
| US00/06012 | Non-provisional of | US60/124,093 | Mar. 12, 1999 |
| US09/950,083 | Continuation-in-part of | PCT/US00/06058 | Mar. 09, 2000 |
| US00/06058 | Non-provisional of | US60/168,654 | Dec. 03, 1999 |
| US00/06058 | Non-provisional of | US60/124,145 | Mar. 12, 1999 |
| US09/950,083 | Continuation-in-part of | PCT/US00/06044 | Mar. 09, 2000 |
| US00/06044 | Non-provisional of | US60/168,661 | Dec. 03, 1999 |
| US00/06044 | Non-provisional of | US60/124,099 | Mar. 12, 1999 |
| US09/950,083 | Continuation-in-part of | PCT/US00/06059 | Mar. 09, 2000 |
| US00/06059 | Non-provisional of | US60/168,622 | Dec. 03, 1999 |
| US00/06059 | Non-provisional of | US60/124,096 | Mar. 12, 1999 |
| US09/950,083 | Continuation-in-part of | PCT/US00/06042 | Mar. 09, 2000 |
| US00/06042 | Non-provisional of | US60/168,663 | Dec. 03, 1999 |
| US00/06042 | Non-provisional of | US60/124,143 | Mar. 12, 1999 |
| US09/950,083 | Continuation-in-part of | PCT/US00/06014 | Mar. 09, 2000 |
| US00/06014 | Non-provisional of | US60/168,665 | Dec. 03, 1999 |
| US00/06014 | Non-provisional of | US60/138,598 | Jun. 11, 1999 |
| US00/06014 | Non-provisional of | US60/124,095 | Mar. 12, 1999 |
| US09/950,083 | Continuation-in-part of | PCT/US00/06013 | Mar. 09, 2000 |
| US00/06013 | Non-provisional of | US60/168,662 | Dec. 03, 1999 |
| US00/06013 | Non-provisional of | US60/138,626 | Jun. 11, 1999 |
| US00/06013 | Non-provisional of | US60/125,360 | Mar. 19, 1999 |
| US09/950,083 | Continuation-in-part of | PCT/US00/06049 | Mar. 09, 2000 |
| US00/06049 | Non-provisional of | US60/168,667 | Dec. 03, 1999 |
| US00/06049 | Non-provisional of | US60/138,574 | Jun. 11, 1999 |
| US00/06049 | Non-provisional of | US60/124,144 | Mar. 12, 1999 |
| US09/950,083 | Continuation-in-part of | PCT/US00/06057 | Mar. 09, 2000 |
| US00/06057 | Non-provisional of | US60/168,666 | Dec. 03, 1999 |
| US00/06057 | Non-provisional of | US60/138,597 | Jun. 11, 1999 |
| US00/06057 | Non-provisional of | US60/124,142 | Mar. 12, 1999 |
| US09/950,083 | Continuation-in-part of | PCT/US00/06824 | Mar. 16, 2000 |
| US00/06824 | Non-provisional of | US60/168,664 | Dec. 03, 1999 |
| US00/06824 | Non-provisional of | US60/125,359 | Mar. 19, 1999 |
| US09/950,083 | Continuation-in-part of | PCT/US00/06765 | Mar. 16, 2000 |
| US00/06765 | Non-provisional of | US60/169,906 | Dec. 10, 1999 |
| US00/06765 | Non-provisional of | US60/126,051 | Mar. 23, 1999 |
| US09/950,083 | Continuation-in-part of | PCT/US00/06792 | Mar. 16, 2000 |
| US00/06792 | Non-provisional of | US60/169,980 | Dec. 10, 1999 |
| US00/06792 | Non-provisional of | US60/125,362 | Mar. 19, 1999 |
| US09/950,083 | Continuation-in-part of | PCT/US00/06830 | Mar. 16, 2000 |
| US00/06830 | Non-provisional of | US60/169,910 | Dec. 10, 1999 |
| US00/06830 | Non-provisional of | US60/125,361 | Mar. 19, 1999 |
| US09/950,083 | Continuation-in-part of | PCT/US00/06782 | Mar. 16, 2000 |
| US00/06782 | Non-provisional of | US60/169,936 | Dec. 10, 1999 |
| US00/06782 | Non-provisional of | US60/125,812 | Mar. 23, 1999 |
| US09/950,083 | Continuation-in-part of | PCT/US00/06822 | Mar. 16, 2000 |
| US00/06822 | Non-provisional of | US60/169,916 | Dec. 10, 1999 |
| US00/06822 | Non-provisional of | US60/126,054 | Mar. 23, 1999 |
| US09/950,083 | Continuation-in-part of | PCT/US00/06791 | Mar. 16, 2000 |
| US00/06791 | Non-provisional of | US60/169,946 | Dec. 10, 1999 |
| US00/06791 | Non-provisional of | US60/125,815 | Mar. 23, 1999 |
| US09/950,083 | Continuation-in-part of | PCT/US00/06828 | Mar. 16, 2000 |
| US00/06828 | Non-provisional of | US60/169,616 | Dec. 08, 1999 |
| US00/06828 | Non-provisional of | US60/125,358 | Mar. 19, 1999 |
| US09/950,083 | Continuation-in-part of | PCT/US00/06823 | Mar. 16, 2000 |
| US00/06823 | Non-provisional of | US60/169,623 | Dec. 08, 1999 |
| US00/06823 | Non-provisional of | US60/125,364 | Mar. 19, 1999 |
| US09/950,083 | Continuation-in-part of | PCT/US00/06781 | Mar. 16, 2000 |
| US00/06781 | Non-provisional of | US60/169,617 | Dec. 08, 1999 |
| US00/06781 | Non-provisional of | US60/125,363 | Mar. 19, 1999 |
| US09/950,083 | Continuation-in-part of | PCT/US00/07505 | Mar. 22, 2000 |
| US00/07505 | Non-provisional of | US60/172,410 | Dec. 17, 1999 |
| US00/07505 | Non-provisional of | US60/126,502 | Mar. 26, 1999 |
| US09/950,083 | Continuation-in-part of | PCT/US00/07440 | Mar. 22, 2000 |
| US00/07440 | Non-provisional of | US60/172,409 | Dec. 17, 1999 |
| US00/07440 | Non-provisional of | US60/126,503 | Mar. 26, 1999 |
| US09/950,083 | Continuation-in-part of | PCT/US00/07506 | Mar. 22, 2000 |
| US00/07506 | Non-provisional of | US60/172,412 | Dec. 17, 1999 |
| US00/07506 | Non-provisional of | US60/126,505 | Mar. 26, 1999 |
| US09/950,083 | Continuation-in-part of | PCT/US00/07507 | Mar. 22, 2000 |
| US00/07507 | Non-provisional of | US60/172,408 | Dec. 17, 1999 |
| US00/07507 | Non-provisional of | US60/126,594 | Mar. 26, 1999 |
| US09/950,083 | Continuation-in-part of | PCT/US00/07535 | Mar. 22, 2000 |
| US00/07535 | Non-provisional of | US60/172,413 | Dec. 17, 1999 |
| US00/07535 | Non-provisional of | US60/126,511 | Mar. 26, 1999 |
| US09/950,083 | Continuation-in-part of | PCT/US00/07525 | Mar. 22, 2000 |
| US00/07525 | Non-provisional of | US60/171,549 | Dec. 22, 1999 |
| US00/07525 | Non-provisional of | US60/126,595 | Mar. 26, 1999 |
| US09/950,083 | Continuation-in-part of | PCT/US00/07534 | Mar. 22, 2000 |
| US00/07534 | Non-provisional of | US60/171,504 | Dec. 22, 1999 |
| US00/07534 | Non-provisional of | US60/126,598 | Mar. 26, 1999 |
| US09/950,083 | Continuation-in-part of | PCT/US00/07483 | Mar. 22, 2000 |
| US00/07483 | Non-provisional of | US60/171,552 | Dec. 22, 1999 |
| US00/07483 | Non-provisional of | US60/126,596 | Mar. 26, 1999 |
| US09/950,083 | Continuation-in-part of | PCT/US00/07526 | Mar. 22, 2000 |
| US00/07526 | Non-provisional of | US60/171,550 | Dec. 22, 1999 |
| US00/07526 | Non-provisional of | US60/126,600 | Mar. 26, 1999 |
| US09/950,083 | Continuation-in-part of | PCT/US00/07527 | Mar. 22, 2000 |
| US00/07527 | Non-provisional of | US60/171,551 | Dec. 22, 1999 |
| US00/07527 | Non-provisional of | US60/126,501 | Mar. 26, 1999 |
| US09/950,083 | Continuation-in-part of | PCT/US00/07661 | Mar. 23, 2000 |
| US00/07661 | Non-provisional of | US60/174,847 | Jan. 07, 2000 |
| US00/07661 | Non-provisional of | US60/126,504 | Mar. 26, 1999 |
| US09/950,083 | Continuation-in-part of | PCT/US00/07579 | Mar. 23, 2000 |
| US00/07579 | Non-provisional of | US60/174,853 | Jan. 07, 2000 |
| US00/07579 | Non-provisional of | US60/126,509 | Mar. 26, 1999 |
| US09/950,083 | Continuation-in-part of | PCT/US00/07723 | Mar. 23, 2000 |
| US00/07723 | Non-provisional of | US60/242,710 | Oct. 25, 2000 |
| US00/07723 | Non-provisional of | US60/174,852 | Jan. 07, 2000 |
| US00/07723 | Non-provisional of | US60/126,506 | Mar. 26, 1999 |
| US09/950,083 | Continuation-in-part of | PCT/US00/07724 | Mar. 23, 2000 |
| US00/07724 | Non-provisional of | US60/174,850 | Jan. 07, 2000 |
| US00/07724 | Non-provisional of | US60/126,510 | Mar. 26, 1999 |
| US09/950,083 | Continuation-in-part of | PCT/US00/14929 | Jun. 01, 2000 |
| US00/14929 | Non-provisional of | US60/174,851 | Jan. 07, 2000 |
| US00/14929 | Non-provisional of | US60/138,573 | Jun. 11, 1999 |
| US09/950,083 | Continuation-in-part of | PCT/US00/07722 | Mar. 23, 2000 |
| US00/07722 | Non-provisional of | US60/174,871 | Jan. 07, 2000 |
| US00/07722 | Non-provisional of | US60/126,508 | Mar. 26, 1999 |
| US09/950,083 | Continuation-in-part of | PCT/US00/07578 | Mar. 23, 2000 |
| US00/07578 | Non-provisional of | US60/174,872 | Jan. 07, 2000 |
| US00/07578 | Non-provisional of | US60/126,507 | Mar. 26, 1999 |
| US09/950,083 | Continuation-in-part of | PCT/US00/07726 | Mar. 23, 2000 |
| US00/07726 | Non-provisional of | US60/174,877 | Jan. 07, 2000 |
| US00/07726 | Non-provisional of | US60/126,597 | Mar. 26, 1999 |
| US09/950,083 | Continuation-in-part of | PCT/US00/07677 | Mar. 23, 2000 |
| US00/07677 | Non-provisional of | US60/176,064 | Jan. 14, 2000 |
| US00/07677 | Non-provisional of | US60/154,373 | Sep. 17, 1999 |
| US00/07677 | Non-provisional of | US60/126,601 | Mar. 26, 1999 |
| US09/950,083 | Continuation-in-part of | PCT/US00/07725 | Mar. 23, 2000 |
| US00/07725 | Non-provisional of | US60/176,063 | Jan. 14, 2000 |
| US00/07725 | Non-provisional of | US60/126,602 | Mar. 26, 1999 |
| US09/950,083 | Continuation-in-part of | PCT/US00/09070 | Apr. 06, 2000 |
| US00/09070 | Non-provisional of | US60/176,052 | Jan. 14, 2000 |
| US00/09070 | Non-provisional of | US60/128,695 | Apr. 09, 1999 |
| US09/950,083 | Continuation-in-part of | PCT/US00/08982 | Apr. 06, 2000 |
| US00/08982 | Non-provisional of | US60/176,069 | Jan. 14, 2000 |
| US00/08982 | Non-provisional of | US60/128,696 | Apr. 09, 1999 |
| US09/950,083 | Continuation-in-part of | PCT/US00/08983 | Apr. 06, 2000 |
| US00/08983 | Non-provisional of | US60/176,068 | Jan. 14, 2000 |
| US00/08983 | Non-provisional of | US60/128,703 | Apr. 09, 1999 |
| US09/950,083 | Continuation-in-part of | PCT/US00/09067 | Apr. 06, 2000 |
| US00/09067 | Non-provisional of | US60/176,929 | Jan. 20, 2000 |
| US00/09067 | Non-provisional of | US60/128,697 | Apr. 09, 1999 |
| US09/950,083 | Continuation-in-part of | PCT/US00/09066 | Apr. 06, 2000 |
| US00/09066 | Non-provisional of | US60/176,926 | Jan. 20, 2000 |
| US00/09066 | Non-provisional of | US60/128,698 | Apr. 09, 1999 |
| US09/950,083 | Continuation-in-part of | PCT/US00/09068 | Apr. 06, 2000 |
| US00/09068 | Non-provisional of | US60/177,050 | Jan. 20, 2000 |
| US00/09068 | Non-provisional of | US60/128,699 | Apr. 09, 1999 |
| US09/950,083 | Continuation-in-part of | PCT/US00/08981 | Apr. 06, 2000 |
| US00/08981 | Non-provisional of | US60/177,166 | Jan. 20, 2000 |
| US00/08981 | Non-provisional of | US60/128,701 | Apr. 09, 1999 |
| US09/950,083 | Continuation-in-part of | PCT/US00/08980 | Apr. 06, 2000 |
| US00/08980 | Non-provisional of | US60/176,930 | Jan. 20, 2000 |
| US00/08980 | Non-provisional of | US60/128,700 | Apr. 09, 1999 |
| US09/950,083 | Continuation-in-part of | PCT/US00/09071 | Apr. 06, 2000 |
| US00/09071 | Non-provisional of | US60/176,931 | Jan. 20, 2000 |
| US00/09071 | Non-provisional of | US60/128,694 | Apr. 09, 1999 |
| US09/950,083 | Continuation-in-part of | PCT/US00/09069 | Apr. 06, 2000 |
| US00/09069 | Non-provisional of | US60/177,049 | Jan. 20, 2000 |
| US00/09069 | Non-provisional of | US60/128,702 | Apr. 09, 1999 |
| US09/950,083 | Continuation-in-part of | PCT/US00/15136 | Jun. 01, 2000 |
| US00/15136 | Non-provisional of | US60/138,629 | Jun. 11, 1999 |
| US09/950,083 | Continuation-in-part of | PCT/US00/14926 | Jun. 01, 2000 |
| US00/14926 | Non-provisional of | US60/138,628 | Jun. 11, 1999 |
| US09/950,083 | Continuation-in-part of | PCT/US00/14963 | Jun. 01, 2000 |
| US00/14963 | Non-provisional of | US60/138,631 | Jun. 11, 1999 |
| US09/950,083 | Continuation-in-part of | PCT/US00/15135 | Jun. 01, 2000 |
| US00/15135 | Non-provisional of | US60/138,632 | Jun. 11, 1999 |
| US09/950,083 | Continuation-in-part of | PCT/US00/14934 | Jun. 01, 2000 |
| US00/14934 | Non-provisional of | US60/138,599 | Jun. 11, 1999 |
| US09/950,083 | Continuation-in-part of | PCT/US00/14933 | Jun. 01, 2000 |
| US00/14933 | Non-provisional of | US60/138,572 | Jun. 11, 1999 |
| US09/950,083 | Continuation-in-part of | PCT/US00/15137 | Jun. 01, 2000 |
| US00/15137 | Non-provisional of | US60/138,625 | Jun. 11, 1999 |
| US09/950,083 | Continuation-in-part of | PCT/US00/14928 | Jun. 01, 2000 |
| US00/14928 | Non-provisional of | US60/138,633 | Jun. 11, 1999 |
| US09/950,083 | Continuation-in-part of | PCT/US00/14973 | Jun. 01, 2000 |
| US00/14973 | Non-provisional of | US60/,138,630 | Jun. 11, 1999 |
| US09/950,083 | Continuation-in-part of | PCT/US00/14964 | Jun. 01, 2000 |
| US00/14964 | Non-provisional of | US60/138,627 | Jun. 11, 1999 |
| US09/950,083 | Continuation-in-part of | PCT/US00/26376 | Sep. 26, 2000 |
| US00/26376 | Non-provisional of | US60/155,808 | Sep. 27, 1999 |
| US09/950,083 | Continuation-in-part of | PCT/US00/26371 | Sep. 26, 2000 |
| US00/26371 | Non-provisional of | US60/155,804 | Sep. 27, 1999 |
| US09/950,083 | Continuation-in-part of | PCT/US00/26324 | Sep. 26, 2000 |
| US00/26324 | Non-provisional of | US60/155,807 | Sep. 27, 1999 |
| US09/950,083 | Continuation-in-part of | PCT/US00/26323 | Sep. 26, 2000 |
| US00/26323 | Non-provisional of | US60/155,805 | Sep. 27, 1999 |
| US09/950,083 | Continuation-in-part of | PCT/US00/26337 | Sep. 26, 2000 |
| US00/26337 | Non-provisional of | US60/155,806 | Sep. 27, 1999 |
| US09/950,083 | Continuation-in-part of | US01/13318 | Apr. 27, 2001 |
| US01/13318 | Non-provisional of | US60/212,142 | Jun. 16, 2000 |
| US01/13318 | Non-provisional of | US60/201,194 | May 02, 2000 |

wherein each of the above applications are all herein incorporated by reference in their entirety.

### FIELD OF THE INVENTION

[0002] The present invention relates to human secreted proteins/polypeptides, and isolated nucleic acid molecules encoding said proteins/polypeptides, useful for detecting, preventing, diagnosing, prognosticating, treating, and/or ameliorating immune disorders and diseases. Antibodies that bind these polypeptides are also encompassed by the present invention. Also encompassed by the invention are vectors, host cells, and recombinant and synthetic methods for producing said polynucleotides, polypeptides, and/or antibodies. The invention further encompasses screening methods for identifying agonists and antagonists of polynucleotides and polypeptides of the invention. The present invention further encompasses methods and compositions for inhibiting or enhancing the production and function of the polypeptides of the present invention.

### BACKGROUND OF THE INVENTION

[0003] The immune system is an intricate network of cells, tissues and soluble molecules that unction to protect the body from invasion by foreign substances and pathogens. The major cells of the immune system are lymphocytes, including B cells and T cells, and myeloid cells, including basophils, eosinophils, neutrophils, mast cells, monocytes, macrophages and dendritic cells. In addition to these cellular components of the immune system, soluble molecules—such as antibodies, complement proteins, and cytokines—circulate in lymph and blood plasma, and play important roles in immunity.

[0004] The immune system can be subdivided into the acquired and innate immune systems. The cells of the innate immune system (e.g., neutrophils, eosinophils, basophils, mast cells) are not antigen specific and their action is not enhanced by repeated exposure to the same antigen. The cells of the acquired immune system (B and T cells) are antigen specific. Repeated exposure of B and T cells to an antigen results in improved immune responses (memory responses) produced by these cell types. The cells and products of the acquired immune system can recruit components of the innate system to mount a focused immune response. For a more extensive review of the immune system, see Fundamental Immunology, 4th edition, Ed. William Paul, Lippincott-Raven Pub. (1998).

[0005] An immune response is seldom carried out by a single cell type, but rather requires the coordinated efforts of several cell types. In order to coordinate an immune response, it is necessary that cells of the immune system communicate with each other and with other cells of the body. Communication between cells may be made by cell-cell contact, between membrane bound molecules on each cell, or by the interaction of soluble components of the immune system with cellular receptors. Signaling between cell types may have one or more of a variety of consequences, including activation, proliferation, differentiation, and apoptosis. Activation and differentiation of immune cells may result in the expression or secretion of polypeptides, or other molecules, which in turn affect the function of other cells and/or molecules of the immune system.

[0006] Molecules which stimulate or suppress immune system function are known as immunomodulators. These molecules, which include endogenous proteins (e.g., cytokines, cytokine receptors, and intracellular signal transduction molecules), molecules derived from microorganisms, and synthetic agents, may exert their modulatory effects at one or more stages of the immune response, such as antigen recognition, stimulation of cytokine production and release, and/or activation/differentiation of lymphocytes and myeloid cells. Immunomodulators may enhance (immunoprophylaxis, immunostimulation), restore (immunosubstitution, immunorestoration) or suppress (immunosuppression, immunodeviation) immunological functions or activities.

[0007] Immunomodulatory compounds have many important applications in clinical practice. For example, immunosuppressing agents (which attenuate or prevent unwanted immune responses) can be used to prevent tissue rejection during organ transplantation, to prevent Rh hemolytic disease of the newborn, or to treat autoimmune disorders. A mechanism of action common to many immunosuppressants is the inhibition of T cell activation and/or differentiation. Antilymphocyte antibodies have also been used to attenuate immune system functions. Currently-used immunosuppressive agents can produce a number of side effects which limit their use. Among the most serious secondary effects include kidney and liver toxicity, increased risk of infection, hyperglycemia, neoplasia, and osteoporosis (see, e.g., Freeman, Clin. Biochem. 24(1):9-14 (1991); Mitchison, Dig. Dis. 1 (2):78-101 (1993)).

[0008] Immunostimulants, which enhance the activity of immune cells and molecules, comprise another class of immunomodulatory agents with important clinical applications. Such applications include, for example, the treatment of immunodeficiency disorders (e.g. AIDS and severe combined immunodeficiency), chronic infectious diseases (e.g. viral hepatitis, papillomavirus, and herpesvirus), and cancer. An important class of endogenous immunostimulants is the cytokines. These soluble signaling molecules are produced by a number of cell types, and are critical to the regulation of the immune response. Immunostimulatory mechanisms can include proliferation, differentiation and/or activation of immune cells or progenitors of immune cells. For example, interleukin-2 (IL-2) binds to IL-2 receptors on T lymphocytes and induces proliferation and differentiation. Another cytokine, interferon alpha, stimulates the immune system through a variety of mechanisms, including activation of macrophages, T lymphocytes, and natural killer cells. Interferon alpha also induces the expression of antiviral proteins (see Chapter 50, The Pharmacological Basis of Therapeutics, 9^{th} Edition, Eds. Hardman, Limbird, Molinoff, Ruddon, and Gilman, McGraw Hill (1996)). Limitations of current immunostimulant therapies include anaphylaxis, pulmonary edema, and renal toxicity, to name a few.

[0009] The discovery of new human immune related polynucleotides, the polypeptides encoded by them, and antibodies that immunospecifically bind these polypeptides, satisfies a need in the art by providing new compositions which are useful in the diagnosis, treatment, prevention and/or prognosis of disorders of the immune system, including, but not limited to, autoimmune disorders (e.g., systemic lupus erythematosus, rheumatoid arthritis, idiopathic thrombocytopenic purpura and multiple sclerosis), immunodeficiencies (e.g., X-linked agammaglobulinemia, severe combined immunodeficiency, Wiskott-Aldrich syndrome, and ataxia telangiectasia), chronic infections (e.g., HIV, viral hepatitis, and herpesvirus), and neoplastic disorders. See, e.g. “Immune Activity” section infra. Additionally, immune related molecules would be useful as agents to boost immune responsiveness to pathogens or to suppress immune reactions, for example as is necessary in conjunction with organ transplantation.

### SUMMARY OF THE INVENTION

[0010] The present invention encompasses human secreted proteins/polypeptides, and isolated nucleic acid molecules encoding said proteins/polypeptides, useful for detecting, preventing, diagnosing, prognosticating, treating, and/or ameliorating immune diseases and disorders. Antibodies that bind these polypeptides are also encompassed by the present invention; as are vectors, host cells, and recombinant and synthetic methods for producing said polynucleotides, polypeptides, and/or antibodies. The invention further encompasses screening methods for identifying agonists and antagonists of polynucleotides and polypeptides of the invention. The present invention also encompasses methods and compositions for inhibiting or enhancing the production and function of the polypeptides of the present invention.

### DETAILED DESCRIPTION

Polynucleotides and Polypeptides of the Invention

Description of Table 1A

[0011] Table 1A summarizes information concerning certain polypnucleotides and polypeptides of the invention. The first column provides the gene number in the application for each clone identifier. The second column provides a unique clone identifier, “Clone ID:”, for a cDNA clone related to each contig sequence disclosed in Table 1A. Third column, the cDNA Clones identified in the second column were deposited as indicated in the third column (i.e. by ATCC Deposit No:Z and deposit date). Some of the deposits contain multiple different clones corresponding to the same gene. In the fourth column, “Vector” refers to the type of vector contained in the corresponding cDNA Clone identified in the second column. In the fifth column, the nucleotide sequence identified as “NT SEQ ID NO:X” was assembled from partially homologous (“overlapping”) sequences obtained from the corresponding cDNA clone identified in the second column and, in some cases, from additional related cDNA clones. The overlapping sequences were assembled into a single contiguous sequence of high redundancy (usually three to five overlapping sequences at each nucleotide position), resulting in a final sequence identified as SEQ ID NO:X. In the sixth column, “Total NT Seq.” refers to the total number of nucleotides in the contig sequence identified as SEQ ID NO:X.” The deposited clone may contain all or most of these sequences, reflected by the nucleotide position indicated as “5′ NT of Clone Seq.” (seventh column) and the “3′ NT of Clone Seq.” (eighth column) of SEQ ID NO:X. In the ninth column, the nucleotide position of SEQ ID NO:X of the putative start codon (methionine) is identified as “5′ NT of Start Codon.” Similarly, in column ten, the nucleotide position of SEQ ID NO:X of the predicted signal sequence is identified as “5′ NT of First AA of Signal Pep.” In the eleventh column, the translated amino acid sequence, beginning with the methionine, is identified as “AA SEQ ID NO:Y,” although other reading frames can also be routinely translated using known molecular biology techniques. The polypeptides produced by these alternative open reading frames are specifically contemplated by the present invention.

[0012] In the twelfth and thirteenth columns of Table 1A, the first and last amino acid position of SEQ ID NO:Y of the predicted signal peptide is identified as “First AA of Sig Pep” and “Last AA of Sig Pep.” In the fourteenth column, the predicted first amino acid position of SEQ ID NO:Y of the secreted portion is identified as “Predicted First AA of Secreted Portion”. The amino acid position of SEQ ID NO:Y of the last amino acid encoded by the open reading frame is identified in the fifteenth column as “Last AA of ORF”.

[0013] SEQ ID NO:X (where X may be any of the polynucleotide sequences disclosed in the sequence listing) and the translated SEQ ID NO:Y (where Y may be any of the polypeptide sequences disclosed in the sequence listing) are sufficiently accurate and otherwise suitable for a variety of uses well known in the art and described further below. For instance, SEQ ID NO:X is useful for designing nucleic acid hybridization probes that will detect nucleic acid sequences contained in SEQ ID NO:X or the cDNA contained in the deposited clone. These probes will also hybridize to nucleic acid molecules in biological samples, thereby enabling a variety of forensic and diagnostic methods of the invention. Similarly, polypeptides identified from SEQ ID NO:Y may be used, for example, to generate antibodies which bind specifically to proteins containing the polypeptides and the secreted proteins encoded by the cDNA clones identified in Table 1A and/or elsewhere herein

[0014] Nevertheless, DNA sequences generated by sequencing reactions can contain sequencing errors. The errors exist as misidentified nucleotides, or as insertions or deletions of nucleotides in the generated DNA sequence. The erroneously inserted or deleted nucleotides cause frame shifts in the reading frames of the predicted amino acid sequence. In these cases, the predicted amino acid sequence diverges from the actual amino acid sequence, even though the generated DNA sequence may be greater than 99.9% identical to the actual DNA sequence (for example, one base insertion or deletion in an open reading frame of over 1000 bases).

[0015] Accordingly, for those applications requiring precision in the nucleotide sequence or the amino acid sequence, the present invention provides not only the generated nucleotide sequence identified as SEQ ID NO:X, and the predicted translated amino acid sequence identified as SEQ ID NO:Y, but also a sample of plasmid DNA containing a human cDNA of the invention deposited with the ATCC, as set forth in Table 1A. The nucleotide sequence of each deposited plasmid can readily be determined by sequencing the deposited plasmid in accordance with known methods

[0016] The predicted amino acid sequence can then be verified from such deposits. Moreover, the amino acid sequence of the protein encoded by a particular plasmid can also be directly determined by peptide sequencing or by expressing the protein in a suitable host cell containing the deposited human cDNA, collecting the protein, and determining its sequence.

[0017] Also provided in Table 1A is the name of the vector which contains the cDNA plasmid. Each vector is routinely used in the art. The following additional information is provided for convenience.

[0018] Vectors Lambda Zap (U.S. Pat. Nos. 5,128,256 and 5,286,636), Uni-Zap XR (U.S. Pat. Nos. 5,128,256 and 5,286,636), Zap Express (U.S. Pat. Nos. 5,128,256 and 5,286,636), pBluescript (pBS) (Short, J. M. et al., Nucleic Acids Res. 16:7583-7600 (1988); Alting-Mees, M. A. and Short, J. M., Nucleic Acids Res. 17:9494 (1989)) and pBK (Alting-Mees, M. A. et al., Strategies 5:58-61 (1992)) are commercially available from Stratagene Cloning Systems, Inc., 11011 N. Torrey Pines Road, La Jolla, Calif., 92037. pBS contains an ampicillin resistance gene and pBK contains a neomycin resistance gene. Phagemid pBS may be excised from the Lambda Zap and Uni-Zap XR vectors, and phagemid pBK may be excised from the Zap Express vector. Both phagemids may be transformed into E. coli strain XL-1 Blue, also available from Stratagene

[0019] Vectors pSport1, pCMVSport 1.0, pCMVSport 2.0 and pCMVSport 3.0, were obtained from Life Technologies, Inc., P.O. Box 6009, Gaithersburg, Md. 20897. All Sport vectors contain an ampicillin resistance gene and may be transformed into E. coli strain DH10B, also available from Life Technologies. See, for instance, Gruber, C. E., et al., Focus 15:59 (1993). Vector lafmid BA (Bento Soares, Columbia University, New York, N.Y.) contains an ampicillin resistance gene and can be transformed into E. coli strain XL-1 Blue. Vector pCR® 2.1, which is available from Invitrogen, 1600 Faraday Avenue, Carlsbad, Calif. 92008, contains an ampicillin resistance gene and may be transformed into E. coli strain DH10B, available from Life Technologies. See, for instance, Clark, J. M., Nuc. Acids Res. 16:9677-9686 (1988) and Mead, D. et al., Bio/Technology 9: (1991).

[0020] The present invention also relates to the genes corresponding to SEQ ID NO:X, SEQ ID NO:Y, and/or a deposited cDNA (cDNA Clone ID). The corresponding gene can be isolated in accordance with known methods using the sequence information disclosed herein. Such methods include, but are not limited to, preparing probes or primers from the disclosed sequence and identifying or amplifying the corresponding gene from appropriate sources of genomic material.

[0021] Also provided in the present invention are allelic variants, orthologs, and/or species homologs. Procedures known in the art can be used to obtain full-length genes, allelic variants, splice variants, full-length coding portions, orthologs, and/or species homologs of genes corresponding to SEQ ID NO:X and SEQ ID NO:Y using information from the sequences disclosed herein or the clones deposited with the ATCC. For example, allelic variants and/or species homologs may be isolated and identified by making suitable probes or primers from the sequences provided herein and screening a suitable nucleic acid source for allelic variants and/or the desired homologue.

[0022] The present invention provides a polynucleotide comprising, or alternatively consisting of, the nucleic acid sequence of SEQ ID NO:X and/or a cDNA contained in ATCC Deposit No.Z. The present invention also provides a polypeptide comprising, or alternatively, consisting of, the polypeptide sequence of SEQ ID NO:Y, a polypeptide encoded by SEQ ID NO:X, and/or a polypeptide encoded by a cDNA contained in ATCC deposit No.Z. Polynucleotides encoding a polypeptide comprising, or alternatively consisting of the polypeptide sequence of SEQ ID NO:Y, a polypeptide encoded by SEQ ID NO:X and/or a polypeptide encoded by the cDNA contained in ATCC Deposit No.Z, are also encompassed by the invention. The present invention further encompasses a polynucleotide comprising, or alternatively consisting of the complement of the nucleic acid sequence of SEQ ID NO:X, and/or the complement of the coding strand of the cDNA contained in ATCC Deposit No.Z.

Description of Table 1B (Comprised of Tables 1B.1 and 1B.2)

[0023] Table 1B.1 and Table 1B.2 summarize some of the polynucleotides encompassed by the invention (including cDNA clones related to the sequences (Clone ID:), contig sequences (contig identifier (Contig ID:) and contig nucleotide sequence identifiers (SEQ ID NO:X)) and further summarizes certain characteristics of these polynucleotides and the polypeptides encoded thereby. The first column of Tables 1B.1 and 1B.2 provide the gene numbers in the application for each clone identifier. The second column of Tables 1B.1 and 1B.2 provide unique clone identifiers, “Clone ID:”, for cDNA clones related to each contig sequence disclosed in Table 1A and/or Table 1B. The third column of Tables 1B.1 and 1B.2 provide unique contig identifiers, “Contig ID:” for each of the contig sequences disclosed in these tables. The fourth column of Tables 1B.1 and 1B.2 provide the sequence identifiers, “SEQ ID NO:X”, for each of the contig sequences disclosed in Table 1A and/or 1B.

[0024] Table 1B.1

[0025] The fifth column of Table 1B.1, “ORF (From-To)”, provides the location (i.e., nucleotide position numbers) within the polynucleotide sequence of SEQ ID NO:X that delineates the preferred open reading frame (ORF) that encodes the amino acid sequence shown in the sequence listing and referenced in Table 1B.1 as SEQ ID NO:Y (column 6). Column 7 of Table 1B.1 lists residues comprising predicted epitopes contained in the polypeptides encoded by each of the preferred ORFs (SEQ ID NO:Y). Identification of potential immunogenic regions was performed according to the method of Jameson and Wolf (CABIOS, 4; 181-186 (1988)); specifically, the Genetics Computer Group (GCG) implementation of this algorithm, embodied in the program PEPTIDESTRUCTURE (Wisconsin Package v10.0, Genetics Computer Group (GCG), Madison, Wis.). This method returns a measure of the probability that a given residue is found on the surface of the protein. Regions where the antigenic index score is greater than 0.9 over at least 6 amino acids are indicated in Table 1B.1 as “Predicted Epitopes”. In particular embodiments, polypeptides of the invention comprise, or alternatively consist of, one, two, three, four, five or more of the predicted epitopes described in Table 1B.1. It will be appreciated that depending on the analytical criteria used to predict antigenic determinants, the exact address of the determinant may vary slightly. Column 8 of Table 1B.1 (“Tissue Distribution”) is described below in Table 1B.2 Column 5. Column 9 of Table 1B.1 (“Cytologic Band”) provides the chromosomal location of polynucleotides corresponding to SEQ ID NO:X. Chromosomal location was determined by finding exact matches to EST and cDNA sequences contained in the NCBI (National Center for Biotechnology Information) UniGene database. Given a presumptive chromosomal location, disease locus association was determined by comparison with the Morbid Map, derived from Online Mendelian Inheritance in Man (Online Mendelian Inheritance in Man, OMIM™. McKusick-Nathans Institute for Genetic Medicine, Johns Hopkins University (Baltimore, Md.) and National Center for Biotechnology Information, National Library of Medicine (Bethesda, Md.) 2000. World Wide Web URL: http://www.ncbi.nlm.nih.gov/omim/). If the putative chromosomal location of the Query overlaps with the chromosomal location of a Morbid Map entry, an OMIM identification number is disclosed in Table 1B. 1, column 10 labeled “OMIM Disease Reference(s)”. A key to the OMIM reference identification numbers is provided in Table 5.

[0026] Table 1B.2

[0027] Column 5 of Table 1B.2, “Tissue Distribution” shows the expression profile of tissue, cells, and/or cell line libraries which express the polynucleotides of the invention. The first code number shown in Table 1B.2 column 5 (preceding the colon), represents the tissue/cell source identifier code corresponding to the key provided in Table 4. Expression of these polynucleotides was not observed in the other tissues and/or cell libraries tested. The second number in column 5 (following the colon), represents the number of times a sequence corresponding to the reference polynucleotide sequence (e.g., SEQ ID NO:X) was identified in the corresponding tissue/cell source. Those tissue/cell source identifier codes in which the first two letters are “AR” designate information generated using DNA array technology. Utilizing this technology, cDNAs were amplified by PCR and then transferred, in duplicate, onto the array. Gene expression was assayed through hybridization of first strand cDNA probes to the DNA array. cDNA probes were generated from total RNA extracted from a variety of different tissues and cell lines. Probe synthesis was performed in the presence of ³³P dCTP, using oligo(dT) to prime reverse transcription. After hybridization, high stringency washing conditions were employed to remove non-specific hybrids from the array. The remaining signal, emanating from each gene target, was measured using a Phosphorimager. Gene expression was reported as Phosphor Stimulating Luminescence (PSL) which reflects the level of phosphor signal generated from the probe hybridized to each of the gene targets represented on the array. A local background signal subtraction was performed before the total signal generated from each array was used to normalize gene expression between the different hybridizations. The value presented after “[array code]:” represents the mean of the duplicate values, following background subtraction and probe normalization. One of skill in the art could routinely use this information to identify normal and/or diseased tissue(s) which show a predominant expression pattern of the corresponding polynucleotide of the invention or to identify polynucleotides which show predominant and/or specific tissue and/or cell expression.

Description of Table 1C

[0028] Table 1C summarizes additional polynucleotides encompassed by the invention (including cDNA clones related to the sequences (Clone ID:), contig sequences (contig identifier (Contig ID:) contig nucleotide sequence identifiers (SEQ ID NO:X)), and genomic sequences (SEQ ID NO:B). The first column provides a unique clone identifier, “Clone ID:”, for a cDNA clone related to each contig sequence. The second column provides the sequence identifier, “SEQ ID NO:X”, for each contig sequence. The third column provides a unique contig identifier, “Contig ID:” for each contig sequence. The fourth column, provides a BAC identifier “BAC ID NO:A” for the BAC clone referenced in the corresponding row of the table. The fifth column provides the nucleotide sequence identifier, “SEQ ID NO:B” for a fragment of the BAC clone identified in column four of the corresponding row of the table. The sixth column, “Exon From-To”, provides the location (i.e., nucleotide position numbers) within the polynucleotide sequence of SEQ ID NO:B which delineate certain polynucleotides of the invention that are also exemplary members of polynucleotide sequences that encode polypeptides of the invention (e.g., polypeptides containing amino acid sequences encoded by the polynucleotide sequences delineated in column six, and fragments and variants thereof).

Description of Table 1D

[0029] Table 1D: In preferred embodiments, the present invention encompasses a method of detecting, preventing, diagnosing, prognosticating, treating, and/or ameliorating immune diseases or disorders; comprising administering to a patient in which such treatment, prevention, or amelioration is desired a protein, nucleic acid, or antibody of the invention (or fragment or variant thereof) represented by Table 1A, Table 1B, and Table 1C, in an amount effective to detect, prevent, diagnose, prognosticate, treat, and/or ameliorate the disease or disorder.

[0030] As indicated in Table 1D, the polynucleotides, polypeptides, agonists, or antagonists of the present invention (including antibodies) can be used in assays to test for one or more biological activities. If these polynucleotides and polypeptides do exhibit activity in a particular assay, it is likely that these molecules may be involved in the diseases associated with the biological activity. Thus, the polynucleotides or polypeptides, or agonists or antagonists thereof (including antibodies) could be used to treat the associated disease.

[0031] Table 1D provides information related to biological activities for polynucleotides and polypeptides of the invention (including antibodies, agonists, and/or antagonists thereof). Table 1D also provides information related to assays which may be used to test polynucleotides and polypeptides of the invention (including antibodies, agonists, and/or antagonists thereof) for the corresponding biological activities. The first column (“Gene No.”) provides the gene number in the application for each clone identifier. The second column (“cDNA Clone ID:”) provides the unique clone identifier for each clone as previously described and indicated in Tables 1A, 1B, and 1C. The third column (“AA SEQ ID NO:Y”) indicates the Sequence Listing SEQ ID Number for polypeptide sequences encoded by the corresponding cDNA clones (also as indicated in Tables 1A, 1B, and 2). The fourth column (“Biological Activity”) indicates a biological activity corresponding to the indicated polypeptides (or polynucleotides encoding said polypeptides). The fifth column (“Exemplary Activity Assay”) further describes the corresponding biological activity and provides information pertaining to the various types of assays which may be performed to test, demonstrate, or quantify the corresponding biological activity. Table 1D describes the use of FMAT technology, inter alia, for testing or demonstrating various biological activities. Fluorometric microvolume assay technology (FMAT) is a fluorescence-based system that provides a means to perform nonradioactive cell- and bead-based assays to detect activation of cell signal transduction pathways. This technology was designed specifically for ligand binding and immunological assays. Using this technology, fluorescent cells or beads at the bottom of the well are detected as localized areas of concentrated fluorescence using a data processing system. Unbound flurophore comprising the background signal is ignored, allowing for a wide variety of homogeneous assays. FMAT technology may be used for peptide ligand binding assays, immunofluorescence, apoptosis, cytotoxicity, and bead-based immunocapture assays. See, Miraglia S et. al., “Homogeneous cell and bead based assays for highthroughput screening using flourometric microvolume assay technology,” Journal of Biomolecular Screening; 4:193-204 (1999). In particular, FMAT technology may be used to test, confirm, and/or identify the ability of polypeptides (including polypeptide fragments and variants) to activate signal transduction pathways. For example, FMAT technology may be used to test, confirm, and/or identify the ability of polypeptides to upregulate production of immunomodulatory proteins (such as, for example, interleukins, GM-CSF, Rantes, and Tumor Necrosis factors, as well as other cellular regulators (e.g. insulin)).

[0032] Table 1D also describes the use of kinase assays for testing, demonstrating, or quantifying biological activity. In this regard, the phosphorylation and de-phosphorylation of specific amino acid residues (e.g. Tyrosine, Serine, Threonine) on cell-signal transduction proteins provides a fast, reversible means for activation and de-activation of cellular signal transduction pathways. Moreover, cell signal transduction via phosphorylation/de-phosphorylation is crucial to the regulation of a wide variety of cellular processes (e.g. proliferation, differentiation, migration, apoptosis, etc.). Accordingly, kinase assays provide a powerful tool useful for testing, confirming, and/or identifying polypeptides (including polypeptide fragments and variants) that mediate cell signal transduction events via protein phosphorylation. See e.g., Forrer, P., Tamaskovic R., and Jaussi, R. “Enzyme-Linked Immunosorbent Assay for Measurement of JNK, ERK, and p38 Kinase Activities” Biol. Chem. 379(8-9): 1101-1110 (1998).

Description of Table 1E

[0033] Polynucleotides encoding polypeptides of the present invention can be used in assays to test for one or more biological activities. One such biological activity which may be tested includes the ability of polynucleotides and polypeptides of the invention to stimulate up-regulation or down-regulation of expression of particular genes and proteins. Hence, if polynucleotides and polypeptides of the present invention exhibit activity in altering particular gene and protein expression patterns, it is likely that these polynucleotides and polypeptides of the present invention may be involved in, or capable of effecting changes in, diseases associated with the altered gene and protein expression profiles. Hence, polynucleotides, polypeptides, or antibodies of the present invention could be used to treat said associated diseases.

[0034] TaqMan® assays may be performed to assess the ability of polynucleotides (and polypeptides they encode) to alter the expression pattern of particular “target” genes. TaqMan® reactions are performed to evaluate the ability of a test agent to induce or repress expression of specific genes in different cell types. TaqMan® gene expression quantification assays (“TaqMan® assays”) are well known to, and routinely performed by, those of ordinary skill in the art. TaqMan® assays are performed in a two step reverse transcription/polymerase chain reaction (RT-PCR). In the first (RT) step, cDNA is reverse transcribed from total RNA samples using random hexamer primers. In the second (PCR) step, PCR products are synthesized from the cDNA using gene specific primers.

[0035] To quantify gene expression the Taqman® PCR reaction exploits the 5′ nuclease activity of AmpliTaq Gold® DNA Polymerase to cleave a Taqman® probe (distinct from the primers) during PCR. The Taqman® probe contains a reporter dye at the 5′-end of the probe and a quencher dye at the 3′ end of the probe. When the probe is intact, the proximity of the reporter dye to the quencher dye results in suppression of the reporter fluorescence. During PCR, if the target of interest is present, the probe specifically anneals between the forward and reverse primer sites. AmpliTaq Fold DNA Polymerase then cleaves the probe between the reporter and quencher when the probe hybridizes to the target, resulting in increased fluorescence of the reporter (see FIG. 2). Accumulation of PCR products is detected directly by monitoring the increase in fluorescence of the reporter dye.

[0036] After the probe fragments are displaced from the target, polymerization of the strand continues. The 3′-end of the probe is blocked to prevent extension of the probe during PCR. This process occurs in every cycle and does not interfere with the exponential accumulation of product. The increase in fluorescence signal is detected only if the target sequence is complementary to the probe and is amplified during PCR. Because of these requirements, any nonspecific amplification is not detected.

[0037] For test sample preparation, vector controls or constructs containing the coding sequence for the gene of interest are transfected into cells, such as for example 293T cells, and supernatants collected after 48 hours. For cell treatment and RNA isolation, multiple primary human cells or human cell lines are used; such cells may include but are not limited to, Normal Human Dermal Fibroblasts, Aortic Smooth Muscle, Human Umbilical Vein Endothelial Cells, HepG2, Daudi, Jurkat, U937, Caco, and THP-1 cell lines. Cells are plated in growth media and growth is arrested by culturing without media change for 3 days, or by switching cells to low serum media and incubating overnight. Cells are treated for 1, 6, or 24 hours with either vector control supernatant or sample supernatant (or purified/partially purified protein preparations in buffer). Total RNA is isolated; for example, by using Trizol extraction or by using the Ambion RNAqueous™-4PCR RNA isolation system. Expression levels of multiple genes are analyzed using TAQMAN, and expression in the test sample is compared to control vector samples to identify genes induced or repressed. Each of the above described techniques are well known to, and routinely performed by, those of ordinary skill in the art.

[0038] Table 1E indicates particular disease classes and preferred indications for which polynucleotides, polypeptides, or antibodies of the present invention may be used in detecting, diagnosing, preventing, treating and/or ameliorating said diseases and disorders based on “target” gene expression patterns which may be up- or down-regulated by polynucleotides (and the encoded polypeptides) corresponding to each indicated cDNA Clone ID (shown in Table 1E, Column 2).

[0039] Thus, in preferred embodiments, the present invention encompasses a method of detecting, diagnosing, preventing, treating, and/or ameliorating a disease or disorder listed in the “Disease Class” and/or “Preferred Indication” columns of Table 1E; comprising administering to a patient in which such detection, diagnosis, prevention, or treatment is desired a protein, nucleic acid, or antibody of the invention (or fragment or variant thereof) in an amount effective to detect, diagnose, prevent, treat, or ameliorate the disease or disorder. The first and second columns of Table 1D show the “Gene No.” and “cDNA Clone ID No.”, respectively, indicating certain nucleic acids and proteins (or antibodies against the same) of the invention (including polynucleotide, polypeptide, and antibody fragments or variants thereof) that may be used in detecting, diagnosing, preventing, treating, or ameliorating the disease(s) or disorder(s) indicated in column 6 and as indicated in the corresponding row in the “Disease Class” or “Preferred Indication” Columns of Table 1E.

[0040] In another embodiment, the present invention also encompasses methods of detecting, diagnosing, preventing, treating, or ameliorating a disease or disorder listed in the “Disease Class” or “Preferred Indication” Columns of Table 1E; comprising administering to a patient combinations of the proteins, nucleic acids, or antibodies of the invention (or fragments or variants thereof), sharing similar indications as shown in the corresponding rows in the “Disease Class” or “Preferred Indication” Columns of Table 1E.

[0041] The “Disease Class” Column of Table 1E provides a categorized descriptive heading for diseases, disorders, and/or conditions (more fully described below) that may be detected, diagnosed, prevented, treated, or ameliorated by a protein, nucleic acid, or antibody of the invention (or fragment or variant thereof).

[0042] The “Preferred Indication” Column of Table 1E describes diseases, disorders, and/or conditions that may be detected, diagnosed, prevented, treated, or ameliorated by a protein, nucleic acid, or antibody of the invention (or fragment or variant thereof).

[0043] The “Cell Line” and “Exemplary Targets” Columns of Table 1E indicate particular cell lines and target genes, respectively, which may show altered gene expression patterns (i.e., up- or down-regulation of the indicated target gene) in Taqman assays, performed as described above, utilizing polynucleotides of the cDNA Clone ID shown in the corresponding row. Alteration of expression patterns of the indicated “Exemplary Target” genes is correlated with a particular “Disease Class” and/or “Preferred Indication” as shown in the corresponding row under the respective column headings.

[0044] The “Exemplary Accessions” Column indicates GenBank Accessions (available online through the National Center for Biotechnology Information (NCBI) at http://www.ncbi.nlm.nih.gov/) which correspond to the “Exemplary Targets” shown in the adjacent row.

[0045] The recitation of “Cancer” in the “Disease Class” Column indicates that the corresponding nucleic acid and protein, or antibody against the same, of the invention (or fragment or variant thereof) may be used for example, to detect, diagnose, prevent, treat, and/or ameliorate neoplastic diseases and/or disorders (e.g., leukemias, cancers, etc., as described below under “Hyperproliferative Disorders”).

[0046] The recitation of “Immune” in the “Disease Class” column indicates that the corresponding nucleic acid and protein, or antibody against the same, of the invention (or fragment or variant thereof), may be used for example, to detect, diagnose, prevent, treat, and/or ameliorate diseases and/or disorders relating to neoplastic diseases (e.g., as described below under “Hyperproliferative Disorders”), blood disorders (e.g., as described below under “Immune Activity” “Cardiovascular Disorders” and/or “Blood-Related Disorders”), and infections (e.g., as described below under “Infectious Disease”).

[0047] The recitation of “Angiogenesis” in the “Disease Class” column indicates that the corresponding nucleic acid and protein, or antibody against the same, of the invention (or fragment or variant thereof), may be used for example, to detect, diagnose, treat, prevent, and/or ameliorate diseases and/or disorders relating to neoplastic diseases (e.g., as described below under “Hyperproliferative Disorders”), diseases and/or disorders of the cardiovascular system (e.g., as described below under “Cardiovascular Disorders”), diseases and/or disorders involving cellular and genetic abnormalities (e.g., as described below under “Diseases at the Cellular Level”), diseases and/or disorders involving angiogenesis (e.g., as described below under “Anti-Angiogenesis Activity”), to promote or inhibit cell or tissue regeneration (e.g., as described below under “Regeneration”), or to promote wound healing (e.g., as described below under “Wound Healing and Epithelial Cell Proliferation”).

[0048] The recitation of “Diabetes” in the “Disease Class” column indicates that the corresponding nucleic acid and protein, or antibody against the same, of the invention (or fragment or variant thereof), may be used for example, to detect, diagnose, treat, prevent, and/or ameliorate diabetes (including diabetes mellitus types I and II), as well as diseases and/or disorders associated with, or consequential to, diabetes (e.g. as described below under “Endocrine Disorders,” “Renal Disorders,” and “Gastrointestinal Disorders”).

Description of Table 2

[0049] Table 2 summarizes homology and features of some of the polypeptides of the invention. The first column provides a unique clone identifier, “Clone ID:”, corresponding to a cDNA clone disclosed in Table 1A or Table 1B. The second column provides the unique contig identifier, “Contig ID:” corresponding to contigs in Table 1B and allowing for correlation with the information in Table 1B. The third column provides the sequence identifier, “SEQ ID NO:X”, for the contig polynucleotide sequence. The fourth column provides the analysis method by which the homology/identity disclosed in the Table was determined. Comparisons were made between polypeptides encoded by the polynucleotides of the invention and either a non-redundant protein database (herein referred to as “NR”), or a database of protein families (herein referred to as “PFAM”) as further described below. The fifth column provides a description of the PFAM/NR hit having a significant match to a polypeptide of the invention. Column six provides the accession number of the PFAM/NR hit disclosed in the fifth column. Column seven, “Score/Percent Identity”, provides a quality score or the percent identity, of the hit disclosed in columns five and six. Columns 8 and 9, “NT From” and “NT To” respectively, delineate the polynucleotides in “SEQ ID NO:X” that encode a polypeptide having a significant match to the PFAM/NR database as disclosed in the fifth and sixth columns. In specific embodiments polypeptides of the invention comprise, or alternatively consist of, an amino acid sequence encoded by a polynucleotide in SEQ ID NO:X as delineated in columns 8 and 9, or fragments or variants thereof.

Description of Table 3

[0050] Table 3 provides polynucleotide sequences that may be disclaimed according to certain embodiments of the invention. The first column provides a unique clone identifier, “Clone ID”, for a cDNA clone related to contig sequences disclosed in Table 1B. The second column provides the sequence identifier, “SEQ ID NO:X”, for contig sequences disclosed in Table 1A and/or Table 1B. The third column provides the unique contig identifier, “Contig ID:”, for contigs disclosed in Table 1B. The fourth column provides a unique integer ‘a’ where ‘a’ is any integer between 1 and the final nucleotide minus 15 of SEQ ID NO:X, and the fifth column provides a unique integer ‘b’ where ‘b’ is any integer between 15 and the final nucleotide of SEQ ID NO:X, where both a and b correspond to the positions of nucleotide residues shown in SEQ ID NO:X, and where b is greater than or equal to a+14. For each of the polynucleotides shown as SEQ ID NO:X, the uniquely defined integers can be substituted into the general formula of a−b, and used to describe polynucleotides which may be preferably excluded from the invention. In certain embodiments, preferably excluded from the invention are at least one, two, three, four, five, ten, or more of the polynucleotide sequence(s) having the accession number(s) disclosed in the sixth column of this Table (including for example, published sequence in connection with a particular BAC clone). In further embodiments, preferably excluded from the invention are the specific polynucleotide sequence(s) contained in the clones corresponding to at least one, two, three, four, five, ten, or more of the available material having the accession numbers identified in the sixth column of this Table (including for example, the actual sequence contained in an identified BAC clone).

Description of Table 4

[0051] Table 4 provides a key to the tissue/cell source identifier code disclosed in Table 1B.2, column 5. Column 1 provides the tissue/cell source identifier code disclosed in Table 1B.2, Column 5. Columns 2-5 provide a description of the tissue or cell source. Note that “Description” and “Tissue” sources (i.e. columns 2 and 3) having the prefix “a_” indicates organs, tissues, or cells derived from “adult” sources. Codes corresponding to diseased tissues are indicated in column 6 with the word “disease.” The use of the word “disease” in column 6 is non-limiting. The tissue or cell source may be specific (e.g. a neoplasm), or may be disease-associated (e.g., a tissue sample from a normal portion of a diseased organ). Furthermore, tissues and/or cells lacking the “disease” designation may still be derived from sources directly or indirectly involved in a disease state or disorder, and therefore may have a further utility in that disease state or disorder. In numerous cases where the tissue/cell source is a library, column 7 identifies the vector used to generate the library.

Description of Table 5

[0052] Table 5 provides a key to the OMIM reference identification numbers disclosed in Table 1B.1, column 9. OMIM reference identification numbers (Column 1) were derived from Online Mendelian Inheritance in Man (Online Mendelian Inheritance in Man, OMIM. McKusick-Nathans Institute for Genetic Medicine, Johns Hopkins University (Baltimore, Md.) and National Center for Biotechnology Information, National Library of Medicine, (Bethesda, Md.) 2000. World Wide Web URL: http://www.ncbi.nlm.nih.gov/omim/). Column 2 provides diseases associated with the cytologic band disclosed in, column 9, as determined using the Morbid Map database.

Description of Table 6

[0053] Table 6 summarizes some of the ATCC Deposits, Deposit dates, and ATCC designation numbers of deposits made with the ATCC in connection with the present application. These deposits were made in addition to those described in the Table 1A.

Description of Table 7

[0054] Table 7 shows the cDNA libraries sequenced, and ATCC designation numbers and vector information relating to these cDNA libraries.

[0055] The first column shows the first four letters indicating the Library from which each library clone was derived. The second column indicates the catalogued tissue description for the corresponding libraries. The third column indicates the vector containing the corresponding clones. The fourth column shows the ATCC deposit designation for each libray clone as indicated by the deposit information in Table 6.

Definitions

[0056] The following definitions are provided to facilitate understanding of certain terms used throughout this specification.

[0057] In the present invention, “isolated” refers to material removed from its original environment (e.g., the natural environment if it is naturally occurring), and thus is altered “by the hand of man” from its natural state. For example, an isolated polynucleotide could be part of a vector or a composition of matter, or could be contained within a cell, and still be “isolated” because that vector, composition of matter, or particular cell is not the original environment of the polynucleotide. The term “isolated” does not refer to genomic or cDNA libraries, whole cell total or mRNA preparations, genomic DNA preparations (including those separated by electrophoresis and transferred onto blots), sheared whole cell genomic DNA preparations or other compositions where the art demonstrates no distinguishing features of the polynucleotide/sequences of the present invention.

[0058] In the present invention, a “secreted” protein refers to those proteins capable of being directed to the ER, secretory vesicles, or the extracellular space as a result of a signal sequence, as well as those proteins released into the extracellular space without necessarily containing a signal sequence. If the secreted protein is released into the extracellular space, the secreted protein can undergo extracellular processing to produce a “mature” protein. Release into the extracellular space can occur by many mechanisms, including exocytosis and proteolytic cleavage.

[0059] As used herein, a “polynucleotide” refers to a molecule having a nucleic acid sequence encoding SEQ ID NO:Y or a fragment or variant thereof (e.g., the polypeptide delinated in columns fourteen and fifteen of Table 1A); a nucleic acid sequence contained in SEQ ID NO:X (as described in column 5 of Table 1A and/or Table 1B) or the complement thereof; a cDNA sequence contained in Clone ID: (as described in column 2 of Table 1A and/or Table 1B and contained within a library deposited with the ATCC); a nucleotide sequence encoding the polypeptide encoded by a nucleotide sequence in SEQ ID NO:B as defined in column 6 (EXON From-To) of Table 1C or a fragment or variant thereof; or a nucleotide coding sequence in SEQ ID NO:B as defined in column 6 of Table 1C or the complement thereof. For example, the polynucleotide can contain the nucleotide sequence of the full length cDNA sequence, including the 5′ and 3′ untranslated sequences, the coding region, as well as fragments, epitopes, domains, and variants of the nucleic acid sequence. Moreover, as used herein, a “polypeptide” refers to a molecule having an amino acid sequence encoded by a polynucleotide of the invention as broadly defined (obviously excluding poly-Phenylalanine or poly-Lysine peptide sequences which result from translation of a polyA tail of a sequence corresponding to a cDNA).

[0060] In the present invention, “SEQ ID NO:X” was often generated by overlapping sequences contained in multiple clones (contig analysis). A representative clone containing all or most of the sequence for SEQ ID NO:X is deposited at Human Genome Sciences, Inc. (HGS) in a catalogued and archived library. As shown, for example, in column 2 of Table 1B, each clone is identified by a cDNA Clone ID (identifier generally referred to herein as Clone ID:). Each Clone ID is unique to an individual clone and the Clone ID is all the information needed to retrieve a given clone from the HGS library. Table 7 provides a list of the deposited cDNA libraries. One can use the Clone ID: to determine the library source by reference to Tables 6 and 7. Table 7 lists the deposited cDNA libraries by name and links each library to an ATCC Deposit. Library names contain four characters, for example, “HTWE.” The name of a cDNA clone (Clone ID) isolated from that library begins with the same four characters, for example “HTWEP07”. As mentioned below, Table 1A and/or Table 1B correlates the Clone ID names with SEQ ID NO:X. Thus, starting with an SEQ ID NO:X, one can use Tables 1A, 1B, 6, 7, and 9 to determine the corresponding Clone ID, which library it came from and which ATCC deposit the library is contained in. Furthermore, it is possible to retrieve a given cDNA clone from the source library by techniques known in the art and described elsewhere herein. The ATCC is located at 10801 University Boulevard, Manassas, Va. 20110-2209, USA. The ATCC deposits were made pursuant to the terms of the Budapest Treaty on the international recognition of the deposit of microorganisms for the purposes of patent procedure.

[0061] In specific embodiments, the polynucleotides of the invention are at least 15, at least 30, at least 50, at least 100, at least 125, at least 500, or at least 1000 continuous nucleotides but are less than or equal to 300 kb, 200 kb, 100 kb, 50 kb, 15 kb, 10 kb, 7.5 kb, 5 kb, 2.5 kb, 2.0 kb, or 1 kb, in length. In a further embodiment, polynucleotides of the invention comprise a portion of the coding sequences, as disclosed herein, but do not comprise all or a portion of any intron. In another embodiment, the polynucleotides comprising coding sequences do not contain coding sequences of a genomic flanking gene (i.e., 5′ or 3′ to the gene of interest in the genome). In other embodiments, the polynucleotides of the invention do not contain the coding sequence of more than 1000, 500, 250, 100, 50, 25, 20, 15, 10, 5, 4, 3, 2, or 1 genomic flanking gene(s).

[0062] A “polynucleotide” of the present invention also includes those polynucleotides capable of hybridizing, under stringent hybridization conditions, to sequences contained in SEQ ID NO:X, or the complement thereof (e.g., the complement of any one, two, three, four, or more of the polynucleotide fragments described herein), the polynucleotide sequence delineated in columns 7 and 8 of Table 1A or the complement thereof, the polynucleotide sequence delineated in columns 8 and 9 of Table 2 or the complement thereof, and/or cDNA sequences contained in Clone ID: (e.g., the complement of any one, two, three, four, or more of the polynucleotide fragments, or the cDNA clone within the pool of cDNA clones deposited with the ATCC, described herein), and/or the polynucleotide sequence delineated in column 6 of Table 1C or the complement thereof. “Stringent hybridization conditions” refers to an overnight incubation at 42 degree C. in a solution comprising 50% formamide, 5×SSC (750 mM NaCl, 75 mM trisodium citrate), 50 mM sodium phosphate (pH 7.6), 5× Denhardt's solution, 10% dextran sulfate, and 20 μg/ml denatured, sheared salmon sperm DNA, followed by washing the filters in 0.1×SSC at about 65 degree C.

[0063] Also contemplated are nucleic acid molecules that hybridize to the polynucleotides of the present invention at lower stringency hybridization conditions. Changes in the stringency of hybridization and signal detection are primarily accomplished through the manipulation of formamide concentration (lower percentages of formamide result in lowered stringency); salt conditions, or temperature. For example, lower stringency conditions include an overnight incubation at 37 degree C. in a solution comprising 6×SSPE (20×SSPE=3M NaCl; 0.2M NaH₂PO₄; 0.02M EDTA, pH 7.4), 0.5% SDS, 30% formamide, 100 ug/ml salmon sperm blocking DNA; followed by washes at 50 degree C. with 1×SSPE, 0.1% SDS. In addition, to achieve even lower stringency, washes performed following stringent hybridization can be done at higher salt concentrations (e.g. 5×SSC).

[0064] Note that variations in the above conditions may be accomplished through the inclusion and/or substitution of alternate blocking reagents used to suppress background in hybridization experiments. Typical blocking reagents include Denhardt's reagent, BLOTTO, heparin, denatured salmon sperm DNA, and commercially available proprietary formulations. The inclusion of specific blocking reagents may require modification of the hybridization conditions described above, due to problems with compatibility.

[0065] Of course, a polynucleotide which hybridizes only to polyA+ sequences (such as any 3′ terminal polyA+ tract of a cDNA shown in the sequence listing), or to a complementary stretch of T (or U) residues, would not be included in the definition of “polynucleotide,” since such a polynucleotide would hybridize to any nucleic acid molecule containing a poly (A) stretch or the complement thereof (e.g., practically any double-stranded cDNA clone generated using oligo dT as a primer).

[0066] The polynucleotide of the present invention can be composed of any polyribonucleotide or polydeoxribonucleotide, which may be unmodified RNA or DNA or modified RNA or DNA. For example, polynucleotides can be composed of single- and double-stranded DNA, DNA that is a mixture of single- and double-stranded regions, single- and double-stranded RNA, and RNA that is mixture of single- and double-stranded regions, hybrid molecules comprising DNA and RNA that may be single-stranded or, more typically, double-stranded or a mixture of single- and double-stranded regions. In addition, the polynucleotide can be composed of triple-stranded regions comprising RNA or DNA or both RNA and DNA. A polynucleotide may also contain one or more modified bases or DNA or RNA backbones modified for stability or for other reasons. “Modified” bases include, for example, tritylated bases and unusual bases such as inosine. A variety of modifications can be made to DNA and RNA; thus, “polynucleotide” embraces chemically, enzymatically, or metabolically modified forms.

[0067] In specific embodiments, the polynucleotides of the invention are at least 15, at least 30, at least 50, at least 100, at least 125, at least 500, or at least 1000 continuous nucleotides but are less than or equal to 300 kb, 200 kb, 100 kb, 50 kb, 15 kb, 10 kb, 7.5 kb, 5 kb, 2.5 kb, 2.0 kb, or 1 kb, in length. In a further embodiment, polynucleotides of the invention comprise a portion of the coding sequences, as disclosed herein, but do not comprise all or a portion of any intron. In another embodiment, the polynucleotides comprising coding sequences do not contain coding sequences of a genomic flanking gene (i.e., 5′ or 3′ to the gene of interest in the genome). In other embodiments, the polynucleotides of the invention do not contain the coding sequence of more than 1000, 500, 250, 100, 50, 25, 20, 15, 10, 5, 4, 3, 2, or 1 genomic flanking gene(s).

[0068] “SEQ ID NO:X” refers to a polynucleotide sequence described in column 5 of Table 1A, while “SEQ ID NO:Y” refers to a polypeptide sequence described in column 10 of Table 1A. SEQ ID NO:X is identified by an integer specified in column 6 of Table 1A. The polypeptide sequence SEQ ID NO:Y is a translated open reading frame (ORF) encoded by polynucleotide SEQ ID NO:X. The polynucleotide sequences are shown in the sequence listing immediately followed by all of the polypeptide sequences. Thus, a polypeptide sequence corresponding to polynucleotide sequence SEQ ID NO:2 is the first polypeptide sequence shown in the sequence listing. The second polypeptide sequence corresponds to the polynucleotide sequence shown as SEQ ID NO:3, and so on.

[0069] The polypeptide of the present invention can be composed of amino acids joined to each other by peptide bonds or modified peptide bonds, i.e., peptide isosteres, and may contain amino acids other than the 20 gene-encoded amino acids. The polypeptides may be modified by either natural processes, such as posttranslational processing, or by chemical modification techniques which are well known in the art. Such modifications are well described in basic texts and in more detailed monographs, as well as in a voluminous research literature. Modifications can occur anywhere in a polypeptide, including the peptide backbone, the amino acid side-chains and the amino or carboxyl termini. It will be appreciated that the same type of modification may be present in the same or varying degrees at several sites in a given polypeptide. Also, a given polypeptide may contain many types of modifications. Polypeptides may be branched, for example, as a result of ubiquitination, and they may be cyclic, with or without branching. Cyclic, branched, and branched cyclic polypeptides may result from posttranslation natural processes or may be made by synthetic methods. Modifications include acetylation, acylation, ADP-ribosylation, amidation, covalent attachment of flavin, covalent attachment of a heme moiety, covalent attachment of a nucleotide or nucleotide derivative, covalent attachment of a lipid or lipid derivative, covalent attachment of phosphotidylinositol, cross-linking, cyclization, disulfide bond formation, demethylation, formation of covalent cross-links, formation of cysteine, formation of pyroglutamate, formylation, gamma-carboxylation, glycosylation, GPI anchor formation, hydroxylation, iodination, methylation, myristoylation, oxidation, pegylation, proteolytic processing, phosphorylation, prenylation, racemization, selenoylation, sulfation, transfer-RNA mediated addition of amino acids to proteins such as arginylation, and ubiquitination. (See, for instance, PROTEINS—STRUCTURE AND MOLECULAR PROPERTES, 2nd Ed., T. E. Creighton, W. H. Freeman and Company, New York (1993); POSTTRANSLATIONAL COVALENT MODIFICATION OF PROTEINS, B. C. Johnson, Ed., Academic Press, New York, pgs. 1-12 (1983); Seifter et al., Meth. Enzymol. 182:626-646 (1990); Rattan et al., Ann. N.Y. Acad. Sci. 663:48-62 (1992)).

[0070] “SEQ ID NO:X” refers to a polynucleotide sequence described, for example, in Tables 1A, Table 1B, or Table 2, while “SEQ ID NO:Y” refers to a polypeptide sequence described in column 11 of Table 1A and or Table 1B. SEQ ID NO:X is identified by an integer specified in column 4 of Table 1B. The polypeptide sequence SEQ ID NO:Y is a translated open reading frame (ORF) encoded by polynucleotide SEQ ID NO:X. “Clone ID:” refers to a cDNA clone described in column 2 of Table 1A and/or 1B.

[0071] “A polypeptide having functional activity” refers to a polypeptide capable of displaying one or more known functional activities associated with a full-length (complete) protein. Such functional activities include, but are not limited to, biological activity (e.g. activity useful in treating, preventing and/or ameliorating immune diseases and disorders), antigenicity (ability to bind [or compete with a polypeptide for binding] to an anti-polypeptide antibody), immunogenicity (ability to generate antibody which binds to a specific polypeptide of the invention), ability to form multimers with polypeptides of the invention, and ability to bind to a receptor or ligand for a polypeptide.

[0072] The polypeptides of the invention can be assayed for functional activity (e.g. biological activity) using or routinely modifying assays known in the art, as well as assays described herein. Specifically, one of skill in the art may routinely assay secreted polypeptides (including fragments and variants) of the invention for activity using assays as described in the examples section below.

[0073] “A polypeptide having biological activity” refers to a polypeptide exhibiting activity similar to, but not necessarily identical to, an activity of a polypeptide of the present invention, including mature forms, as measured in a particular biological assay, with or without dose dependency. In the case where dose dependency does exist, it need not be identical to that of the polypeptide, but rather substantially similar to the dose-dependence in a given activity as compared to the polypeptide of the present invention (i.e., the candidate polypeptide will exhibit greater activity or not more than about 25-fold less and, preferably, not more than about tenfold less activity, and most preferably, not more than about three-fold less activity relative to the polypeptide of the present invention).

Tables

Table 1A

[0074] Table 1A summarizes information concerning certain polypnucleotides and polypeptides of the invention. The first column provides the gene number in the application for each clone identifier. The second column provides a unique clone identifier, “Clone ID:”, for a cDNA clone related to each contig sequence disclosed in Table 1A. Third column, the cDNA Clones identified in the second column were deposited as indicated in the third column (i.e. by ATCC Deposit No:Z and deposit date). Some of the deposits contain multiple different clones corresponding to the same gene. In the fourth column, “Vector” refers to the type of vector contained in the corresponding cDNA Clone identified in the second column. In the fifth column, the nucleotide sequence identified as “NT SEQ ID NO:X” was assembled from partially homologous (“overlapping”) sequences obtained from the corresponding cDNA clone identified in the second column and, in some cases, from additional related cDNA clones. The overlapping sequences were assembled into a single contiguous sequence of high redundancy (usually three to five overlapping sequences at each nucleotide position), resulting in a final sequence identified as SEQ ID NO:X. In the sixth column, “Total NT Seq.” refers to the total number of nucleotides in the contig sequence identified as SEQ ID NO:X.” The deposited clone may contain all or most of these sequences, reflected by the nucleotide position indicated as “5′ NT of Clone Seq.” (seventh column) and the “3′ NT of Clone Seq.” (eighth column) of SEQ ID NO:X. In the ninth column, the nucleotide position of SEQ ID NO:X of the putative start codon (methionine) is identified as “5′ NT of Start Codon.” Similarly, in column ten, the nucleotide position of SEQ ID NO:X of the predicted signal sequence is identified as “5′ NT of First AA of Signal Pep.” In the eleventh column, the translated amino acid sequence, beginning with the methionine, is identified as “AA SEQ ID NO:Y,” although other reading frames can also be routinely translated using known molecular biology techniques. The polypeptides produced by these alternative open reading frames are specifically contemplated by the present invention.

[0075] In the twelfth and thirteenth columns of Table 1A, the first and last amino acid position of SEQ ID NO:Y of the predicted signal peptide is identified as “First AA of Sig Pep” and “Last AA of Sig Pep.” In the fourteenth column, the predicted first amino acid position of SEQ ID NO:Y of the secreted portion is identified as “Predicted First AA of Secreted Portion”. The amino acid position of SEQ ID NO:Y of the last amino acid encoded by the open reading frame is identified in the fifteenth column as “Last AA of ORF”.

[0076] SEQ ID NO:X (where X may be any of the polynucleotide sequences disclosed in the sequence listing) and the translated SEQ ID NO:Y (where Y may be any of the polypeptide sequences disclosed in the sequence listing) are sufficiently accurate and otherwise suitable for a variety of uses well known in the art and described further below. For instance, SEQ ID NO:X is useful for designing nucleic acid hybridization probes that will detect nucleic acid sequences contained in SEQ ID NO:X or the cDNA contained in the deposited clone. These probes will also hybridize to nucleic acid molecules in biological samples, thereby enabling a variety of forensic and diagnostic methods of the invention. Similarly, polypeptides identified from SEQ ID NO:Y may be used, for example, to generate antibodies which bind specifically to proteins containing the polypeptides and the secreted proteins encoded by the cDNA clones identified in Table 1A and/or elsewhere herein

[0077] Nevertheless, DNA sequences generated by sequencing reactions can contain sequencing errors. The errors exist as misidentified nucleotides, or as insertions or deletions of nucleotides in the generated DNA sequence. The erroneously inserted or deleted nucleotides cause frame shifts in the reading frames of the predicted amino acid sequence. In these cases, the predicted amino acid sequence diverges from the actual amino acid sequence, even though the generated DNA sequence may be greater than 99.9% identical to the actual DNA sequence (for example, one base insertion or deletion in an open reading frame of over 1000 bases).

[0078] Accordingly, for those applications requiring precision in the nucleotide sequence or the amino acid sequence, the present invention provides not only the generated nucleotide sequence identified as SEQ ID NO:X, and the predicted translated amino acid sequence identified as SEQ ID NO:Y, but also a sample of plasmid DNA containing a human cDNA of the invention deposited with the ATCC, as set forth in Table 1A. The nucleotide sequence of each deposited plasmid can readily be determined by sequencing the deposited plasmid in accordance with known methods

[0079] The predicted amino acid sequence can then be verified from such deposits.

[0080] Moreover, the amino acid sequence of the protein encoded by a particular plasmid can also be directly determined by peptide sequencing or by expressing the protein in a suitable host cell containing the deposited human cDNA, collecting the protein, and determining its sequence.

[0081] Also provided in Table 1A is the name of the vector which contains the cDNA plasmid. Each vector is routinely used in the art. The following additional information is provided for convenience.

[0082] Vectors Lambda Zap (U.S. Pat. Nos. 5,128,256 and 5,286,636), Uni-Zap XR (U.S. Pat. Nos. 5,128,256 and 5,286,636), Zap Express (U.S. Pat. Nos. 5,128,256 and 5,286,636), pBluescript (pBS) (Short, J. M. et al., Nucleic Acids Res. 16:7583-7600 (1988); Alting-Mees, M. A. and Short, J. M., Nucleic Acids Res. 17:9494 (1989)) and pBK (Alting-Mees, M. A. et al., Strategies 5:58-61 (1992)) are commercially available from Stratagene Cloning Systems, Inc., 11011 N. Torrey Pines Road, La Jolla, Calif., 92037. pBS contains an ampicillin resistance gene and pBK contains a neomycin resistance gene. Phagemid pBS may be excised from the Lambda Zap and Uni-Zap XR vectors, and phagemid pBK may be excised from the Zap Express vector. Both phagemids may be transformed into E. coli strain XL-1 Blue, also available from Stratagene Vectors pSport1, pCMVSport 1.0, pCMVSport 2.0 and pCMVSport 3.0, were obtained from Life Technologies, Inc., P.O. Box 6009, Gaithersburg, Md. 20897. All Sport vectors contain an ampicillin resistance gene and may be transformed into E. coli strain DH10B, also available from Life Technologies. See, for instance, Gruber, C. E., et al., Focus 15:59 (1993). Vector lafmid BA (Bento Soares, Columbia University, New York, N.Y.) contains an ampicillin resistance gene and can be transformed into E. coli strain XL-1 Blue. Vector pCR®2.1, which is available from Invitrogen, 1600 Faraday Avenue, Carlsbad, Calif. 92008, contains an ampicillin resistance gene and may be transformed into E. coli strain DH10B, available from Life Technologies. See, for instance, Clark, J. M., Nuc. Acids Res. 16:9677-9686 (1988) and Mead, D. et al., Bio/Technology 9: (1991).

[0083] The present invention also relates to the genes corresponding to SEQ ID NO:X, SEQ ID NO:Y, and/or a deposited cDNA (cDNA Clone ID). The corresponding gene can be isolated in accordance with known methods using the sequence information disclosed herein. Such methods include, but are not limited to, preparing probes or primers from the disclosed sequence and identifying or amplifying the corresponding gene from appropriate sources of genomic material.

[0084] Also provided in the present invention are allelic variants, orthologs, and/or species homologs. Procedures known in the art can be used to obtain full-length genes, allelic variants, splice variants, full-length coding portions, orthologs, and/or species homologs of genes corresponding to SEQ ID NO:X and SEQ ID NO:Y using information from the sequences disclosed herein or the clones deposited with the ATCC. For example, allelic variants and/or species homologs may be isolated and identified by making suitable probes or primers from the sequences provided herein and screening a suitable nucleic acid source for allelic variants and/or the desired homologue.

[0085] The present invention provides a polynucleotide comprising, or alternatively consisting of, the nucleic acid sequence of SEQ ID NO:X and/or a cDNA contained in ATCC Deposit No.Z. The present invention also provides a polypeptide comprising, or alternatively, consisting of, the polypeptide sequence of SEQ ID NO:Y, a polypeptide encoded by SEQ ID NO:X, and/or a polypeptide encoded by a cDNA contained in ATCC deposit No.Z. Polynucleotides encoding a polypeptide comprising, or alternatively consisting of the polypeptide sequence of SEQ ID NO:Y, a polypeptide encoded by SEQ ID NO:X and/or a polypeptide encoded by the cDNA contained in ATCC Deposit No.Z, are also encompassed by the invention. The present invention further encompasses a polynucleotide comprising, or alternatively consisting of the complement of the nucleic acid sequence of SEQ ID NO:X, and/or the complement of the coding strand of the cDNA contained in ATCC Deposit No.Z.

TABLE 1A

| | | | | | | | | | 5′ NT | | First | Last | | |
|---|---|---|---|---|---|---|---|---|---|---|---|---|---|---|
| | | ATCC | | NT | | 5′ NT | 3′ NT | | of First | AA | AA | AA | First AA | Last |
| | | Deposit | | SEQ | Total | of | of | 5′ NT | AA of | SEQ | of | of | of | AA |
| Gene | cDNA | No. Z and | | ID | NT | Clone | Clone | of Start | Signal | ID | Sig | Sig | Secreted | of |
| No. | Clone ID | Date | Vector | NO: X | Seq. | Seq. | Seq. | Codon | Pep | NO: Y | Pep | Pep | Portion | ORF |
| 1 | H6BSF56 | 203917 | Uni-ZAP XR | 11 | 605 | 44 | 605 | | 83 | 414 | 1 | 6 | 7 | 141 |
| | | Apr. 08, 1999 | | | | | | | | | | | | |
| 2 | H6EEC72 | PTA-793 | Uni-ZAP XR | 12 | 1493 | 1 | 1493 | | 263 | 415 | 1 | 13 | 14 | 18 |
| | | Sep. 27, 1999 | | | | | | | | | | | | |
| 3 | HACAB68 | 203917 | Uni-ZAP XR | 13 | 1300 | 1 | 1300 | 135 | 135 | 416 | 1 | 26 | 27 | 78 |
| | | Apr. 08, 1999 | | | | | | | | | | | | |
| 4 | HACBS22 | 203979 | Uni-ZAP XR | 14 | 3239 | 1 | 3239 | 217 | 217 | 417 | 1 | 23 | 24 | 41 |
| | | Apr. 29, 1999 | | | | | | | | | | | | |
| 5 | HACBT91 | 203917 | Uni-ZAP XR | 15 | 841 | 1 | 841 | | 329 | 418 | 1 | 7 | 8 | 59 |
| | | Apr. 08, 1999 | | | | | | | | | | | | |
| 6 | HADDE71 | 203917 | pSport1 | 16 | 667 | 1 | 667 | 250 | 250 | 419 | 1 | 28 | 29 | 139 |
| | | Apr. 08, 1999 | | | | | | | | | | | | |
| 7 | HADDJ13 | 203917 | pSport1 | 17 | 2318 | 1 | 2318 | 347 | 347 | 420 | 1 | 20 | 21 | 30 |
| | | Apr. 08, 1999 | | | | | | | | | | | | |
| 8 | HADMA77 | 203917 | pBluescript | 18 | 1913 | 763 | 1913 | | 992 | 421 | 1 | 14 | 15 | 23 |
| | | Apr. 08, 1999 | | | | | | | | | | | | |
| 9 | HADMB15 | 203979 | pBluescript | 19 | 330 | 1 | 330 | | 238 | 422 | 1 | 11 | 12 | 20 |
| | | Apr. 29, 1999 | | | | | | | | | | | | |
| 10 | HAGBQ12 | 203917 | Uni-ZAP XR | 20 | 743 | 1 | 743 | 171 | 171 | 423 | 1 | 19 | 20 | 21 |
| | | Apr. 08, 1999 | | | | | | | | | | | | |
| 11 | HAGCC87 | 203917 | Uni-ZAP XR | 21 | 1592 | 479 | 1592 | 509 | 509 | 424 | 1 | | | 9 |
| | | Apr. 08, 1999 | | | | | | | | | | | | |
| 12 | HAGDW20 | 203917 | Uni-ZAP XR | 22 | 1284 | 1 | 1284 | 238 | 238 | 425 | 1 | 16 | 17 | 17 |
| | | Apr. 08, 1999 | | | | | | | | | | | | |
| 13 | HAGEG10 | 203917 | Uni-ZAP XR | 23 | 5684 | 100 | 2890 | 146 | 146 | 426 | 1 | 29 | 30 | 55 |
| | | Apr. 08, 1999 | | | | | | | | | | | | |
| 14 | HAGEQ79 | 203917 | Uni-ZAP XR | 24 | 785 | 1 | 785 | 515 | 515 | 427 | 1 | | | 11 |
| | | Apr. 08, 1999 | | | | | | | | | | | | |
| 15 | HAGFS57 | 203979 | Uni-ZAP XR | 25 | 874 | 1 | 874 | 241 | 241 | 428 | 1 | 26 | 27 | 54 |
| | | Apr. 29, 1999 | | | | | | | | | | | | |
| 16 | HAGHN57 | 203917 | Uni-ZAP XR | 26 | 2440 | 843 | 2440 | 900 | 900 | 429 | 1 | | | 10 |
| | | Apr. 08, 1999 | | | | | | | | | | | | |
| 17 | HAGHR18 | 203917 | Uni-ZAP XR | 27 | 1142 | 1 | 1142 | 28 | 28 | 430 | 1 | 17 | 18 | 32 |
| | | Apr. 08, 1999 | | | | | | | | | | | | |
| 18 | HAHEA15 | 203979 | Uni-ZAP XR | 28 | 1346 | 1 | 1346 | 196 | 196 | 431 | 1 | | | 13 |
| | | Apr. 29, 1999 | | | | | | | | | | | | |
| 19 | HAJAA47 | 203917 | pCMVSport | 29 | 1237 | 1 | 1237 | | 192 | 432 | 1 | 15 | 16 | 38 |
| | | Apr. 08, 1999 | 3.0 | | | | | | | | | | | |
| 20 | HAJAY92 | 203959 | pCMVSport | 30 | 2345 | 1 | 2345 | 12 | 12 | 433 | 1 | 20 | 21 | 94 |
| | | Apr. 26, 1999 | 3.0 | | | | | | | | | | | |
| 21 | HAOAG15 | 203979 | pSport1 | 31 | 5143 | 7 | 4802 | | 8 | 434 | 1 | 22 | 23 | 1167 |
| | | Apr. 29, 1999 | | | | | | | | | | | | |
| 22 | HAQAI92 | 203917 | Uni-ZAP XR | 32 | 607 | 1 | 602 | 250 | 250 | 435 | 1 | 15 | 16 | 23 |
| | | Apr. 08, 1999 | | | | | | | | | | | | |
| 23 | HAQBG57 | 203917 | Uni-ZAP XR | 33 | 1048 | 1 | 1031 | | 170 | 436 | 1 | 15 | 16 | 56 |
| | | Apr. 08, 1999 | | | | | | | | | | | | |
| 24 | HAQCE11 | 203917 | Uni-ZAP XR | 34 | 596 | 1 | 596 | | 262 | 437 | 1 | | | 3 |
| | | Apr. 08, 1999 | | | | | | | | | | | | |
| 25 | HATBI94 | 203917 | Uni-ZAP XR | 35 | 1380 | 1 | 1380 | 18 | 18 | 438 | 1 | 20 | 21 | 68 |
| | | Apr. 08, 1999 | | | | | | | | | | | | |
| 26 | HATCB45 | 203917 | Uni-ZAP XR | 36 | 903 | 1 | 903 | 268 | 268 | 439 | 1 | 16 | 17 | 42 |
| | | Apr. 08, 1999 | | | | | | | | | | | | |
| 27 | HATCI03 | 203917 | Uni-ZAP XR | 37 | 934 | 1 | 934 | 271 | 271 | 440 | 1 | | | 17 |
| | | Apr. 08, 1999 | | | | | | | | | | | | |
| 28 | HATEH20 | 203917 | Uni-ZAP XR | 38 | 850 | 1 | 850 | 93 | 93 | 441 | 1 | 19 | 20 | 42 |
| | | Apr. 08, 1999 | | | | | | | | | | | | |
| 29 | HBAGD86 | 203917 | pSport1 | 39 | 1713 | 293 | 1596 | 521 | 521 | 442 | 1 | 18 | 19 | 19 |
| | | Apr. 08, 1999 | | | | | | | | | | | | |
| 30 | HBCJL35 | PTA-794 | pSport1 | 40 | 720 | 1 | 720 | 17 | 17 | 443 | 1 | 27 | 28 | 124 |
| | | Sep. 27, 1999 | | | | | | | | | | | | |
| 30 | HBCJL35 | PTA-794 | pSport1 | 389 | 2878 | 1027 | 1747 | 1033 | 1033 | 792 | 1 | 27 | 28 | 124 |
| | | Sep. 27, 1999 | | | | | | | | | | | | |
| 31 | HBGBC29 | 203917 | Uni-ZAP XR | 41 | 1856 | 764 | 1829 | | 1016 | 444 | 1 | | | 2 |
| | | Apr. 08, 1999 | | | | | | | | | | | | |
| 32 | HBGNC72 | PTA-793 | Uni-ZAP XR | 42 | 802 | 1 | 802 | | 550 | 445 | 1 | 8 | 9 | 76 |
| | | Sep. 27, 1999 | | | | | | | | | | | | |
| 33 | HBHAA81 | 203959 | Uni-ZAP XR | 43 | 1647 | 1 | 1647 | 28 | 28 | 446 | 1 | 24 | 25 | 203 |
| | | Apr. 26, 1999 | | | | | | | | | | | | |
| 34 | HBIAC29 | 203917 | Uni-ZAP XR | 44 | 1782 | 808 | 1545 | 1036 | 1036 | 447 | 1 | 24 | 25 | 29 |
| | | Apr. 08, 1999 | | | | | | | | | | | | |
| 35 | HBICW51 | 203917 | Uni-ZAP XR | 45 | 619 | 1 | 619 | | 289 | 448 | 1 | 16 | 17 | 42 |
| | | Apr. 08, 1999 | | | | | | | | | | | | |
| 36 | HBJAB02 | 203917 | Uni-ZAP XR | 46 | 1693 | 1 | 1665 | 84 | 84 | 449 | 1 | 27 | 28 | 34 |
| | | Apr. 08, 1999 | | | | | | | | | | | | |
| 37 | HBJAC65 | 203917 | Uni-ZAP XR | 47 | 1685 | 1 | 892 | 137 | 137 | 450 | 1 | 13 | 14 | 23 |
| | | Apr. 08, 1999 | | | | | | | | | | | | |
| 38 | HBJBM12 | 203917 | Uni-ZAP XR | 48 | 1135 | 1 | 1135 | 47 | 47 | 451 | 1 | | | 31 |
| | | Apr. 08, 1999 | | | | | | | | | | | | |
| 39 | HBJDS79 | 203917 | Uni-ZAP XR | 49 | 2325 | 896 | 2325 | 1032 | 1032 | 452 | 1 | 37 | 38 | 107 |
| | | Apr. 08, 1999 | | | | | | | | | | | | |
| 40 | HBJEL16 | 203979 | Uni-ZAP XR | 50 | 750 | 1 | 750 | 115 | 115 | 453 | 1 | 24 | 25 | 36 |
| | | Apr. 29, 1999 | | | | | | | | | | | | |
| 41 | HBJFK45 | 203917 | Uni-ZAP XR | 51 | 543 | 1 | 543 | | 430 | 454 | 1 | | | 8 |
| | | Apr. 08, 1999 | | | | | | | | | | | | |
| 42 | HBJKD16 | 203979 | Uni-ZAP XR | 52 | 1629 | 1 | 1629 | 78 | 78 | 455 | 1 | 18 | 19 | 31 |
| | | Apr. 29, 1999 | | | | | | | | | | | | |
| 43 | HBMBM96 | 203917 | pBluescript | 53 | 1076 | 1 | 1076 | | 170 | 456 | 1 | | | 4 |
| | | Apr. 08, 1999 | | | | | | | | | | | | |
| 44 | HBMBX01 | 203917 | pBluescript | 54 | 1652 | 179 | 1458 | 363 | 363 | 457 | 1 | 18 | 19 | 28 |
| | | Apr. 08, 1999 | | | | | | | | | | | | |
| 45 | HBMTX26 | 203917 | Uni-ZAP XR | 55 | 1308 | 1 | 1308 | 107 | 107 | 458 | 1 | 46 | 47 | 89 |
| | | Apr. 08, 1999 | | | | | | | | | | | | |
| 46 | HBMUH74 | PTA-181 | Uni-ZAP XR | 56 | 726 | 1 | 726 | 344 | 344 | 459 | 1 | 13 | 14 | 28 |
| | | Jun. 07, 1999 | | | | | | | | | | | | |
| 47 | HBMWE61 | 203917 | Uni-ZAP XR | 57 | 1118 | 1 | 1118 | 238 | 238 | 460 | 1 | | | 9 |
| | | Apr. 08, 1999 | | | | | | | | | | | | |
| 48 | HBNAX40 | 203917 | Uni-ZAP XR | 58 | 2793 | 2455 | 2793 | 2497 | 2497 | 461 | 1 | 18 | 19 | 49 |
| | | Apr. 08, 1999 | | | | | | | | | | | | |
| 49 | HBNBJ76 | 203917 | Uni-ZAP XR | 59 | 1974 | 1469 | 1974 | | 1603 | 462 | 1 | 29 | 30 | 68 |
| | | Apr. 08, 1999 | | | | | | | | | | | | |
| 50 | HBQAC57 | 203917 | Lambda ZAP | 60 | 2111 | 1 | 2111 | 146 | 146 | 463 | 1 | | | 29 |
| | | Apr. 08, 1999 | II | | | | | | | | | | | |
| 51 | HBSAK32 | PTA-181 | Uni-ZAP XR | 61 | 592 | 129 | 592 | 447 | 447 | 464 | 1 | 27 | 28 | 48 |
| | | Jun. 07, 1999 | | | | | | | | | | | | |
| 52 | HBXCM66 | 203917 | ZAP Express | 62 | 1010 | 41 | 1010 | 119 | 119 | 465 | 1 | | | 16 |
| | | Apr. 08, 1999 | | | | | | | | | | | | |
| 53 | HBXCX15 | 203917 | ZAP Express | 63 | 1219 | 1 | 1219 | | 1148 | 466 | 1 | | | 1 |
| | | Apr. 08, 1999 | | | | | | | | | | | | |
| 54 | HCDBO32 | 203917 | Uni-ZAP XR | 64 | 2630 | 1480 | 2630 | 1669 | 1669 | 467 | 1 | 25 | 26 | 71 |
| | | Apr. 08, 1999 | | | | | | | | | | | | |
| 55 | HCE2H52 | 203979 | Uni-ZAP XR | 65 | 1276 | 1 | 1276 | | 29 | 468 | 1 | 15 | 16 | 23 |
| | | Apr. 29, 1999 | | | | | | | | | | | | |
| 56 | HCE3B04 | 203917 | Uni-ZAP XR | 66 | 1807 | 1347 | 1806 | | 1588 | 469 | 1 | 13 | 14 | 32 |
| | | Apr. 08, 1999 | | | | | | | | | | | | |
| 57 | HCE5F78 | 203917 | Uni-ZAP XR | 67 | 1732 | 282 | 1732 | | 566 | 470 | 1 | 8 | 9 | 32 |
| | | Apr. 08, 1999 | | | | | | | | | | | | |
| 58 | HCEEE79 | 203917 | Uni-ZAP XR | 68 | 1052 | 1 | 1052 | 131 | 131 | 471 | 1 | 15 | 16 | 55 |
| | | Apr. 08, 1999 | | | | | | | | | | | | |
| 59 | HCEEQ25 | 203917 | Uni-ZAP XR | 69 | 992 | 1 | 992 | | 111 | 472 | 1 | 15 | 16 | 23 |
| | | Apr. 08, 1999 | | | | | | | | | | | | |
| 60 | HCEEU18 | 203917 | Uni-ZAP XR | 70 | 1229 | 1 | 1229 | 209 | 209 | 473 | 1 | 30 | 31 | 43 |
| | | Apr. 08, 1999 | | | | | | | | | | | | |
| 61 | HCEFZ82 | 203917 | Uni-ZAP XR | 71 | 1811 | 44 | 1781 | 215 | 215 | 474 | 1 | 16 | 17 | 265 |
| | | Apr. 08, 1999 | | | | | | | | | | | | |
| 62 | HCEGG08 | 203979 | Uni-ZAP XR | 72 | 2534 | 979 | 2025 | 1114 | 1114 | 475 | 1 | 15 | 16 | 27 |
| | | Apr. 29, 1999 | | | | | | | | | | | | |
| 63 | HCFLN88 | 203917 | pSport1 | 73 | 1434 | 1 | 1434 | 101 | 101 | 476 | 1 | 16 | 17 | 25 |
| | | Apr. 08, 1999 | | | | | | | | | | | | |
| 64 | HCFLT90 | 203917 | pSport1 | 74 | 910 | 1 | 735 | | 384 | 477 | 1 | | | 1 |
| | | Apr. 08, 1999 | | | | | | | | | | | | |
| 65 | HCQCM24 | 203979 | Lambda ZAP | 75 | 1929 | 606 | 1929 | 815 | 815 | 478 | 1 | | | 38 |
| | | Apr. 29, 1999 | II | | | | | | | | | | | |
| 66 | HCRAY10 | 203917 | Uni-ZAP XR | 76 | 788 | 1 | 788 | | 141 | 479 | 1 | 36 | 37 | 145 |
| | | Apr. 08, 1999 | | | | | | | | | | | | |
| 67 | HCRBF72 | 203917 | Uni-ZAP XR | 77 | 1264 | 101 | 1142 | 191 | 191 | 480 | 1 | 1 | 2 | 211 |
| | | Apr. 08, 1999 | | | | | | | | | | | | |
| 68 | HCRNF78 | 203917 | pSport1 | 78 | 892 | 1 | 892 | 363 | 363 | 481 | 1 | 22 | 23 | 46 |
| | | Apr. 08, 1999 | | | | | | | | | | | | |
| 69 | HCUAF85 | 203917 | ZAP Express | 79 | 597 | 1 | 597 | 230 | 230 | 482 | 1 | 23 | 24 | 122 |
| | | Apr. 08, 1999 | | | | | | | | | | | | |
| 70 | HCUCF89 | 203917 | ZAP Express | 80 | 530 | 1 | 530 | 189 | 189 | 483 | 1 | 18 | 19 | 29 |
| | | Apr. 08, 1999 | | | | | | | | | | | | |
| 71 | HCUCK44 | 203957 | ZAP Express | 81 | 1143 | 578 | 1136 | 598 | 598 | 484 | 1 | 30 | 31 | 60 |
| | | Apr. 26, 1999 | | | | | | | | | | | | |
| 72 | HCUDD64 | 203917 | ZAP Express | 82 | 402 | 150 | 389 | 256 | 256 | 485 | 1 | 35 | 36 | 49 |
| | | Apr. 08, 1999 | | | | | | | | | | | | |
| 73 | HCWAE64 | 203917 | ZAP Express | 83 | 471 | 1 | 471 | | 410 | 486 | 1 | | | 5 |
| | | Apr. 08, 1999 | | | | | | | | | | | | |
| 74 | HCWFU39 | 203917 | ZAP Express | 84 | 467 | 1 | 467 | 282 | 282 | 487 | 1 | 9 | 10 | 22 |
| | | Apr. 08, 1999 | | | | | | | | | | | | |
| 75 | HCWUL09 | 203917 | ZAP Express | 85 | 761 | 3 | 761 | 333 | 333 | 488 | 1 | | | 11 |
| | | Apr. 08, 1999 | | | | | | | | | | | | |
| 76 | HDHAA42 | 203917 | pCMVSport | 86 | 943 | 1 | 943 | 48 | 48 | 489 | 1 | 25 | 26 | 26 |
| | | Apr. 08, 1999 | 2.0 | | | | | | | | | | | |
| 77 | HDHEB76 | 203917 | pCMVSport | 87 | 497 | 1 | 497 | | 416 | 490 | 1 | 11 | 12 | 12 |
| | | Apr. 08, 1999 | 2.0 | | | | | | | | | | | |
| 78 | HDPCW16 | 203960 | pCMVSport | 88 | 1536 | 1 | 1536 | 172 | 172 | 491 | 1 | 38 | 39 | 55 |
| | | Apr. 26, 1999 | 3.0 | | | | | | | | | | | |
| 79 | HDPDI72 | PTA-794 | pCMVSport | 89 | 1550 | 1 | 1550 | 23 | 23 | 492 | 1 | 17 | 18 | 120 |
| | | Sep. 27, 1999 | 3.0 | | | | | | | | | | | |
| 80 | HDPDJ58 | 203960 | pCMVSport | 90 | 1997 | 1 | 1997 | 279 | 279 | 493 | 1 | | | 20 |
| | | Apr. 26, 1999 | 3.0 | | | | | | | | | | | |
| 81 | HDPFF10 | PTA-181 | pCMVSport | 91 | 2582 | 3 | 2582 | 186 | 186 | 494 | 1 | 19 | 20 | 425 |
| | | Jun. 07, 1999 | 3.0 | | | | | | | | | | | |
| 82 | HDPFU43 | 203960 | pCMVSport | 92 | 1904 | 1 | 1889 | 220 | 220 | 495 | 1 | 28 | 29 | 52 |
| | | Apr. 26, 1999 | 3.0 | | | | | | | | | | | |
| 83 | HDPFY18 | 203918 | pCMVSport | 93 | 2187 | 1 | 2187 | 161 | 161 | 496 | 1 | | | 7 |
| | | Apr. 08, 1999 | 3.0 | | | | | | | | | | | |
| 84 | HDPIE44 | PTA-794 | pCMVSport | 94 | 4115 | 1 | 4115 | 169 | 169 | 497 | 1 | 35 | 36 | 60 |
| | | Sep. 27, 1999 | 3.0 | | | | | | | | | | | |
| 85 | HDPIU94 | 203960 | pCMVSport | 95 | 2196 | 21 | 2196 | 208 | 208 | 498 | 1 | 21 | 22 | 23 |
| | | Apr. 26, 1999 | 3.0 | | | | | | | | | | | |
| 86 | HDPOL37 | 203960 | pCMVSport | 96 | 1489 | 1 | 1489 | 189 | 189 | 499 | 1 | 32 | 33 | 62 |
| | | Apr. 26, 1999 | 3.0 | | | | | | | | | | | |
| 87 | HDPOO76 | 203960 | pCMVSport | 97 | 645 | 1 | 645 | | 109 | 500 | 1 | 15 | 16 | 16 |
| | | Apr. 26, 1999 | 3.0 | | | | | | | | | | | |
| 88 | HDPPD93 | 203960 | pCMVSport | 98 | 701 | 1 | 701 | 28 | 28 | 501 | 1 | | | 12 |
| | | Apr. 26, 1999 | 3.0 | | | | | | | | | | | |
| 89 | HDPPW82 | 203959 | pCMVSport | 99 | 552 | 1 | 552 | 395 | 395 | 502 | 1 | | | 29 |
| | | Apr. 26, 1999 | 3.0 | | | | | | | | | | | |
| 90 | HDPXN20 | 203960 | pCMVSport | 100 | 1756 | 1 | 1756 | 61 | 61 | 503 | 1 | 20 | 21 | 41 |
| | | Apr. 26, 1999 | 3.0 | | | | | | | | | | | |
| 91 | HDTAU35 | 203960 | pCMVSport | 101 | 377 | 1 | 377 | 260 | 260 | 504 | 1 | 12 | 13 | 17 |
| | | Apr. 26, 1999 | 2.0 | | | | | | | | | | | |
| 92 | HDTAV54 | 203960 | pCMVSport | 102 | 660 | 1 | 660 | 191 | 191 | 505 | 1 | 22 | 23 | 33 |
| | | Apr. 26, 1999 | 2.0 | | | | | | | | | | | |
| 93 | HDTGW48 | 203960 | pCMVSport | 103 | 2261 | 1 | 2261 | | 375 | 506 | 1 | 17 | 18 | 29 |
| | | Apr. 26, 1999 | 2.0 | | | | | | | | | | | |
| 94 | HDTLM18 | 203960 | pCMVSport | 104 | 525 | 1 | 525 | 345 | 345 | 507 | 1 | 18 | 19 | 60 |
| | | Apr. 26, 1999 | 2.0 | | | | | | | | | | | |
| 95 | HE2CH58 | 203960 | Uni-ZAP XR | 105 | 809 | 1 | 809 | 321 | 321 | 508 | 1 | 8 | 9 | 52 |
| | | Apr. 26, 1999 | | | | | | | | | | | | |
| 96 | HE2PO93 | 203960 | Uni-ZAP XR | 106 | 1323 | 638 | 1323 | 770 | 770 | 509 | 1 | 27 | 28 | 42 |
| | | Apr. 26, 1999 | | | | | | | | | | | | |
| 97 | HE6AU52 | 203960 | Uni-ZAP XR | 107 | 845 | 1 | 845 | 41 | 41 | 510 | 1 | 18 | 19 | 41 |
| | | Apr. 26, 1999 | | | | | | | | | | | | |
| 98 | HE6CS65 | 203960 | Uni-ZAP XR | 108 | 1526 | 1 | 1526 | | 295 | 511 | 1 | 10 | 11 | 62 |
| | | Apr. 26, 1999 | | | | | | | | | | | | |
| 99 | HE6DO92 | 203960 | Uni-ZAP XR | 109 | 941 | 1 | 941 | 38 | 38 | 512 | 1 | 20 | 21 | 25 |
| | | Apr. 26, 1999 | | | | | | | | | | | | |
| 100 | HE6EY13 | 203979 | Uni-ZAP XR | 110 | 867 | 1 | 867 | 171 | 171 | 513 | 1 | 14 | 15 | 46 |
| | | Apr. 29, 1999 | | | | | | | | | | | | |
| 101 | HE8BQ49 | 203960 | Uni-ZAP XR | 111 | 1875 | 12 | 1875 | 133 | 133 | 514 | 1 | | | 11 |
| | | Apr. 26, 1999 | | | | | | | | | | | | |
| 102 | HE8SG96 | PTA-181 | Uni-ZAP XR | 112 | 2036 | 1 | 2036 | 118 | 118 | 515 | 1 | 17 | 18 | 24 |
| | | Jun. 07, 1999 | | | | | | | | | | | | |
| 103 | HE9CY05 | 203960 | Uni-ZAP XR | 113 | 1047 | 47 | 1047 | 55 | 55 | 516 | 1 | 21 | 22 | 235 |
| | | Apr. 26, 1999 | | | | | | | | | | | | |
| 104 | HE9GG20 | 203960 | Uni-ZAP XR | 114 | 676 | 1 | 676 | 319 | 319 | 517 | 1 | | | 9 |
| | | Apr. 26, 1999 | | | | | | | | | | | | |
| 105 | HEAAW94 | 203979 | Uni-ZAP XR | 115 | 924 | 1 | 924 | 189 | 189 | 518 | 1 | | | 11 |
| | | Apr. 29, 1999 | | | | | | | | | | | | |
| 106 | HEBCI18 | 203960 | Uni-ZAP XR | 116 | 1121 | 713 | 1050 | 855 | 855 | 519 | 1 | 43 | 44 | 69 |
| | | Apr. 26, 1999 | | | | | | | | | | | | |
| 107 | HEBDF77 | 203960 | Uni-ZAP XR | 117 | 1820 | 1 | 1820 | 681 | 681 | 520 | 1 | 29 | 30 | 36 |
| | | Apr. 26, 1999 | | | | | | | | | | | | |
| 108 | HEBDQ91 | 203960 | Uni-ZAP XR | 118 | 1573 | 1007 | 1573 | | 1211 | 521 | 1 | 29 | 30 | 41 |
| | | Apr. 26, 1999 | | | | | | | | | | | | |
| 109 | HEBFR46 | 203979 | Uni-ZAP XR | 119 | 1304 | 1 | 1304 | 200 | 200 | 522 | 1 | 26 | 27 | 29 |
| | | Apr. 29, 1999 | | | | | | | | | | | | |
| 110 | HEBGE07 | 203960 | Uni-ZAP XR | 120 | 1867 | 1 | 1867 | 106 | 106 | 523 | 1 | 25 | 26 | 42 |
| | | Apr. 26, 1999 | | | | | | | | | | | | |
| 111 | HELAT35 | 203960 | Uni-ZAP XR | 121 | 2168 | 1 | 2168 | 215 | 215 | 524 | 1 | | | 20 |
| | | Apr. 26, 1999 | | | | | | | | | | | | |
| 112 | HELBU54 | 203960 | Uni-ZAP XR | 122 | 1260 | 1 | 1260 | 82 | 82 | 525 | 1 | | | 17 |
| | | Apr. 26, 1999 | | | | | | | | | | | | |
| 113 | HEMEY47 | 203979 | Uni-ZAP XR | 123 | 1614 | 204 | 1614 | 440 | 440 | 526 | 1 | | | 10 |
| | | Apr. 29, 1999 | | | | | | | | | | | | |
| 114 | HEOMC46 | PTA-181 | pSport1 | 124 | 939 | 1 | 939 | | 154 | 527 | 1 | 40 | 41 | 51 |
| | | Jun. 07, 1999 | | | | | | | | | | | | |
| 115 | HEPBA14 | PTA-181 | Uni-ZAP XR | 125 | 746 | 1 | 746 | | 664 | 528 | 1 | 13 | 14 | 15 |
| | | Jun. 07, 1999 | | | | | | | | | | | | |
| 116 | HEQAH80 | 203960 | pCMVSport | 126 | 1647 | 1 | 1647 | 150 | 150 | 529 | 1 | 26 | 27 | 32 |
| | | Apr. 26, 1999 | 3.0 | | | | | | | | | | | |
| 117 | HETDW58 | 203979 | Uni-ZAP XR | 127 | 1533 | 328 | 1533 | 541 | 541 | 530 | 1 | 16 | 17 | 22 |
| | | Apr. 29, 1999 | | | | | | | | | | | | |
| 118 | HETEY67 | 203960 | Uni-ZAP XR | 128 | 1778 | 1 | 1778 | | 292 | 531 | 1 | 13 | 14 | 66 |
| | | Apr. 26, 1999 | | | | | | | | | | | | |
| 119 | HFCDW95 | 203979 | Uni-ZAP XR | 129 | 871 | 1 | 871 | | 151 | 532 | 1 | | | 2 |
| | | Apr. 29, 1999 | | | | | | | | | | | | |
| 120 | HFCFD04 | 203960 | Uni-ZAP XR | 130 | 1437 | 1 | 1437 | 170 | 170 | 533 | 1 | | | 15 |
| | | Apr. 26, 1999 | | | | | | | | | | | | |
| 121 | HFEAY59 | 203960 | Uni-ZAP XR | 131 | 1153 | 1 | 1153 | 154 | 154 | 534 | 1 | 24 | 25 | 40 |
| | | Apr. 26, 1999 | | | | | | | | | | | | |
| 122 | HFEBO17 | PTA-181 | Uni-ZAP XR | 132 | 990 | 1 | 990 | 136 | 136 | 535 | 1 | 17 | 18 | 27 |
| | | Jun. 07, 1999 | | | | | | | | | | | | |
| 123 | HFGAJ16 | 203960 | Uni-ZAP XR | 133 | 866 | 1 | 866 | 40 | 40 | 536 | 1 | 22 | 23 | 31 |
| | | Apr. 26, 1999 | | | | | | | | | | | | |
| 124 | HFIHZ75 | 203960 | pSport1 | 134 | 1280 | 454 | 1165 | 700 | 700 | 537 | 1 | 21 | 22 | 51 |
| | | Apr. 26, 1999 | | | | | | | | | | | | |
| 125 | HFIJA29 | 203960 | pSport1 | 135 | 1275 | 110 | 1275 | 175 | 175 | 538 | 1 | 27 | 28 | 82 |
| | | Apr. 26, 1999 | | | | | | | | | | | | |
| 126 | HFIJA68 | 203979 | pSport1 | 136 | 1157 | 1 | 1157 | 283 | 283 | 539 | 1 | 22 | 23 | 43 |
| | | Apr. 29, 1999 | | | | | | | | | | | | |
| 127 | HFKES05 | 203960 | Uni-ZAP XR | 137 | 1885 | 1 | 1885 | 243 | 243 | 540 | 1 | 17 | 18 | 42 |
| | | Apr. 26, 1999 | | | | | | | | | | | | |
| 128 | HFKEU12 | 203960 | Uni-ZAP XR | 138 | 1031 | 1 | 1031 | 6 | 6 | 541 | 1 | 16 | 17 | 55 |
| | | Apr. 26, 1999 | | | | | | | | | | | | |
| 129 | HFKFX64 | 203960 | Uni-ZAP XR | 139 | 779 | 1 | 779 | 127 | 127 | 542 | 1 | | | 14 |
| | | Apr. 26, 1999 | | | | | | | | | | | | |
| 130 | HFPDS07 | 203960 | Uni-ZAP XR | 140 | 3115 | 2302 | 3114 | 2546 | 2546 | 543 | 1 | 23 | 24 | 25 |
| | | Apr. 26, 1999 | | | | | | | | | | | | |
| 131 | HFRAB10 | 203960 | Uni-ZAP XR | 141 | 1419 | 1 | 1419 | 203 | 203 | 544 | 1 | 27 | 28 | 45 |
| | | Apr. 26, 1999 | | | | | | | | | | | | |
| 132 | HFTBM38 | 203960 | Uni-ZAP XR | 142 | 1941 | 322 | 1941 | 577 | 577 | 545 | 1 | 18 | 19 | 30 |
| | | Apr. 26, 1999 | | | | | | | | | | | | |
| 133 | HFVGK35 | 203960 | pBluescript | 143 | 1236 | 1 | 1236 | | 14 | 546 | 1 | | | 5 |
| | | Apr. 26, 1999 | | | | | | | | | | | | |
| 134 | HFXBN86 | PTA-181 | Lambda ZAP | 144 | 1379 | 1 | 1379 | 149 | 149 | 547 | 1 | 25 | 26 | 65 |
| | | Jun. 07, 1999 | II | | | | | | | | | | | |
| 135 | HFXBT66 | 203960 | Lambda ZAP | 145 | 1001 | 1 | 1001 | 172 | 172 | 548 | 1 | 15 | 16 | 26 |
| | | Apr. 26, 1999 | II | | | | | | | | | | | |
| 136 | HFXFZ46 | 203960 | Lambda ZAP | 146 | 1378 | 1 | 1378 | 258 | 258 | 549 | 1 | | | 6 |
| | | Apr. 26, 1999 | II | | | | | | | | | | | |
| 137 | HGBER72 | 203960 | Uni-ZAP XR | 147 | 1316 | 1 | 1316 | 43 | 43 | 550 | 1 | 16 | 17 | 19 |
| | | Apr. 26, 1999 | | | | | | | | | | | | |
| 138 | HGBEY14 | 203960 | Uni-ZAP XR | 148 | 1738 | 1 | 1738 | 233 | 233 | 551 | 1 | 18 | 19 | 39 |
| | | Apr. 26, 1999 | | | | | | | | | | | | |
| 139 | HGBGN34 | 203960 | Uni-ZAP XR | 149 | 528 | 1 | 528 | | 280 | 552 | 1 | 32 | 33 | 48 |
| | | Apr. 26, 1999 | | | | | | | | | | | | |
| 140 | HGLBG15 | 203960 | Uni-ZAP XR | 150 | 778 | 1 | 778 | | 191 | 553 | 1 | | | 26 |
| | | Apr. 26, 1999 | | | | | | | | | | | | |
| 141 | HHEGS55 | PTA-181 | pCMVSport | 151 | 594 | 2 | 594 | 159 | 159 | 554 | 1 | 16 | 17 | 36 |
| | | Jun. 07, 1999 | 3.0 | | | | | | | | | | | |
| 142 | HHEOW19 | PTA-793 | pCMVSport | 152 | 1589 | 1 | 1589 | 183 | 183 | 555 | 1 | 18 | 19 | 64 |
| | | Sep. 27, 1999 | 3.0 | | | | | | | | | | | |
| 143 | HHFEC39 | 203960 | Uni-ZAP XR | 153 | 1302 | 1 | 1302 | | 1211 | 556 | 1 | | | 1 |
| | | Apr. 26, 1999 | | | | | | | | | | | | |
| 144 | HHFFF87 | 203960 | Uni-ZAP XR | 154 | 1547 | 1 | 1547 | 229 | 229 | 557 | 1 | | | 41 |
| | | Apr. 26, 1999 | | | | | | | | | | | | |
| 145 | HHFFL34 | 203960 | Uni-ZAP XR | 155 | 2632 | 1 | 2632 | 42 | 42 | 558 | 1 | 21 | 22 | 223 |
| | | Apr. 26, 1999 | | | | | | | | | | | | |
| 146 | HHFFS40 | 203960 | Uni-ZAP XR | 156 | 1816 | 1 | 1816 | 37 | 37 | 559 | 1 | 18 | 19 | 47 |
| | | Apr. 26, 1999 | | | | | | | | | | | | |
| 147 | HHGCS78 | 203960 | Lambda ZAP | 157 | 575 | 46 | 575 | 290 | 290 | 560 | 1 | 17 | 18 | 24 |
| | | Apr. 26, 1999 | II | | | | | | | | | | | |
| 148 | HHGDT26 | 203960 | Lambda ZAP | 158 | 1584 | 1 | 1584 | 181 | 181 | 561 | 1 | | | 8 |
| | | Apr. 26, 1999 | II | | | | | | | | | | | |
| 149 | HHPFU28 | 203960 | Uni-ZAP XR | 159 | 1838 | 1 | 1838 | | 156 | 562 | 1 | 18 | 19 | 27 |
| | | Apr. 26, 1999 | | | | | | | | | | | | |
| 150 | HHSBI65 | 203917 | Uni-ZAP XR | 160 | 1444 | 1 | 1431 | 62 | 62 | 563 | 1 | 17 | 18 | 55 |
| | | Apr. 08, 1999 | | | | | | | | | | | | |
| 151 | HHSDI53 | PTA-181 | Uni-ZAP XR | 161 | 1277 | 1 | 1277 | 221 | 221 | 564 | 1 | 14 | 15 | 24 |
| | | Jun. 07, 1999 | | | | | | | | | | | | |
| 152 | HHSFC09 | 203960 | Uni-ZAP XR | 162 | 531 | 1 | 531 | | 380 | 565 | 1 | 10 | 11 | 32 |
| | | Apr. 26, 1999 | | | | | | | | | | | | |
| 153 | HHSGL28 | 203960 | Uni-ZAP XR | 163 | 1093 | 1 | 1093 | 453 | 453 | 566 | 1 | | | 6 |
| | | Apr. 26, 1999 | | | | | | | | | | | | |
| 154 | HISBA38 | 203957 | pSport1 | 164 | 1058 | 1 | 1058 | 169 | 169 | 567 | 1 | 32 | 33 | 36 |
| | | Apr. 26, 1999 | | | | | | | | | | | | |
| 155 | HJMAA03 | 203957 | pCMVSport | 165 | 665 | 1 | 665 | | 527 | 568 | 1 | | | 9 |
| | | Apr. 26, 1999 | 3.0 | | | | | | | | | | | |
| 156 | HJMAV41 | PTA-181 | pCMVSport | 166 | 1017 | 1 | 1017 | 207 | 207 | 569 | 1 | | | 27 |
| | | Jun. 07, 1999 | 3.0 | | | | | | | | | | | |
| 157 | HJMAY90 | 203959 | pCMVSport | 167 | 2886 | 2233 | 2886 | | 2492 | 570 | 1 | 22 | 23 | 34 |
| | | Apr. 26, 1999 | 3.0 | | | | | | | | | | | |
| 158 | HJPBE39 | 203957 | Uni-ZAP XR | 168 | 1298 | 69 | 1298 | | 170 | 571 | 1 | | | 18 |
| | | Apr. 26, 1999 | | | | | | | | | | | | |
| 159 | HJPBK28 | 203957 | Uni-ZAP XR | 169 | 989 | 1 | 989 | | 256 | 572 | 1 | 21 | 22 | 43 |
| | | Apr. 26, 1999 | | | | | | | | | | | | |
| 160 | HJPCH08 | 203959 | Uni-ZAP XR | 170 | 879 | 1 | 879 | | 374 | 573 | 1 | 10 | 11 | 117 |
| | | Apr. 26, 1999 | | | | | | | | | | | | |
| 161 | HKABU43 | 203959 | pCMVSport | 171 | 1919 | 581 | 1919 | 755 | 755 | 574 | 1 | 20 | 21 | 281 |
| | | Apr. 26, 1999 | 2.0 | | | | | | | | | | | |
| 162 | HKACI79 | PTA-181 | pCMVSport | 172 | 1181 | 1 | 1181 | 207 | 207 | 575 | 1 | 14 | 15 | 50 |
| | | Jun. 07, 1999 | 2.0 | | | | | | | | | | | |
| 163 | HKAFF50 | 203957 | pCMVSport | 173 | 1801 | 1 | 1801 | 343 | 343 | 576 | 1 | 13 | 14 | 50 |
| | | Apr. 26, 1999 | 2.0 | | | | | | | | | | | |
| 164 | HKGBF25 | 203957 | pSport1 | 174 | 2007 | 1 | 2007 | 261 | 261 | 577 | 1 | 18 | 19 | 36 |
| | | Apr. 26, 1999 | | | | | | | | | | | | |
| 165 | HKMLK03 | 203957 | pBluescript | 175 | 1049 | 1 | 1049 | 214 | 214 | 578 | 1 | | | 11 |
| | | Apr. 26, 1999 | | | | | | | | | | | | |
| 166 | HKMLM95 | 203957 | pBluescript | 176 | 1098 | 1 | 1098 | | 390 | 579 | 1 | | | 4 |
| | | Apr. 26, 1999 | | | | | | | | | | | | |
| 167 | HLDBG17 | PTA-181 | pCMVSport | 177 | 652 | 1 | 652 | 184 | 184 | 580 | 1 | 23 | 24 | 41 |
| | | Jun. 07, 1999 | 3.0 | | | | | | | | | | | |
| 168 | HLDCA54 | 203979 | pCMVSport | 178 | 1815 | 425 | 1815 | 550 | 550 | 581 | 1 | 26 | 27 | 46 |
| | | Apr. 29, 1999 | 3.0 | | | | | | | | | | | |
| 169 | HLDQU79 | 203959 | pCMVSport | 179 | 1488 | 1 | 1488 | 99 | 99 | 582 | 1 | 23 | 24 | 348 |
| | | Apr. 26, 1999 | 3.0 | | | | | | | | | | | |
| 169 | HLDQU79 | 203959 | pCMVSport | 390 | 3179 | 163 | 1474 | 75 | 75 | 793 | 1 | 29 | 30 | 348 |
| | | Apr. 26, 1999 | 3.0 | | | | | | | | | | | |
| 170 | HLDRT09 | 203957 | pCMVSport | 180 | 721 | 254 | 665 | 522 | 522 | 583 | 1 | 20 | 21 | 66 |
| | | Apr. 26, 1999 | 3.0 | | | | | | | | | | | |
| 171 | HLHAP05 | 203957 | Uni-ZAP XR | 181 | 1842 | 12 | 1842 | 45 | 45 | 584 | 1 | | | 14 |
| | | Apr. 26, 1999 | | | | | | | | | | | | |
| 172 | HLHCS23 | 203957 | Uni-ZAP XR | 182 | 1427 | 1 | 1427 | 25 | 25 | 585 | 1 | 24 | 25 | 34 |
| | | Apr. 26, 1999 | | | | | | | | | | | | |
| 173 | HLIBO72 | PTA-792 | pCMVSport 1 | 183 | 1768 | 1 | 1768 | 167 | 167 | 586 | 1 | 46 | 47 | 127 |
| | | Sep. 27, 1999 | | | | | | | | | | | | |
| 174 | HLICE88 | 203957 | pCMVSport 1 | 184 | 840 | 401 | 824 | | 708 | 587 | 1 | | | 2 |
| | | Apr. 26, 1999 | | | | | | | | | | | | |
| 175 | HLICO10 | 203957 | pCMVSport 1 | 185 | 903 | 1 | 903 | 441 | 441 | 588 | 1 | 23 | 24 | 72 |
| | | Apr. 26, 1999 | | | | | | | | | | | | |
| 176 | HLJBS28 | 203957 | pCMVSport 1 | 186 | 976 | 1 | 976 | 359 | 359 | 589 | 1 | | | 17 |
| | | Apr. 26, 1999 | | | | | | | | | | | | |
| 177 | HLMBW89 | 203957 | Lambda ZAP | 187 | 622 | 1 | 622 | 47 | 47 | 590 | 1 | 19 | 20 | 21 |
| | | Apr. 26, 1999 | II | | | | | | | | | | | |
| 178 | HLMGP50 | 203957 | Lambda ZAP | 188 | 1063 | 1 | 1063 | 214 | 214 | 591 | 1 | | | 10 |
| | | Apr. 26, 1999 | II | | | | | | | | | | | |
| 179 | HLMJB64 | 203957 | Lambda ZAP | 189 | 804 | 1 | 804 | 12 | 12 | 592 | 1 | 29 | 30 | 49 |
| | | Apr. 26, 1999 | II | | | | | | | | | | | |
| 180 | HLQAS12 | PTA-793 | Lambda ZAP | 190 | 2450 | 1 | 2450 | 305 | 305 | 593 | 1 | 11 | 12 | 12 |
| | | Sep. 27, 1999 | II | | | | | | | | | | | |
| 181 | HLQCL64 | PTA-181 | Lambda ZAP | 191 | 2385 | 1652 | 2385 | | 3 | 594 | 1 | 1 | 2 | 182 |
| | | Jun. 07, 1999 | II | | | | | | | | | | | |
| 182 | HLWAV47 | PTA-795 | pCMVSport | 192 | 2062 | 1 | 2062 | 200 | 200 | 595 | 1 | 29 | 30 | 32 |
| | | Sep. 27, 1999 | 3.0 | | | | | | | | | | | |
| 183 | HLWBB73 | 203957 | pCMVSport | 193 | 1716 | 1 | 1716 | 122 | 122 | 596 | 1 | 32 | 33 | 50 |
| | | Apr. 26, 1999 | 3.0 | | | | | | | | | | | |
| 184 | HLWCN37 | 203957 | pCMVSport | 194 | 788 | 1 | 788 | 81 | 81 | 597 | 1 | 40 | 41 | 43 |
| | | Apr. 26, 1999 | 3.0 | | | | | | | | | | | |
| 185 | HLYEU59 | 203957 | pSport1 | 195 | 1146 | 1 | 1146 | 258 | 258 | 598 | 1 | 24 | 25 | 43 |
| | | Apr. 26, 1999 | | | | | | | | | | | | |
| 186 | HLYGB19 | 203959 | pSport1 | 196 | 2967 | 1527 | 2966 | 1863 | 1863 | 599 | 1 | | | 14 |
| | | Apr. 26, 1999 | | | | | | | | | | | | |
| 187 | HLYGE16 | 203957 | pSport1 | 197 | 752 | 1 | 752 | 406 | 406 | 600 | 1 | 17 | 18 | 73 |
| | | Apr. 26, 1999 | | | | | | | | | | | | |
| 188 | HLYGY91 | 203957 | pSport1 | 198 | 640 | 1 | 640 | 211 | 211 | 601 | 1 | 20 | 21 | 42 |
| | | Apr. 26, 1999 | | | | | | | | | | | | |
| 189 | HMCFH60 | 203957 | Uni-ZAP XR | 199 | 443 | 1 | 443 | 211 | 211 | 602 | 1 | 17 | 18 | 48 |
| | | Apr. 26, 1999 | | | | | | | | | | | | |
| 190 | HMDAB29 | 203957 | Uni-ZAP XR | 200 | 1190 | 1 | 1190 | 97 | 97 | 603 | 1 | 17 | 18 | 26 |
| | | Apr. 26, 1999 | | | | | | | | | | | | |
| 191 | HMDAD44 | 203957 | Uni-ZAP XR | 201 | 1204 | 1 | 1204 | 135 | 135 | 604 | 1 | | | 8 |
| | | Apr. 26, 1999 | | | | | | | | | | | | |
| 192 | HMEBB82 | 203957 | Lambda ZAP | 202 | 2641 | 1 | 2641 | 30 | 30 | 605 | 1 | 19 | 20 | 34 |
| | | Apr. 26, 1999 | II | | | | | | | | | | | |
| 193 | HMEDE24 | 203957 | Lambda ZAP | 203 | 2836 | 884 | 2806 | 900 | 900 | 606 | 1 | 16 | 17 | 33 |
| | | Apr. 26, 1999 | II | | | | | | | | | | | |
| 194 | HMELM75 | 203957 | Lambda ZAP | 204 | 1607 | 1 | 1607 | 113 | 113 | 607 | 1 | 18 | 19 | 93 |
| | | Apr. 26, 1999 | II | | | | | | | | | | | |
| 195 | HMIAK10 | 203957 | Uni-ZAP XR | 205 | 1064 | 1 | 1064 | 195 | 195 | 608 | 1 | 22 | 23 | 31 |
| | | Apr. 26, 1999 | | | | | | | | | | | | |
| 196 | HMIBD93 | 203957 | Uni-ZAP XR | 206 | 1323 | 734 | 1323 | | 983 | 609 | 1 | 27 | 28 | 65 |
| | | Apr. 26, 1999 | | | | | | | | | | | | |
| 197 | HMIBF07 | 203957 | Uni-ZAP XR | 207 | 1738 | 1 | 1738 | 229 | 229 | 610 | 1 | | | 6 |
| | | Apr. 26, 1999 | | | | | | | | | | | | |
| 198 | HMICP65 | 203979 | Uni-ZAP XR | 208 | 2048 | 1 | 2048 | 249 | 249 | 611 | 1 | 16 | 17 | 30 |
| | | Apr. 29, 1999 | | | | | | | | | | | | |
| 199 | HMJAK70 | 203957 | pSport1 | 209 | 799 | 1 | 799 | 273 | 273 | 612 | 1 | | | 10 |
| | | Apr. 26, 1999 | | | | | | | | | | | | |
| 200 | HMSBE04 | 203957 | Uni-ZAP XR | 210 | 1396 | 1 | 1396 | 295 | 295 | 613 | 1 | | | 27 |
| | | Apr. 26, 1999 | | | | | | | | | | | | |
| 201 | HMSCL38 | 203957 | Uni-ZAP XR | 211 | 2945 | 1 | 2945 | 120 | 120 | 614 | 1 | 25 | 26 | 35 |
| | | Apr. 26, 1999 | | | | | | | | | | | | |
| 202 | HMSCR69 | 203959 | Uni-ZAP XR | 212 | 1667 | 442 | 1667 | 107 | 107 | 615 | 1 | 1 | 2 | 381 |
| | | Apr. 26, 1999 | | | | | | | | | | | | |
| 203 | HMSHU20 | 203979 | Uni-ZAP XR | 213 | 2249 | 1 | 2249 | 50 | 50 | 616 | 1 | 24 | 25 | 113 |
| | | Apr. 29, 1999 | | | | | | | | | | | | |
| 204 | HMSHY25 | PTA-793 | Uni-ZAP XR | 214 | 2205 | 1 | 2205 | | 656 | 617 | 1 | 11 | 12 | 35 |
| | | Sep. 27, 1999 | | | | | | | | | | | | |
| 205 | HMTAB77 | 203979 | pCMVSport | 215 | 3839 | 1 | 3839 | 769 | 769 | 618 | 1 | 24 | 25 | 48 |
| | | Apr. 29, 1999 | 3.0 | | | | | | | | | | | |
| 206 | HMUAE26 | 203957 | pCMVSport | 216 | 2000 | 660 | 2000 | 710 | 710 | 619 | 1 | 20 | 21 | 30 |
| | | Apr. 26, 1999 | 3.0 | | | | | | | | | | | |
| 207 | HMVDU15 | 203979 | pSport1 | 217 | 1351 | 1 | 1351 | 274 | 274 | 620 | 1 | 21 | 22 | 25 |
| | | Apr. 29, 1999 | | | | | | | | | | | | |
| 208 | HMWJF53 | 203957 | Uni-ZAP XR | 218 | 2288 | 927 | 2101 | 1015 | 1015 | 621 | 1 | 30 | 31 | 38 |
| | | Apr. 26, 1999 | | | | | | | | | | | | |
| 209 | HNEAK81 | 203957 | Uni-ZAP XR | 219 | 1224 | 1 | 1224 | 288 | 288 | 622 | 1 | 21 | 22 | 23 |
| | | Apr. 26, 1999 | | | | | | | | | | | | |
| 210 | HNECL22 | 203957 | Uni-ZAP XR | 220 | 2710 | 225 | 2710 | 472 | 472 | 623 | 1 | 23 | 24 | 34 |
| | | Apr. 26, 1999 | | | | | | | | | | | | |
| 211 | HNECW49 | 203957 | Uni-ZAP XR | 221 | 489 | 1 | 463 | 316 | 316 | 624 | 1 | 20 | 21 | 58 |
| | | Apr. 26, 1999 | | | | | | | | | | | | |
| 212 | HNEDH88 | 203957 | Uni-ZAP XR | 222 | 2073 | 1 | 2073 | 70 | 70 | 625 | 1 | 19 | 20 | 33 |
| | | Apr. 26, 1999 | | | | | | | | | | | | |
| 213 | HNFAC50 | 203957 | Uni-ZAP XR | 223 | 1442 | 428 | 1442 | 676 | 676 | 626 | 1 | 22 | 23 | 32 |
| | | Apr. 26, 1999 | | | | | | | | | | | | |
| 214 | HNFHF34 | 203957 | Uni-ZAP XR | 224 | 728 | 1 | 728 | 178 | 178 | 627 | 1 | 20 | 21 | 30 |
| | | Apr. 26, 1999 | | | | | | | | | | | | |
| 215 | HNGAM58 | 203957 | Uni-ZAP XR | 225 | 1156 | 1 | 1156 | | 68 | 628 | 1 | 27 | 28 | 114 |
| | | Apr. 26, 1999 | | | | | | | | | | | | |
| 216 | HNGBH53 | 203957 | Uni-ZAP XR | 226 | 636 | 1 | 636 | | 47 | 629 | 1 | 17 | 18 | 46 |
| | | Apr. 26, 1999 | | | | | | | | | | | | |
| 217 | HNGDQ38 | 203957 | Uni-ZAP XR | 227 | 1045 | 1 | 1045 | | 205 | 630 | 1 | 22 | 23 | 59 |
| | | Apr. 26, 1999 | | | | | | | | | | | | |
| 218 | HNGDX18 | PTA-181 | Uni-ZAP XR | 228 | 1425 | 1 | 1425 | 237 | 237 | 631 | 1 | 30 | 31 | 243 |
| | | Jun. 07, 1999 | | | | | | | | | | | | |
| 218 | HNGDX18 | PTA-181 | Uni-ZAP XR | 391 | 1411 | 1 | 1411 | 231 | 231 | 794 | 1 | 18 | 19 | 132 |
| | | Jun. 07, 1999 | | | | | | | | | | | | |
| 219 | HNGDY34 | 203957 | Uni-ZAP XR | 229 | 1002 | 1 | 1002 | | 73 | 632 | 1 | | | 17 |
| | | Apr. 26, 1999 | | | | | | | | | | | | |
| 220 | HNGEA34 | 203957 | Uni-ZAP XR | 230 | 1103 | 1 | 1103 | | 58 | 633 | 1 | 24 | 25 | 44 |
| | | Apr. 26, 1999 | | | | | | | | | | | | |
| 221 | HNGGA68 | 203957 | Uni-ZAP XR | 231 | 585 | 1 | 585 | 184 | 184 | 634 | 1 | | | 32 |
| | | Apr. 26, 1999 | | | | | | | | | | | | |
| 222 | HNGIV64 | 203957 | Uni-ZAP XR | 232 | 1047 | 1 | 1047 | | 221 | 635 | 1 | | | 8 |
| | | Apr. 26, 1999 | | | | | | | | | | | | |
| 223 | HNGJB41 | PTA-181 | Uni-ZAP XR | 233 | 1246 | 1 | 1246 | 252 | 252 | 636 | 1 | 46 | 47 | 73 |
| | | Jun. 07, 1999 | | | | | | | | | | | | |
| 224 | HNGKT41 | 203959 | Uni-ZAP XR | 234 | 1048 | 1 | 1048 | 415 | 415 | 637 | 1 | 17 | 18 | 45 |
| | | Apr. 26, 1999 | | | | | | | | | | | | |
| 225 | HNGNK44 | 203959 | Uni-ZAP XR | 235 | 1178 | 302 | 1178 | 611 | 611 | 638 | 1 | 18 | 19 | 74 |
| | | Apr. 26, 1999 | | | | | | | | | | | | |
| 226 | HNGNO53 | 203959 | Uni-ZAP XR | 236 | 825 | 1 | 825 | 467 | 467 | 639 | 1 | 15 | 16 | 34 |
| | | Apr. 26, 1999 | | | | | | | | | | | | |
| 227 | HNGPJ25 | 203959 | Uni-ZAP XR | 237 | 853 | 129 | 853 | 544 | 544 | 640 | 1 | 20 | 21 | 25 |
| | | Apr. 26, 1999 | | | | | | | | | | | | |
| 228 | HNHCT47 | 203959 | Uni-ZAP XR | 238 | 621 | 12 | 621 | 73 | 73 | 641 | 1 | 20 | 21 | 39 |
| | | Apr. 26, 1999 | | | | | | | | | | | | |
| 229 | HNHFE71 | 203959 | Uni-ZAP XR | 239 | 903 | 1 | 903 | 598 | 598 | 642 | 1 | | | 21 |
| | | Apr. 26, 1999 | | | | | | | | | | | | |
| 230 | HNHGK22 | 203918 | Uni-ZAP XR | 240 | 909 | 1 | 909 | 239 | 239 | 643 | 1 | 26 | 27 | 64 |
| | | Apr. 08, 1999 | | | | | | | | | | | | |
| 231 | HNHHB10 | 203959 | Uni-ZAP XR | 241 | 901 | 1 | 901 | 215 | 215 | 644 | 1 | 28 | 29 | 59 |
| | | Apr. 26, 1999 | | | | | | | | | | | | |
| 232 | HNHKI74 | 203959 | Uni-ZAP XR | 242 | 817 | 1 | 817 | 127 | 127 | 645 | 1 | | | 10 |
| | | Apr. 26, 1999 | | | | | | | | | | | | |
| 233 | HNTBT17 | PTA-181 | pCMVSport | 243 | 1959 | 1 | 1959 | 91 | 91 | 646 | 1 | | | 6 |
| | | Jun. 07, 1999 | 3.0 | | | | | | | | | | | |
| 234 | HNTMH79 | 203959 | pSport1 | 244 | 922 | 1 | 922 | 48 | 48 | 647 | 1 | 35 | 36 | 38 |
| | | Apr. 26, 1999 | | | | | | | | | | | | |
| 235 | HODAG07 | 203918 | Uni-ZAP XR | 245 | 900 | 1 | 900 | 43 | 43 | 648 | 1 | 35 | 36 | 43 |
| | | Apr. 08, 1999 | | | | | | | | | | | | |
| 236 | HODBB70 | 203918 | Uni-ZAP XR | 246 | 604 | 1 | 604 | | 173 | 649 | 1 | 7 | 8 | 27 |
| | | Apr. 08, 1999 | | | | | | | | | | | | |
| 237 | HODBV05 | 203917 | Uni-ZAP XR | 247 | 1119 | 1 | 1117 | 101 | 101 | 650 | 1 | 17 | 18 | 33 |
| | | Apr. 08, 1999 | | | | | | | | | | | | |
| 238 | HODCZ32 | 203959 | Uni-ZAP XR | 248 | 927 | 1 | 927 | | 248 | 651 | 1 | | | 10 |
| | | Apr. 26, 1999 | | | | | | | | | | | | |
| 239 | HOFNU55 | PTA-795 | pCMVSport | 249 | 1365 | 1 | 1349 | 230 | 230 | 652 | 1 | 28 | 29 | 51 |
| | | Sep. 27, 1999 | 2.0 | | | | | | | | | | | |
| 240 | HOGBF01 | 203918 | pCMVSport | 250 | 1478 | 1 | 1478 | 309 | 309 | 653 | 1 | 10 | 11 | 20 |
| | | Apr. 08, 1999 | 2.0 | | | | | | | | | | | |
| 241 | HORBS82 | 203959 | Uni-ZAP XR | 251 | 1125 | 1 | 1125 | | 21 | 654 | 1 | 19 | 20 | 39 |
| | | Apr. 26, 1999 | | | | | | | | | | | | |
| 242 | HORBV76 | 203959 | Uni-ZAP XR | 252 | 1157 | 1 | 1157 | 183 | 183 | 655 | 1 | 25 | 26 | 198 |
| | | Apr. 26, 1999 | | | | | | | | | | | | |
| 243 | HOSEC25 | 203959 | Uni-ZAP XR | 253 | 1552 | 1 | 1552 | 17 | 17 | 656 | 1 | 18 | 19 | 24 |
| | | Apr. 26, 1999 | | | | | | | | | | | | |
| 244 | HOSEI81 | 203918 | Uni-ZAP XR | 254 | 897 | 1 | 897 | 203 | 203 | 657 | 1 | 22 | 23 | 83 |
| | | Apr. 08, 1999 | | | | | | | | | | | | |
| 245 | HOSEJ94 | 203979 | Uni-ZAP XR | 255 | 1767 | 622 | 1750 | 848 | 848 | 658 | 1 | 21 | 22 | 28 |
| | | Apr. 29, 1999 | | | | | | | | | | | | |
| 246 | HOUCA21 | 203918 | Uni-ZAP XR | 256 | 1129 | 1 | 1129 | 200 | 200 | 659 | 1 | 27 | 28 | 33 |
| | | Apr. 08, 1999 | | | | | | | | | | | | |
| 247 | HOUDE92 | 203918 | Uni-ZAP XR | 257 | 1284 | 1 | 1282 | | 70 | 660 | 1 | 6 | 7 | 88 |
| | | Apr. 08, 1999 | | | | | | | | | | | | |
| 248 | HOUED72 | PTA-181 | Uni-ZAP XR | 258 | 833 | 76 | 799 | | 144 | 661 | 1 | | | 11 |
| | | Jun. 07, 1999 | | | | | | | | | | | | |
| 249 | HOUFS04 | 203959 | Uni-ZAP XR | 259 | 2927 | 457 | 2882 | 520 | 520 | 662 | 1 | 42 | 43 | 72 |
| | | Apr. 26, 1999 | | | | | | | | | | | | |
| 250 | HOUHI25 | PTA-793 | Uni-ZAP XR | 260 | 1249 | 45 | 1102 | 188 | 188 | 663 | 1 | | | 20 |
| | | Sep. 27, 1999 | | | | | | | | | | | | |
| 251 | HOVBD85 | 203918 | pSport1 | 261 | 1129 | 1 | 1129 | 252 | 252 | 664 | 1 | 19 | 20 | 26 |
| | | Apr. 08, 1999 | | | | | | | | | | | | |
| 252 | HPCAL26 | 203917 | Uni-ZAP XR | 262 | 3097 | 803 | 3097 | 1021 | 1021 | 665 | 1 | 23 | 24 | 30 |
| | | Apr. 08, 1999 | | | | | | | | | | | | |
| 253 | HPEBA84 | 203959 | Uni-ZAP XR | 263 | 1160 | 250 | 1160 | 533 | 533 | 666 | 1 | 21 | 22 | 36 |
| | | Apr. 26, 1999 | | | | | | | | | | | | |
| 254 | HPFBA54 | 203959 | Uni-ZAP XR | 264 | 835 | 1 | 835 | 258 | 258 | 667 | 1 | 39 | 40 | 45 |
| | | Apr. 26, 1999 | | | | | | | | | | | | |
| 255 | HPFCI36 | PTA-181 | Uni-ZAP XR | 265 | 879 | 1 | 879 | 94 | 94 | 668 | 1 | 17 | 18 | 19 |
| | | Jun. 07, 1999 | | | | | | | | | | | | |
| 256 | HPJBU43 | PTA-181 | Uni-ZAP XR | 266 | 575 | 1 | 575 | | 242 | 669 | 1 | | | 17 |
| | | Jun. 07, 1999 | | | | | | | | | | | | |
| 257 | HPMBX22 | 203959 | Uni-ZAP XR | 267 | 454 | 1 | 454 | | 211 | 670 | 1 | | | 19 |
| | | Apr. 26, 1999 | | | | | | | | | | | | |
| 258 | HPMCJ84 | 203918 | Uni-ZAP XR | 268 | 788 | 1 | 788 | 83 | 83 | 671 | 1 | 22 | 23 | 38 |
| | | Apr. 08, 1999 | | | | | | | | | | | | |
| 259 | HPMCV30 | 203918 | Uni-ZAP XR | 269 | 908 | 1 | 908 | 52 | 52 | 672 | 1 | 27 | 28 | 47 |
| | | Apr. 08, 1999 | | | | | | | | | | | | |
| 260 | HPMFH77 | 203918 | Uni-ZAP XR | 270 | 1891 | 1 | 1891 | | 251 | 673 | 1 | 11 | 12 | 35 |
| | | Apr. 08, 1999 | | | | | | | | | | | | |
| 261 | HPQCC53 | 203918 | Lambda ZAP | 271 | 434 | 1 | 434 | 16 | 16 | 674 | 1 | 33 | 34 | 35 |
| | | Apr. 08, 1999 | II | | | | | | | | | | | |
| 262 | HPTRM02 | 203959 | pBluescript | 272 | 1760 | 658 | 1680 | 885 | 885 | 675 | 1 | 16 | 17 | 80 |
| | | Apr. 26, 1999 | | | | | | | | | | | | |
| 263 | HPWBA29 | 203918 | Uni-ZAP XR | 273 | 325 | 1 | 325 | 194 | 194 | 676 | 1 | | | 13 |
| | | Apr. 08, 1999 | | | | | | | | | | | | |
| 264 | HPWDK06 | 203959 | Uni-ZAP XR | 274 | 878 | 240 | 854 | 405 | 405 | 677 | 1 | | | 26 |
| | | Apr. 26, 1999 | | | | | | | | | | | | |
| 265 | HRADA42 | 203959 | pCMVSport | 275 | 1135 | 1 | 1135 | | 122 | 678 | 1 | 24 | 25 | 44 |
| | | Apr. 26, 1999 | 3.0 | | | | | | | | | | | |
| 266 | HRADF49 | PTA-181 | pCMVSport | 276 | 2704 | 1 | 2684 | 169 | 169 | 679 | 1 | 39 | 40 | 253 |
| | | Jun. 07, 1999 | 3.0 | | | | | | | | | | | |
| 267 | HRADN25 | 203959 | pCMVSport | 277 | 1225 | 17 | 1206 | 198 | 198 | 680 | 1 | 17 | 18 | 65 |
| | | Apr. 26, 1999 | 3.0 | | | | | | | | | | | |
| 268 | HRADT25 | 203959 | pCMVSport | 278 | 1324 | 1 | 1324 | 233 | 233 | 681 | 1 | 28 | 29 | 63 |
| | | Apr. 26, 1999 | 3.0 | | | | | | | | | | | |
| 269 | HRDAI17 | 203918 | Uni-ZAP XR | 279 | 1500 | 547 | 1500 | 578 | 578 | 682 | 1 | 27 | 28 | 31 |
| | | Apr. 08, 1999 | | | | | | | | | | | | |
| 270 | HRDDQ39 | 203959 | Uni-ZAP XR | 280 | 776 | 1 | 773 | | 215 | 683 | 1 | 17 | 18 | 46 |
| | | Apr. 26, 1999 | | | | | | | | | | | | |
| 271 | HRDER22 | 203959 | Uni-ZAP XR | 281 | 543 | 1 | 543 | | 32 | 684 | 1 | | | 9 |
| | | Apr. 26, 1999 | | | | | | | | | | | | |
| 272 | HRDFK37 | 203959 | Uni-ZAP XR | 282 | 728 | 1 | 726 | 120 | 120 | 685 | 1 | | | 10 |
| | | Apr. 26, 1999 | | | | | | | | | | | | |
| 273 | HRGBD54 | 203959 | Uni-ZAP XR | 283 | 2301 | 1687 | 2271 | | 1958 | 686 | 1 | | | 10 |
| | | Apr. 26, 1999 | | | | | | | | | | | | |
| 274 | HSAVA08 | 203918 | Uni-ZAP XR | 284 | 1061 | 1 | 1061 | | 66 | 687 | 1 | 17 | 18 | 26 |
| | | Apr. 08, 1999 | | | | | | | | | | | | |
| 275 | HSAWN53 | 203959 | Uni-ZAP XR | 285 | 349 | 1 | 349 | | 159 | 688 | 1 | 29 | 30 | 63 |
| | | Apr. 26, 1999 | | | | | | | | | | | | |
| 276 | HSAWZ40 | 203959 | Uni-ZAP XR | 286 | 1019 | 1 | 1019 | 124 | 124 | 689 | 1 | | | 37 |
| | | Apr. 26, 1999 | | | | | | | | | | | | |
| 277 | HSDZM54 | 203959 | pBluescript | 287 | 554 | 1 | 554 | 445 | 445 | 690 | 1 | 15 | 16 | 36 |
| | | Apr. 26, 1999 | | | | | | | | | | | | |
| 278 | HSHAX04 | 203959 | Uni-ZAP XR | 288 | 1287 | 494 | 1285 | | 42 | 691 | 1 | 6 | 7 | 57 |
| | | Apr. 26, 1999 | | | | | | | | | | | | |
| 279 | HSHBF76 | 203959 | Uni-ZAP XR | 289 | 1273 | 1 | 1213 | | 129 | 692 | 1 | 7 | 8 | 10 |
| | | Apr. 26, 1999 | | | | | | | | | | | | |
| 280 | HSKDR27 | 203918 | Uni-ZAP XR | 290 | 762 | 1 | 762 | | 473 | 693 | 1 | 11 | 12 | 27 |
| | | Apr. 08, 1999 | | | | | | | | | | | | |
| 281 | HSLHG78 | 203979 | Uni-ZAP XR | 291 | 1474 | 452 | 1474 | 647 | 647 | 694 | 1 | 20 | 21 | 70 |
| | | Apr. 29, 1999 | | | | | | | | | | | | |
| 282 | HSLHX15 | 203959 | Uni-ZAP XR | 292 | 655 | 1 | 655 | 485 | 485 | 695 | 1 | 20 | 21 | 41 |
| | | Apr. 26, 1999 | | | | | | | | | | | | |
| 283 | HSNAP85 | 203959 | Uni-ZAP XR | 293 | 1286 | 735 | 1286 | | 941 | 696 | 1 | | | 4 |
| | | Apr. 26, 1999 | | | | | | | | | | | | |
| 284 | HSNAZ09 | 203918 | Uni-ZAP XR | 294 | 626 | 1 | 626 | | 164 | 697 | 1 | | | 14 |
| | | Apr. 08, 1999 | | | | | | | | | | | | |
| 285 | HSOAH16 | 203959 | Uni-ZAP XR | 295 | 721 | 1 | 721 | | 206 | 698 | 1 | 11 | 12 | 42 |
| | | Apr. 26, 1999 | | | | | | | | | | | | |
| 286 | HSQBF66 | 203918 | Uni-ZAP XR | 296 | 1024 | 1 | 1024 | | 229 | 699 | 1 | 28 | 29 | 66 |
| | | Apr. 08, 1999 | | | | | | | | | | | | |
| 287 | HSQES57 | 203959 | Uni-ZAP XR | 297 | 1445 | 1012 | 1428 | 195 | 195 | 700 | 1 | 14 | 15 | 265 |
| | | Apr. 26, 1999 | | | | | | | | | | | | |
| 288 | HSRBE06 | PTA-791 | Uni-ZAP XR | 298 | 1633 | 13 | 1633 | | 128 | 701 | 1 | | | 21 |
| | | Sep. 27, 1999 | | | | | | | | | | | | |
| 289 | HSRFD18 | 203959 | Uni-ZAP XR | 299 | 1889 | 1 | 1793 | 67 | 67 | 702 | 1 | 20 | 21 | 28 |
| | | Apr. 26, 1999 | | | | | | | | | | | | |
| 290 | HSSDI26 | 203918 | Uni-ZAP XR | 300 | 1406 | 1 | 1406 | 253 | 253 | 703 | 1 | | | 21 |
| | | Apr. 08, 1999 | | | | | | | | | | | | |
| 291 | HSSEA64 | PTA-181 | Uni-ZAP XR | 301 | 1282 | 1 | 1274 | 58 | 58 | 704 | 1 | 16 | 17 | 62 |
| | | Jun. 07, 1999 | | | | | | | | | | | | |
| 292 | HSSEF77 | 203959 | Uni-ZAP XR | 302 | 1053 | 1 | 1053 | | 184 | 705 | 1 | 25 | 26 | 60 |
| | | Apr. 26, 1999 | | | | | | | | | | | | |
| 293 | HSSFE38 | 203959 | Uni-ZAP XR | 303 | 1238 | 85 | 1133 | | 264 | 706 | 1 | 19 | 20 | 125 |
| | | Apr. 26, 1999 | | | | | | | | | | | | |
| 294 | HSSGJ58 | 203918 | Uni-ZAP XR | 304 | 1954 | 1 | 1954 | 245 | 245 | 707 | 1 | 17 | 18 | 38 |
| | | Apr. 08, 1999 | | | | | | | | | | | | |
| 295 | HSWBE76 | 203959 | pCMVSport | 305 | 874 | 250 | 710 | 380 | 380 | 708 | 1 | 34 | 35 | 59 |
| | | Apr. 26, 1999 | 3.0 | | | | | | | | | | | |
| 296 | HSXCP38 | PTA-795 | Uni-ZAP XR | 306 | 2206 | 1 | 2206 | | 211 | 709 | 1 | | | 14 |
| | | Sep. 27, 1999 | | | | | | | | | | | | |
| 297 | HSYBI06 | 203918 | pCMVSport | 307 | 956 | 1 | 956 | 232 | 232 | 710 | 1 | 21 | 22 | 33 |
| | | Apr. 08, 1999 | 3.0 | | | | | | | | | | | |
| 298 | HT3BF49 | 203959 | Uni-ZAP XR | 308 | 2174 | 1 | 2174 | | 306 | 711 | 1 | | | 4 |
| | | Apr. 26, 1999 | | | | | | | | | | | | |
| 299 | HT5GR59 | 203959 | Uni-ZAP XR | 309 | 1743 | 1 | 1743 | 135 | 135 | 712 | 1 | 23 | 24 | 31 |
| | | Apr. 26, 1999 | | | | | | | | | | | | |
| 300 | HTAEI78 | 203918 | Uni-ZAP XR | 310 | 1623 | 1 | 1623 | 632 | 632 | 713 | 1 | | | 4 |
| | | Apr. 08, 1999 | | | | | | | | | | | | |
| 301 | HTDAA78 | 203918 | pSport1 | 311 | 825 | 1 | 825 | 151 | 151 | 714 | 1 | | | 20 |
| | | Apr. 08, 1999 | | | | | | | | | | | | |
| 302 | HTECB02 | 203959 | Uni-ZAP XR | 312 | 1662 | 106 | 1662 | 196 | 196 | 715 | 1 | 22 | 23 | 56 |
| | | Apr. 26, 1999 | | | | | | | | | | | | |
| 303 | HTEDF18 | 203959 | Uni-ZAP XR | 313 | 829 | 1 | 829 | 325 | 325 | 716 | 1 | | | 5 |
| | | Apr. 26, 1999 | | | | | | | | | | | | |
| 304 | HTEDJ28 | 203959 | Uni-ZAP XR | 314 | 1247 | 1 | 1247 | | 287 | 717 | 1 | 18 | 19 | 45 |
| | | Apr. 26, 1999 | | | | | | | | | | | | |
| 305 | HTEEW69 | 203959 | Uni-ZAP XR | 315 | 1282 | 110 | 1263 | 182 | 182 | 718 | 1 | 30 | 31 | 323 |
| | | Apr. 26, 1999 | | | | | | | | | | | | |
| 306 | HTEGS07 | 203959 | Uni-ZAP XR | 316 | 806 | 1 | 806 | | 493 | 719 | 1 | 20 | 21 | 37 |
| | | Apr. 26, 1999 | | | | | | | | | | | | |
| 307 | HTEGS11 | PTA-181 | Uni-ZAP XR | 317 | 981 | 1 | 981 | | 173 | 720 | 1 | | | 7 |
| | | Jun. 07, 1999 | | | | | | | | | | | | |
| 308 | HTEHU59 | 203959 | Uni-ZAP XR | 318 | 1523 | 1 | 1504 | 170 | 170 | 721 | 1 | 19 | 20 | 34 |
| | | Apr. 26, 1999 | | | | | | | | | | | | |
| 309 | HTEKM46 | PTA-181 | Uni-ZAP XR | 319 | 2116 | 1 | 2116 | 171 | 171 | 722 | 1 | 24 | 25 | 38 |
| | | Jun. 07, 1999 | | | | | | | | | | | | |
| 310 | HTEMQ17 | 203959 | Uni-ZAP XR | 320 | 1768 | 1 | 1768 | 446 | 446 | 723 | 1 | | | 12 |
| | | Apr. 26, 1999 | | | | | | | | | | | | |
| 311 | HTGBK95 | 203959 | Uni-ZAP XR | 321 | 1131 | 1 | 1131 | 271 | 271 | 724 | 1 | 12 | 13 | 16 |
| | | Apr. 26, 1999 | | | | | | | | | | | | |
| 312 | HTLAP64 | 203918 | Uni-ZAP XR | 322 | 1092 | 1 | 1092 | 173 | 173 | 725 | 1 | 19 | 20 | 20 |
| | | Apr. 08, 1999 | | | | | | | | | | | | |
| 313 | HTLBT80 | 203959 | Uni-ZAP XR | 323 | 2101 | 817 | 1881 | 912 | 912 | 726 | 1 | 27 | 28 | 129 |
| | | Apr. 26, 1999 | | | | | | | | | | | | |
| 314 | HTLDA84 | 203918 | Uni-ZAP XR | 324 | 1444 | 1 | 1444 | | 225 | 727 | 1 | | | 13 |
| | | Apr. 08, 1999 | | | | | | | | | | | | |
| 315 | HTLDN29 | 203959 | Uni-ZAP XR | 325 | 1374 | 1 | 1348 | 175 | 175 | 728 | 1 | 23 | 24 | 33 |
| | | Apr. 26, 1999 | | | | | | | | | | | | |
| 316 | HTLDU78 | 203918 | Uni-ZAP XR | 326 | 1318 | 1 | 1318 | 219 | 219 | 729 | 1 | | | 8 |
| | | Apr. 08, 1999 | | | | | | | | | | | | |
| 317 | HTLEC82 | 203959 | Uni-ZAP XR | 327 | 1260 | 217 | 1119 | 530 | 530 | 730 | 1 | 34 | 35 | 36 |
| | | Apr. 26, 1999 | | | | | | | | | | | | |
| 318 | HTLEM16 | 203959 | Uni-ZAP XR | 328 | 1915 | 1158 | 1755 | 1220 | 1220 | 731 | 1 | 27 | 28 | 69 |
| | | Apr. 26, 1999 | | | | | | | | | | | | |
| 319 | HTLEV48 | 203918 | Uni-ZAP XR | 329 | 1070 | 1 | 1070 | 205 | 205 | 732 | 1 | 30 | 31 | 207 |
| | | Apr. 08, 1999 | | | | | | | | | | | | |
| 319 | HTLEV48 | 203918 | Uni-ZAP XR | 392 | 1065 | 1 | 1065 | 91 | 91 | 795 | 1 | | | 9 |
| | | Apr. 08, 1999 | | | | | | | | | | | | |
| 320 | HTLFI73 | 203979 | Uni-ZAP XR | 330 | 1159 | 1 | 1159 | 340 | 340 | 733 | 1 | | | 23 |
| | | Apr. 29, 1999 | | | | | | | | | | | | |
| 321 | HTNAM63 | 203918 | pBluescript | 331 | 1006 | 1 | 1006 | | 193 | 734 | 1 | 15 | 16 | 30 |
| | | Apr. 08, 1999 | SK− | | | | | | | | | | | |
| 322 | HTNBK13 | 203959 | pBluescript | 332 | 1160 | 295 | 1148 | 534 | 534 | 735 | 1 | 16 | 17 | 21 |
| | | Apr. 26, 1999 | SK− | | | | | | | | | | | |
| 323 | HTOAI50 | 203959 | Uni-ZAP XR | 333 | 1258 | 1 | 1258 | 61 | 61 | 736 | 1 | 17 | 18 | 27 |
| | | Apr. 26, 1999 | | | | | | | | | | | | |
| 324 | HTOAM11 | 203918 | Uni-ZAP XR | 334 | 1200 | 1 | 1200 | 89 | 89 | 737 | 1 | 24 | 25 | 34 |
| | | Apr. 08, 1999 | | | | | | | | | | | | |
| 325 | HTODH57 | 203918 | Uni-ZAP XR | 335 | 1652 | 1 | 1652 | | 228 | 738 | 1 | 18 | 19 | 71 |
| | | Apr. 08, 1999 | | | | | | | | | | | | |
| 326 | HTODH83 | 203918 | Uni-ZAP XR | 336 | 1981 | 1 | 1981 | 103 | 103 | 739 | 1 | 21 | 22 | 32 |
| | | Apr. 08, 1999 | | | | | | | | | | | | |
| 327 | HTODN35 | 203918 | Uni-ZAP XR | 337 | 1594 | 1 | 1594 | 67 | 67 | 740 | 1 | | | 14 |
| | | Apr. 08, 1999 | | | | | | | | | | | | |
| 328 | HTOEV16 | PTA-181 | Uni-ZAP XR | 338 | 1640 | 1 | 1640 | 201 | 201 | 741 | 1 | 39 | 40 | 118 |
| | | Jun. 07, 1999 | | | | | | | | | | | | |
| 329 | HTOGR38 | 203959 | Uni-ZAP XR | 339 | 776 | 138 | 776 | | 314 | 742 | 1 | 23 | 24 | 42 |
| | | Apr. 26, 1999 | | | | | | | | | | | | |
| 330 | HTOHQ05 | PTA-181 | Uni-ZAP XR | 340 | 1860 | 1 | 1860 | 198 | 198 | 743 | 1 | 19 | 20 | 54 |
| | | Jun. 07, 1999 | | | | | | | | | | | | |
| 331 | HTPDU17 | 203959 | Uni-ZAP XR | 341 | 2078 | 1 | 2078 | | 52 | 744 | 1 | 17 | 18 | 33 |
| | | Apr. 26, 1999 | | | | | | | | | | | | |
| 332 | HTSFJ32 | 203918 | pBluescript | 342 | 1257 | 517 | 1257 | 93 | 93 | 745 | 1 | | | 18 |
| | | Apr. 08, 1999 | | | | | | | | | | | | |
| 333 | HTTDN24 | 203959 | Uni-ZAP XR | 343 | 1992 | 856 | 1992 | | 1024 | 746 | 1 | 13 | 14 | 234 |
| | | Apr. 26, 1999 | | | | | | | | | | | | |
| 334 | HTTEE41 | 203959 | Uni-ZAP XR | 344 | 1973 | 864 | 1968 | | 1171 | 747 | 1 | | | 8 |
| | | Apr. 26, 1999 | | | | | | | | | | | | |
| 335 | HTXBD09 | 203959 | Uni-ZAP XR | 345 | 1921 | 22 | 1900 | | 350 | 748 | 1 | | | 12 |
| | | Apr. 26, 1999 | | | | | | | | | | | | |
| 336 | HTXDB22 | PTA-181 | Uni-ZAP XR | 346 | 1211 | 1 | 1135 | | 229 | 749 | 1 | 10 | 11 | 22 |
| | | Jun. 07, 1999 | | | | | | | | | | | | |
| 337 | HTXDC38 | 203959 | Uni-ZAP XR | 347 | 820 | 106 | 806 | 359 | 359 | 750 | 1 | | | 18 |
| | | Apr. 26, 1999 | | | | | | | | | | | | |
| 338 | HTXDC77 | 203979 | Uni-ZAP XR | 348 | 1441 | 159 | 1400 | 65 | 65 | 751 | 1 | 18 | 19 | 151 |
| | | Apr. 29, 1999 | | | | | | | | | | | | |
| 339 | HTXDD61 | PTA-181 | Uni-ZAP XR | 349 | 1140 | 1 | 1140 | | 49 | 752 | 1 | 17 | 18 | 132 |
| | | Jun. 07, 1999 | | | | | | | | | | | | |
| 340 | HTXDG92 | 203959 | Uni-ZAP XR | 350 | 1162 | 1 | 1162 | | 216 | 753 | 1 | 24 | 25 | 66 |
| | | Apr. 26, 1999 | | | | | | | | | | | | |
| 341 | HTXET11 | 203918 | Uni-ZAP XR | 351 | 989 | 1 | 989 | 178 | 178 | 754 | 1 | 22 | 23 | 29 |
| | | Apr. 08, 1999 | | | | | | | | | | | | |
| 342 | HTXJD85 | 203959 | Uni-ZAP XR | 352 | 1117 | 1 | 1117 | 211 | 211 | 755 | 1 | 16 | 17 | 31 |
| | | Apr. 26, 1999 | | | | | | | | | | | | |
| 343 | HTXJY08 | 203959 | Uni-ZAP XR | 353 | 1187 | 12 | 1187 | 108 | 108 | 756 | 1 | | | 16 |
| | | Apr. 26, 1999 | | | | | | | | | | | | |
| 344 | HTXMZ07 | 203959 | Uni-ZAP XR | 354 | 1652 | 189 | 1640 | 319 | 319 | 757 | 1 | 22 | 23 | 37 |
| | | Apr. 26, 1999 | | | | | | | | | | | | |
| 345 | HUFCL31 | 203959 | pSport1 | 355 | 1460 | 1 | 1460 | | 287 | 758 | 1 | | | 26 |
| | | Apr. 26, 1999 | | | | | | | | | | | | |
| 346 | HUKDF20 | 203918 | Lambda ZAP | 356 | 1105 | 1 | 1105 | 214 | 214 | 759 | 1 | 20 | 21 | 33 |
| | | Apr. 08, 1999 | II | | | | | | | | | | | |
| 347 | HUKDY82 | 203918 | Lambda ZAP | 357 | 1435 | 1 | 1435 | 187 | 187 | 760 | 1 | 17 | 18 | 32 |
| | | Apr. 08, 1999 | II | | | | | | | | | | | |
| 348 | HUSCJ14 | PTA-1838 | Lambda ZAP | 358 | 3342 | 1 | 3342 | 74 | 74 | 761 | 1 | 30 | 31 | 196 |
| | | May 09, 2000 | II | | | | | | | | | | | |
| 349 | HUSGL67 | 203918 | pSport1 | 359 | 1008 | 65 | 1008 | 350 | 350 | 762 | 1 | 21 | 22 | 47 |
| | | Apr. 08, 1999 | | | | | | | | | | | | |
| 350 | HUSGU40 | 203959 | pSport1 | 360 | 1054 | 1 | 1054 | | 500 | 763 | 1 | 20 | 21 | 46 |
| | | Apr. 26, 1999 | | | | | | | | | | | | |
| 351 | HUSIR18 | 203959 | pSport1 | 361 | 876 | 1 | 876 | 83 | 83 | 764 | 1 | 16 | 17 | 22 |
| | | Apr. 26, 1999 | | | | | | | | | | | | |
| 352 | HUVDJ48 | 203918 | Uni-ZAP XR | 362 | 1827 | 1 | 1827 | 196 | 196 | 765 | 1 | | | 5 |
| | | Apr. 08, 1999 | | | | | | | | | | | | |
| 353 | HWAAI12 | 203959 | pCMVSport | 363 | 3303 | 1 | 1838 | 223 | 223 | 766 | 1 | | | 29 |
| | | Apr. 26, 1999 | 3.0 | | | | | | | | | | | |
| 354 | HWBBQ70 | 203959 | pCMVSport | 364 | 1948 | 1 | 1948 | 222 | 222 | 767 | 1 | 21 | 22 | 43 |
| | | Apr. 26, 1999 | 3.0 | | | | | | | | | | | |
| 355 | HWBBU75 | 203979 | pCMVSport | 365 | 2731 | 623 | 2731 | 783 | 783 | 768 | 1 | 22 | 23 | 51 |
| | | Apr. 29, 1999 | 3.0 | | | | | | | | | | | |
| 356 | HWBCN36 | 203959 | pCMVSport | 366 | 1008 | 1 | 1008 | 378 | 378 | 769 | 1 | 23 | 24 | 90 |
| | | Apr. 26, 1999 | 3.0 | | | | | | | | | | | |
| 357 | HWBDJ08 | 203959 | pCMVSport | 367 | 2085 | 1 | 2085 | 253 | 253 | 770 | 1 | 29 | 30 | 50 |
| | | Apr. 26, 1999 | 3.0 | | | | | | | | | | | |
| 358 | HWBFX16 | 203959 | pCMVSport | 368 | 1497 | 1 | 1497 | | 267 | 771 | 1 | | | 3 |
| | | Apr. 26, 1999 | 3.0 | | | | | | | | | | | |
| 359 | HWDAG96 | 203959 | pCMVSport | 369 | 1147 | 300 | 1147 | 866 | 866 | 772 | 1 | 18 | 19 | 32 |
| | | Apr. 26, 1999 | 3.0 | | | | | | | | | | | |
| 360 | HWDAJ01 | 203959 | pCMVSport | 370 | 781 | 1 | 781 | 288 | 288 | 773 | 1 | | | 24 |
| | | Apr. 26, 1999 | 3.0 | | | | | | | | | | | |
| 361 | HWHPB78 | 203959 | pCMVSport | 371 | 1346 | 1 | 1346 | 200 | 200 | 774 | 1 | 23 | 24 | 66 |
| | | Apr. 26, 1999 | 3.0 | | | | | | | | | | | |
| 362 | HWLBO67 | 203959 | pSport1 | 372 | 536 | 1 | 536 | 42 | 42 | 775 | 1 | 28 | 29 | 39 |
| | | Apr. 26, 1999 | | | | | | | | | | | | |
| 363 | HWLGP26 | 203959 | pSport1 | 373 | 1898 | 1007 | 1835 | 1091 | 1091 | 776 | 1 | 23 | 24 | 71 |
| | | Apr. 26, 1999 | | | | | | | | | | | | |
| 364 | HILCA24 | 203960 | pBluescript | 374 | 1982 | 153 | 1982 | 191 | 191 | 777 | 1 | 29 | 30 | 327 |
| | | Apr. 26, 1999 | SK− | | | | | | | | | | | |
| 364 | HILCA24 | 203960 | pBluescript | 393 | 1980 | 151 | 1976 | 189 | 189 | 796 | 1 | 29 | 30 | 327 |
| | | Apr. 26, 1999 | SK− | | | | | | | | | | | |
| 365 | HE2CA60 | 203960 | Uni-ZAP XR | 375 | 3034 | 1679 | 3034 | 1731 | 1731 | 778 | 1 | | | 7 |
| | | Apr. 26, 1999 | | | | | | | | | | | | |
| 365 | HE2CA60 | 203960 | Uni-ZAP XR | 394 | 1663 | 308 | 1663 | 360 | 360 | 797 | 1 | | | 7 |
| | | Apr. 26, 1999 | | | | | | | | | | | | |
| 366 | HPWTF23 | 203979 | Uni-ZAP XR | 376 | 2008 | 94 | 1994 | 283 | 283 | 779 | 1 | 29 | 30 | 130 |
| | | Apr. 29, 1999 | | | | | | | | | | | | |
| 366 | HPWTF23 | 203979 | Uni-ZAP XR | 395 | 2008 | 94 | 1994 | 283 | 283 | 798 | 1 | 29 | 30 | 130 |
| | | Apr. 29, 1999 | | | | | | | | | | | | |
| 367 | HLWAU42 | 203957 | pCMVSport | 377 | 947 | 1 | 947 | 220 | 220 | 780 | 1 | 17 | 18 | 57 |
| | | Apr. 26, 1999 | 3.0 | | | | | | | | | | | |
| 367 | HLWAU42 | 203957 | pCMVSport | 396 | 2495 | 1542 | 2488 | 1751 | 1751 | 799 | 1 | 17 | 18 | 57 |
| | | Apr. 26, 1999 | 3.0 | | | | | | | | | | | |
| 368 | HGCAC19 | 203960 | pSport1 | 378 | 5061 | 23 | 1475 | | 317 | 781 | 1 | | | 9 |
| | | Apr. 26, 1999 | | | | | | | | | | | | |
| 368 | HGCAC19 | 203960 | pSport1 | 397 | 1771 | 21 | 1473 | | 315 | 800 | 1 | | | 9 |
| | | Apr. 26, 1999 | | | | | | | | | | | | |
| 368 | HGCAC19 | 203960 | pSport1 | 398 | 1534 | 23 | 1534 | | 317 | 801 | 1 | | | 9 |
| | | Apr. 26, 1999 | | | | | | | | | | | | |
| 369 | HPQAX38 | 203979 | Lambda ZAP | 379 | 1158 | 41 | 1158 | | 295 | 782 | 1 | 10 | 11 | 16 |
| | | Apr. 29, 1999 | II | | | | | | | | | | | |
| 369 | HPQAX38 | 203979 | Lambda ZAP | 399 | 1157 | 41 | 1157 | | 295 | 802 | 1 | 10 | 11 | 16 |
| | | Apr. 29, 1999 | II | | | | | | | | | | | |
| 370 | HEQBJ01 | 203960 | pCMVSport | 380 | 2791 | 2346 | 2731 | 2603 | 2603 | 783 | 1 | | | 19 |
| | | Apr. 26, 1999 | 3.0 | | | | | | | | | | | |
| 370 | HEQBJ01 | 203960 | pCMVSport | 400 | 2791 | 2346 | 2731 | 2603 | 2603 | 803 | 1 | | | 19 |
| | | Apr. 26, 1999 | 3.0 | | | | | | | | | | | |
| 370 | HEQBJ01 | 203960 | pCMVSport | 401 | 669 | 1 | 662 | 505 | 505 | 804 | 1 | | | 19 |
| | | Apr. 26, 1999 | 3.0 | | | | | | | | | | | |
| 371 | HTOJL95 | 203959 | Uni-ZAP XR | 381 | 1947 | 1 | 1947 | 221 | 221 | 784 | 1 | 26 | 27 | 58 |
| | | Apr. 26, 1999 | | | | | | | | | | | | |
| 371 | HTOJL95 | 203959 | Uni-ZAP XR | 402 | 1854 | 1 | 1818 | 134 | 134 | 805 | 1 | 26 | 27 | 58 |
| | | Apr. 26, 1999 | | | | | | | | | | | | |
| 372 | HTLIF12 | 203959 | Uni-ZAP XR | 382 | 1081 | 142 | 1033 | 644 | 644 | 785 | 1 | 19 | 20 | 75 |
| | | Apr. 26, 1999 | | | | | | | | | | | | |
| 372 | HTLIF12 | 203959 | Uni-ZAP XR | 403 | 1081 | 142 | 1033 | 644 | 644 | 806 | 1 | 19 | 20 | 75 |
| | | Apr. 26, 1999 | | | | | | | | | | | | |
| 372 | HTLIF12 | 203959 | Uni-ZAP XR | 404 | 1081 | 142 | 1033 | 644 | 644 | 807 | 1 | 19 | 20 | 75 |
| | | Apr. 26, 1999 | | | | | | | | | | | | |
| 372 | HTLIF12 | 203959 | Uni-ZAP XR | 405 | 1044 | 142 | 1033 | 644 | 644 | 808 | 1 | 19 | 20 | 75 |
| | | Apr. 26, 1999 | | | | | | | | | | | | |
| 372 | HTLIF12 | 203959 | Uni-ZAP XR | 406 | 1081 | 142 | 1033 | 644 | 644 | 809 | 1 | 19 | 20 | 75 |
| | | Apr. 26, 1999 | | | | | | | | | | | | |
| 372 | HTLIF12 | 203959 | Uni-ZAP XR | 407 | 1100 | 140 | 1100 | 642 | 642 | 810 | 1 | 19 | 20 | 75 |
| | | Apr. 26, 1999 | | | | | | | | | | | | |
| 373 | HTEEF26 | 203959 | Uni-ZAP XR | 383 | 1273 | 45 | 984 | 262 | 262 | 786 | 1 | | | 7 |
| | | Apr. 26, 1999 | | | | | | | | | | | | |
| 373 | HTEEF26 | 203959 | Uni-ZAP XR | 408 | 1015 | 45 | 984 | 262 | 262 | 811 | 1 | | | 7 |
| | | Apr. 26, 1999 | | | | | | | | | | | | |
| 374 | HTEED26 | 203959 | Uni-ZAP XR | 384 | 2179 | 1 | 2179 | 261 | 261 | 787 | 1 | 19 | 20 | 32 |
| | | Apr. 26, 1999 | | | | | | | | | | | | |
| 374 | HTEED26 | 203959 | Uni-ZAP XR | 409 | 2167 | 1 | 2159 | 259 | 259 | 812 | 1 | 19 | 20 | 32 |
| | | Apr. 26, 1999 | | | | | | | | | | | | |
| 375 | HPJBJ51 | 203959 | Uni-ZAP XR | 385 | 2795 | 523 | 2422 | 716 | 716 | 788 | 1 | 14 | 15 | 69 |
| | | Apr. 26, 1999 | | | | | | | | | | | | |
| 375 | HPJBJ51 | 203959 | Uni-ZAP XR | 410 | 2793 | 522 | 2421 | 715 | 715 | 813 | 1 | 14 | 15 | 69 |
| | | Apr. 26, 1999 | | | | | | | | | | | | |
| 376 | HOABP31 | 203959 | Uni-ZAP XR | 386 | 929 | 1 | 892 | | 148 | 789 | 1 | 19 | 20 | 124 |
| | | Apr. 26, 1999 | | | | | | | | | | | | |
| 376 | HOABP31 | 203959 | Uni-ZAP XR | 411 | 927 | 1 | 890 | | 148 | 814 | 1 | 19 | 20 | 123 |
| | | Apr. 26, 1999 | | | | | | | | | | | | |
| 377 | HBJHT01 | 203917 | Uni-ZAP XR | 387 | 1251 | 1 | 1251 | 200 | 200 | 790 | 1 | 20 | 21 | 21 |
| | | Apr. 08, 1999 | | | | | | | | | | | | |
| 377 | HBJHT01 | 203917 | Uni-ZAP XR | 412 | 1252 | 1 | 1252 | 193 | 193 | 815 | 1 | 21 | 22 | 47 |
| | | Apr. 08, 1999 | | | | | | | | | | | | |
| 378 | HE8FC45 | 203979 | Uni-ZAP XR | 388 | 1887 | 1 | 1887 | 155 | 155 | 791 | 1 | 33 | 34 | 47 |
| | | Apr. 29, 1999 | | | | | | | | | | | | |
| 378 | HE8FC45 | 203979 | Uni-ZAP XR | 413 | 1887 | 1 | 1887 | 155 | 155 | 816 | 1 | 33 | 34 | 47 |
| | | Apr. 29, 1999 | | | | | | | | | | | | |
| 379 | HTLIF11 | 203959 | Uni-ZAP XR | 389 | 1968 | 860 | 1968 | 933 | 933 | 793 | 1 | 33 | 34 | 38 |
| | | Apr. 26, 1999 | | | | | | | | | | | | |

Table 1B (Comprised of Tables 1B.1 and 1B.2)

[0086] The first column in Table 1B.1 and Table 1B.2 provides the gene number in the application corresponding to the clone identifier. The second column in Table 1B.1 and Table 1B.2 provides a unique “Clone ID:” for the cDNA clone related to each contig sequence disclosed in Table 1B.1 and Table 1B.2. This clone ID references the cDNA clone which contains at least the 5′ most sequence of the assembled contig and at least a portion of SEQ ID NO:X as determined by directly sequencing the referenced clone. The referenced clone may have more sequence than described in the sequence listing or the clone may have less. In the vast majority of cases, however, the clone is believed to encode a full-length polypeptide. In the case where a clone is not full-length, a full-length cDNA can be obtained by methods described elsewhere herein. The third column in Table 1B.1 and Table 1B.2 provides a unique “Contig ID” identification for each contig sequence. The fourth column in Table 1B.1 and Table 1B.2 provides the “SEQ ID NO:” identifier for each of the contig polynucleotide sequences disclosed in Table 1B.

[0087] Table 1B.1

[0088] The fifth column in Table 1B.1, “ORF (From-To)”, provides the location (i.e., nucleotide position numbers) within the polynucleotide sequence “SEQ ID NO:X” that delineate the preferred open reading frame (ORF) shown in the sequence listing and referenced in Table 1B.1, column 6, as SEQ ID NO:Y. Where the nucleotide position number “To” is lower than the nucleotide position number “From”, the preferred ORF is the reverse complement of the referenced polynucleotide sequence. The sixth column in Table 1B.1 provides the corresponding SEQ ID NO:Y for the polypeptide sequence encoded by the preferred ORF delineated in column 5. In one embodiment, the invention provides an amino acid sequence comprising, or alternatively consisting of, a polypeptide encoded by the portion of SEQ ID NO:X delineated by “ORF (From-To)”. Also provided are polynucleotides encoding such amino acid sequences and the complementary strand thereto. Column 7 in Table 1B.1 lists residues comprising epitopes contained in the polypeptides encoded by the preferred ORF (SEQ ID NO:Y), as predicted using the algorithm of Jameson and Wolf, (1988) Comp. Appl. Biosci. 4:181-186. The Jameson-Wolf antigenic analysis was performed using the computer program PROTEAN (Version 3.11 for the Power MacIntosh, DNASTAR, Inc., 1228 South Park Street Madison, Wis.). In specific embodiments, polypeptides of the invention comprise, or alternatively consist of, at least one, two, three, four, five or more of the predicted epitopes as described in Table 1B. It will be appreciated that depending on the analytical criteria used to predict antigenic determinants, the exact address of the determinant may vary slightly. Column 8 of Table 1B.1 (“Tissue Distribution”) is described below in Table 1B.2 Column 5. Column 9 of Table 1B.1 (“Cytologic Band”) provides the chromosomal location of polynucleotides corresponding to SEQ ID NO:X. Chromosomal location was determined by finding exact matches to EST and cDNA sequences contained in the NCBI (National Center for Biotechnology Information) UniGene database. Each sequence in the UniGene database is assigned to a “cluster”; all of the ESTs, cDNAs, and STSs in a cluster are believed to be derived from a single gene. Chromosomal mapping data is often available for one or more sequence(s) in a UniGene cluster; this data (if consistent) is then applied to the cluster as a whole. Thus, it is possible to infer the chromosomal location of a new polynucleotide sequence by determining its identity with a mapped UniGene cluster.

[0089] A modified version of the computer program BLASTN (Altshul, et al., J. Mol. Biol. 215:403-410 (1990), and Gish, and States, Nat. Genet. 3:266-272) (1993) was used to search the UniGene database for EST or cDNA sequences that contain exact or near-exact matches to a polynucleotide sequence of the invention (the ‘Query’). A sequence from the UniGene database (the ‘Subject’) was said to be an exact match if it contained a segment of 50 nucleotides in length such that 48 of those nucleotides were in the same order as found in the Query sequence. If all of the matches that met this criteria were in the same UniGene cluster, and mapping data was available for this cluster, it is indicated in Table 1B under the heading “Cytologic Band”. Where a cluster had been further localized to a distinct cytologic band, that band is disclosed; where no banding information was available, but the gene had been localized to a single chromosome, the chromosome is disclosed.

[0090] Once a presumptive chromosomal location was determined for a polynucleotide of the invention, an associated disease locus was identified by comparison with a database of diseases which have been experimentally associated with genetic loci. The database used was the Morbid Map, derived from OMIM™ and National Center for Biotechnology Information, National Library of Medicine (Bethesda, Md.) 2000. If the putative chromosomal location of a polynucleotide of the invention (Query sequence) was associated with a disease in the Morbid Map database, an OMIM reference identification number was noted in column 10, Table 1B.1, labelled “OMIM Disease Reference(s). Table 5 is a key to the OMIM reference identification numbers (column 1), and provides a description of the associated disease in Column 2.

[0091] Table 1B.2

[0092] Column 5, in Table 1B.2, provides an expression profile and library code:count for each of the contig sequences (SEQ ID NO:X) disclosed in Table 1B, which can routinely be combined with the information provided in Table 4 and used to determine the tissues, cells, and/or cell line libraries which predominantly express the polynucleotides of the invention. The first number in Table 1B.2, column 5 (preceding the colon), represents the tissue/cell source identifier code corresponding to the code and description provided in Table 4. The second number in column 5 (following the colon) represents the number of times a sequence corresponding to the reference polynucleotide sequence was identified in the corresponding tissue/cell source. Those tissue/cell source identifier codes in which the first two letters are “AR” designate information generated using DNA array technology. Utilizing this technology, cDNAs were amplified by PCR and then transferred, in duplicate, onto the array. Gene expression was assayed through hybridization of first strand cDNA probes to the DNA array. cDNA probes were generated from total RNA extracted from a variety of different tissues and cell lines. Probe synthesis was performed in the presence of ³³P dCTP, using oligo (dT) to prime reverse transcription. After hybridization, high stringency washing conditions were employed to remove non-specific hybrids from the array. The remaining signal, emanating from each gene target, was measured using a Phosphorimager. Gene expression was reported as Phosphor Stimulating Luminescence (PSL) which reflects the level of phosphor signal generated from the probe hybridized to each of the gene targets represented on the array. A local background signal subtraction was performed before the total signal generated from each array was used to normalize gene expression between the different hybridizations. The value presented after “[array code]:” represents the mean of the duplicate values, following background subtraction and probe normalization. One of skill in the art could routinely use this information to identify normal and/or diseased tissue(s) which show a predominant expression pattern of the corresponding polynucleotide of the invention or to identify polynucleotides which show predominant and/or specific tissue and/or cell expression.

LENGTHY TABLE REFERENCED HERE
US20070031842A1-20070208-T00001
Please refer to the end of the specification for access instructions.

LENGTHY TABLE REFERENCED HERE
US20070031842A1-20070208-T00002
Please refer to the end of the specification for access instructions.

[0093] Table 1C summarizes additional polynucleotides encompassed by the invention (including cDNA clones related to the sequences (Clone ID:), contig sequences (contig identifier (Contig ID:) contig nucleotide sequence identifiers (SEQ ID NO:X)), and genomic sequences (SEQ ID NO:B). The first column provides a unique clone identifier, “Clone ID:”, for a cDNA clone related to each contig sequence. The second column provides the sequence identifier, “SEQ ID NO:X”, for each contig sequence. The third column provides a unique contig identifier, “Contig ID:” for each contig sequence. The fourth column, provides a BAC identifier “BAC ID NO:A” for the BAC clone referenced in the corresponding row of the table. The fifth column provides the nucleotide sequence identifier, “SEQ ID NO:B” for a fragment of the BAC clone identified in column four of the corresponding row of the table. The sixth column, “Exon From-To”, provides the location (i.e., nucleotide position numbers) within the polynucleotide sequence of SEQ ID NO:B which delineate certain polynucleotides of the invention that are also exemplary members of polynucleotide sequences that encode polypeptides of the invention (e.g., polypeptides containing amino acid sequences encoded by the polynucleotide sequences delineated in column six, and fragments and variants thereof).

TABLE 1C

| cDNA Clone | SEQ ID | CONTIG | | SEQ ID | EXON |
|---|---|---|---|---|---|
| ID | NO: X | ID: | BAC ID: A | NO: B | From-To |
| H6BSF56 | 11 | 762968 | AC069362 | 817 | 1-131 |
| H6BSF56 | 11 | 762968 | AC027584 | 818 | 1-162 |
| H6BSF56 | 11 | 762968 | AC011101 | 819 | 1-100 |
| H6BSF56 | 11 | 762968 | AC073446 | 820 | 1-140 |
| H6BSF56 | 11 | 762968 | AC026556 | 821 | 1-114 |
| H6BSF56 | 11 | 762968 | AL136171 | 822 | 1-61 |
| H6BSF56 | 11 | 762968 | AC025975 | 823 | 1-136 |
| H6BSF56 | 11 | 762968 | AC073219 | 824 | 1-123 |
| H6BSF56 | 11 | 762968 | AL162741 | 825 | 1-45 |
| H6BSF56 | 11 | 762968 | AC027584 | 826 | 1-368 |
| H6BSF56 | 11 | 762968 | AC073446 | 827 | 1-52 |
| | | | | | 2626-2925 |
| H6BSF56 | 11 | 762968 | AL162741 | 828 | 1-102 |
| H6EEC72 | 12 | 889401 | AC012314 | 829 | 1-181 |
| | | | | | 1281-1463 |
| | | | | | 2719-2983 |
| | | | | | 3158-3411 |
| | | | | | 3804-6347 |
| | | | | | 6745-6879 |
| | | | | | 7118-7319 |
| | | | | | 7420-7521 |
| | | | | | 7859-8305 |
| | | | | | 8552-8602 |
| | | | | | 9988-10334 |
| | | | | | 10415-10778 |
| | | | | | 11003-11127 |
| | | | | | 11210-11303 |
| | | | | | 11334-11832 |
| | | | | | 13093-13145 |
| | | | | | 13703-13837 |
| | | | | | 13918-14152 |
| | | | | | 15415-15511 |
| | | | | | 15613-15742 |
| | | | | | 15998-16087 |
| | | | | | 16231-16307 |
| | | | | | 16447-17211 |
| | | | | | 18520-18796 |
| | | | | | 21777-22001 |
| H6EEC72 | 12 | 889401 | AC009968 | 830 | 1-180 |
| | | | | | 1275-1457 |
| | | | | | 2712-2976 |
| | | | | | 3150-3403 |
| | | | | | 3796-6332 |
| | | | | | 6730-6864 |
| | | | | | 7103-7303 |
| | | | | | 7404-7505 |
| | | | | | 7843-8289 |
| | | | | | 8536-8586 |
| | | | | | 9970-10312 |
| | | | | | 10393-10756 |
| | | | | | 10981-11105 |
| | | | | | 11188-11805 |
| | | | | | 13068-13120 |
| | | | | | 13678-13812 |
| | | | | | 13905-13994 |
| H6EEC72 | 12 | 889401 | AC012314 | 831 | 1-43 |
| | | | | | 861-1031 |
| | | | | | 1576-1743 |
| | | | | | 1924-2132 |
| | | | | | 2203-2432 |
| | | | | | 2473-2905 |
| | | | | | 3177-3360 |
| | | | | | 3651-4332 |
| | | | | | 4422-4583 |
| | | | | | 4830-4995 |
| | | | | | 5086-5365 |
| H6EEC72 | 12 | 889401 | AC009968 | 832 | 1-43 |
| | | | | | 857-1027 |
| | | | | | 1570-1737 |
| | | | | | 1918-2126 |
| | | | | | 2197-2426 |
| | | | | | 2467-2899 |
| | | | | | 3171-3354 |
| | | | | | 3644-4326 |
| | | | | | 4416-4577 |
| | | | | | 4824-4989 |
| | | | | | 5080-5360 |
| HACAB68 | 13 | 584773 | AL160283 | 833 | 1-2811 |
| HACAB68 | 13 | 584773 | AL354793 | 834 | 1-3734 |
| | | | | | 3843-4723 |
| HACAB68 | 13 | 584773 | AL356058 | 835 | 1-3055 |
| | | | | | 3165-4045 |
| HACBS22 | 14 | 847113 | AC012073 | 836 | 1-134 |
| | | | | | 718-833 |
| | | | | | 1002-1132 |
| | | | | | 2357-2516 |
| | | | | | 3762-3945 |
| | | | | | 5344-5477 |
| | | | | | 7446-7594 |
| | | | | | 7742-7904 |
| | | | | | 10636-10725 |
| | | | | | 11138-12223 |
| | | | | | 12583-12977 |
| | | | | | 13095-13178 |
| | | | | | 14224-14532 |
| | | | | | 14668-14841 |
| | | | | | 15779-16124 |
| | | | | | 16257-16343 |
| | | | | | 16508-16826 |
| | | | | | 17489-17757 |
| | | | | | 17847-18008 |
| | | | | | 19028-19192 |
| | | | | | 19755-23561 |
| | | | | | 24286-24717 |
| | | | | | 24920-25347 |
| | | | | | 25567-25741 |
| | | | | | 26629-26891 |
| | | | | | 27895-27968 |
| HACBS22 | 14 | 847113 | AC012073 | 837 | 1-545 |
| HADMA77 | 18 | 783049 | AC007944 | 838 | 1-3350 |
| HADMA77 | 18 | 783049 | AC018656 | 839 | 1-3349 |
| HADMA77 | 18 | 783049 | AC021874 | 840 | 1-3351 |
| | | | | | 4529-4959 |
| | | | | | 6110-6438 |
| HADMA77 | 18 | 783049 | AC007944 | 841 | 1-941 |
| HADMA77 | 18 | 783049 | AC018656 | 842 | 1-432 |
| HADMA77 | 18 | 783049 | AC018656 | 843 | 1-941 |
| HADMB15 | 19 | 847116 | AC026666 | 844 | 1-385 |
| | | | | | 406-780 |
| HADMB15 | 19 | 847116 | AC026281 | 845 | 1-114 |
| | | | | | 430-875 |
| | | | | | 896-1262 |
| HAGDW20 | 22 | 637489 | AC006453 | 846 | 1-1568 |
| HAGDW20 | 22 | 637489 | AC005629 | 847 | 1-1569 |
| HAGDW20 | 22 | 637489 | AC010098 | 848 | 1-1569 |
| HAGDW20 | 22 | 637489 | AC006453 | 849 | 1-438 |
| HAGDW20 | 22 | 637489 | AC006453 | 850 | 1-375 |
| HAGDW20 | 22 | 637489 | AC005629 | 851 | 1-438 |
| HAGDW20 | 22 | 637489 | AC005629 | 852 | 1-375 |
| HAGFS57 | 25 | 847120 | AC021238 | 853 | 1-140 |
| | | | | | 3343-3636 |
| | | | | | 5052-5179 |
| | | | | | 5712-5796 |
| | | | | | 6486-6918 |
| | | | | | 7867-8404 |
| | | | | | 8934-9513 |
| | | | | | 9711-10538 |
| | | | | | 10984-11992 |
| | | | | | 12080-12349 |
| | | | | | 12485-12857 |
| | | | | | 13895-14212 |
| | | | | | 14994-15054 |
| | | | | | 15169-15297 |
| | | | | | 16132-16211 |
| | | | | | 17721-17811 |
| | | | | | 18135-18354 |
| | | | | | 18363-18444 |
| | | | | | 19661-19720 |
| | | | | | 19841-20784 |
| | | | | | 20920-21236 |
| | | | | | 22168-24079 |
| HAGFS57 | 25 | 847120 | AC066613 | 854 | 1-433 |
| | | | | | 1382-1919 |
| | | | | | 2449-3028 |
| | | | | | 3226-4053 |
| | | | | | 4499-5507 |
| | | | | | 5595-5864 |
| | | | | | 6000-6372 |
| | | | | | 7410-7727 |
| | | | | | 8509-8569 |
| | | | | | 8684-8812 |
| | | | | | 9647-9726 |
| | | | | | 11236-11326 |
| | | | | | 11650-11869 |
| | | | | | 11878-11959 |
| | | | | | 13176-13235 |
| | | | | | 13356-14299 |
| | | | | | 14435-14752 |
| | | | | | 15684-17595 |
| HAGHR18 | 27 | 655435 | AC009671 | 855 | 1-1134 |
| HAJAY92 | 30 | 845601 | AL353726 | 856 | 1-2332 |
| HAJAY92 | 30 | 845601 | AL353726 | 857 | 1-115 |
| HAJAY92 | 30 | 845601 | AL353726 | 858 | 1-115 |
| HAQAI92 | 32 | 688037 | AL118502 | 859 | 1-471 |
| | | | | | 571-1561 |
| HAQAI92 | 32 | 688037 | AL161939 | 860 | 1-471 |
| | | | | | 571-1561 |
| HAQAI92 | 32 | 688037 | AC004064 | 861 | 1-471 |
| | | | | | 571-1561 |
| HAQAI92 | 32 | 688037 | AL118502 | 862 | 1-161 |
| HAQAI92 | 32 | 688037 | AL118502 | 863 | 1-285 |
| HAQAI92 | 32 | 688037 | AL161939 | 864 | 1-415 |
| HAQAI92 | 32 | 688037 | AL161939 | 865 | 1-285 |
| HAQAI92 | 32 | 688037 | AC004064 | 866 | 1-285 |
| HAQAI92 | 32 | 688037 | AC004064 | 867 | 1-415 |
| HATBI94 | 35 | 839468 | AC016372 | 868 | 1-1727 |
| HATBI94 | 35 | 839468 | AL390735 | 869 | 1-1729 |
| HATBI94 | 35 | 839468 | AL138791 | 870 | 1-1333 |
| HATBI94 | 35 | 839468 | AC016372 | 871 | 1-646 |
| HATBI94 | 35 | 839468 | AC016372 | 872 | 1-766 |
| HATBI94 | 35 | 839468 | AL390735 | 873 | 1-646 |
| HATBI94 | 35 | 839468 | AL390735 | 874 | 1-766 |
| HATCB45 | 36 | 631172 | AC009307 | 875 | 1-1044 |
| HATCB45 | 36 | 631172 | AC006501 | 876 | 1-1044 |
| HATCB45 | 36 | 631172 | AC009307 | 877 | 1-318 |
| HATCB45 | 36 | 631172 | AC009307 | 878 | 1-370 |
| HATCB45 | 36 | 631172 | AC006501 | 879 | 1-318 |
| HATCB45 | 36 | 631172 | AC006501 | 880 | 1-111 |
| HATCI03 | 37 | 580805 | AL137119 | 881 | 1-81 |
| | | | | | 824-941 |
| | | | | | 972-1185 |
| | | | | | 2432-2705 |
| | | | | | 3880-4812 |
| | | | | | 4880-5011 |
| | | | | | 5828-6591 |
| | | | | | 8231-8398 |
| | | | | | 8618-8767 |
| | | | | | 9466-9728 |
| HATCI03 | 37 | 580805 | AL138688 | 882 | 1-81 |
| | | | | | 825-942 |
| | | | | | 973-1186 |
| | | | | | 2433-2706 |
| | | | | | 3881-4795 |
| | | | | | 4870-5001 |
| | | | | | 5818-6581 |
| | | | | | 8221-8388 |
| | | | | | 8608-8757 |
| | | | | | 9456-9718 |
| HATCI03 | 37 | 580805 | AL137119 | 883 | 1-542 |
| HATCI03 | 37 | 580805 | AL138688 | 884 | 1-542 |
| HATEH20 | 38 | 836056 | AC006207 | 885 | 1-2845 |
| HATEH20 | 38 | 836056 | AC006207 | 886 | 1-76 |
| | | | | | 1150-1290 |
| | | | | | 1699-2395 |
| HBAGD86 | 39 | 838799 | AC016755 | 887 | 1-41 |
| | | | | | 1648-1993 |
| | | | | | 2035-3552 |
| | | | | | 3554-6713 |
| HBAGD86 | 39 | 838799 | AC016755 | 888 | 1-161 |
| | | | | | 696-809 |
| | | | | | 2256-2753 |
| | | | | | 6910-6991 |
| | | | | | 7733-7857 |
| | | | | | 9267-9458 |
| | | | | | 10650-10734 |
| | | | | | 11114-11562 |
| | | | | | 11678-11801 |
| | | | | | 12524-12817 |
| | | | | | 14494-15914 |
| HBAGD86 | 39 | 838799 | AC016755 | 889 | 1-217 |
| HBCJL35 | 40 | 1300785 | AL158846 | 890 | 1-4302 |
| | | | | | 4512-4570 |
| | | | | | 4837-5068 |
| | | | | | 5373-5856 |
| | | | | | 5965-6104 |
| | | | | | 6899-7643 |
| | | | | | 8898-9042 |
| | | | | | 9567-9925 |
| HBCJL35 | 40 | 1300785 | AL158846 | 891 | 1-170 |
| | | | | | 406-723 |
| | | | | | 864-2386 |
| HBCJL35 | 40 | 1300785 | AL158846 | 892 | 1-46 |
| | | | | | 101-334 |
| HBGNC72 | 42 | 892131 | AC016588 | 893 | 1-67 |
| | | | | | 319-423 |
| | | | | | 3335-3462 |
| | | | | | 3594-3680 |
| | | | | | 4721-5143 |
| | | | | | 5551-6677 |
| HBHAA81 | 43 | 846465 | AC006059 | 894 | 1-230 |
| | | | | | 1619-1699 |
| | | | | | 1953-2090 |
| | | | | | 2986-3054 |
| | | | | | 3665-3786 |
| | | | | | 3902-4406 |
| | | | | | 4457-4674 |
| | | | | | 5129-5531 |
| | | | | | 5660-5811 |
| | | | | | 5934-5969 |
| | | | | | 7563-7959 |
| | | | | | 8086-9195 |
| | | | | | 9591-9735 |
| | | | | | 9788-10149 |
| HBHAA81 | 43 | 846465 | AC018471 | 895 | 1-230 |
| | | | | | 1619-1699 |
| | | | | | 1965-2090 |
| | | | | | 2986-3054 |
| | | | | | 3665-3786 |
| | | | | | 3902-4405 |
| | | | | | 4456-4673 |
| | | | | | 5128-5530 |
| | | | | | 5659-5810 |
| | | | | | 5933-5968 |
| | | | | | 7561-7957 |
| | | | | | 8084-9193 |
| | | | | | 9589-9733 |
| | | | | | 9786-10146 |
| HBHAA81 | 43 | 846465 | AC006059 | 896 | 1-340 |
| | | | | | 501-802 |
| HBHAA81 | 43 | 846465 | AC006059 | 897 | 1-661 |
| | | | | | 1538-1684 |
| | | | | | 3489-3680 |
| | | | | | 3832-3933 |
| | | | | | 4241-4410 |
| | | | | | 5782-5872 |
| | | | | | 5998-6150 |
| HBHAA81 | 43 | 846465 | AC018471 | 898 | 1-661 |
| | | | | | 1539-1672 |
| HBHAA81 | 43 | 846465 | AC018471 | 899 | 1-340 |
| | | | | | 501-802 |
| HBJAB02 | 46 | 837309 | AC015651 | 900 | 1-35 |
| | | | | | 159-252 |
| | | | | | 410-783 |
| | | | | | 786-830 |
| | | | | | 953-1035 |
| | | | | | 1452-1553 |
| | | | | | 1651-2071 |
| | | | | | 2161-2264 |
| | | | | | 2352-2454 |
| | | | | | 2494-2758 |
| | | | | | 2847-3006 |
| | | | | | 3135-3272 |
| | | | | | 3477-4138 |
| | | | | | 4907-5738 |
| | | | | | 5972-6059 |
| | | | | | 6132-6367 |
| | | | | | 6650-6834 |
| | | | | | 6915-7010 |
| | | | | | 7091-7658 |
| | | | | | 7662-9457 |
| | | | | | 10122-10222 |
| | | | | | 11415-11534 |
| | | | | | 12386-12418 |
| | | | | | 13253-13584 |
| | | | | | 13635-13867 |
| | | | | | 14881-15326 |
| | | | | | 15851-16013 |
| | | | | | 16529-16816 |
| | | | | | 17430-17529 |
| | | | | | 18140-18269 |
| | | | | | 18634-18734 |
| | | | | | 19189-19369 |
| | | | | | 20434-21105 |
| | | | | | 21912-22008 |
| HBJAB02 | 46 | 837309 | AC015651 | 901 | 1-2097 |
| | | | | | 5308-5495 |
| | | | | | 5696-5742 |
| | | | | | 5890-6249 |
| | | | | | 7370-7525 |
| | | | | | 7850-8236 |
| | | | | | 8359-8463 |
| | | | | | 8597-8770 |
| | | | | | 8919-9028 |
| | | | | | 9213-9353 |
| | | | | | 9517-9639 |
| | | | | | 9765-9874 |
| | | | | | 9944-11023 |
| | | | | | 11124-11219 |
| | | | | | 11315-11613 |
| | | | | | 11708-12241 |
| | | | | | 12431-12666 |
| | | | | | 12744-12802 |
| | | | | | 12976-13087 |
| | | | | | 13374-13914 |
| | | | | | 14728-15500 |
| HBMBM96 | 53 | 561935 | AP000786 | 902 | 1-1121 |
| HBMBM96 | 53 | 561935 | AP000786 | 903 | 1-192 |
| HBMBX01 | 54 | 705047 | AC004236 | 904 | 1-2981 |
| HBMBX01 | 54 | 705047 | AL354986 | 905 | 1-2981 |
| HBMBX01 | 54 | 705047 | AC025145 | 906 | 1-2981 |
| HBMBX01 | 54 | 705047 | AC004236 | 907 | 1-537 |
| HBMBX01 | 54 | 705047 | AC004236 | 908 | 1-334 |
| HBMBX01 | 54 | 705047 | AL354986 | 909 | 1-334 |
| HBMBX01 | 54 | 705047 | AL354986 | 910 | 1-537 |
| HBMBX01 | 54 | 705047 | AC025145 | 911 | 1-537 |
| HBMBX01 | 54 | 705047 | AC025145 | 912 | 1-328 |
| HBMWE61 | 57 | 778066 | AL049732 | 913 | 1-248 |
| | | | | | 1363-1656 |
| | | | | | 1738-2707 |
| | | | | | 3831-3892 |
| | | | | | 4148-4228 |
| | | | | | 4752-4846 |
| | | | | | 5021-5344 |
| | | | | | 5573-5654 |
| | | | | | 5744-6267 |
| | | | | | 6828-6945 |
| | | | | | 7178-10598 |
| HBMWE61 | 57 | 778066 | AL049732 | 914 | 1-829 |
| | | | | | 3610-3658 |
| | | | | | 3665-4981 |
| | | | | | 12571-14809 |
| HBNBJ76 | 59 | 810332 | AC004453 | 915 | 1-3544 |
| HBNBJ76 | 59 | 810332 | AC004453 | 916 | 1-309 |
| HBNBJ76 | 59 | 810332 | AC004453 | 917 | 1-468 |
| HBSAK32 | 61 | 856387 | AL161656 | 918 | 1-325 |
| | | | | | 363-460 |
| | | | | | 507-980 |
| | | | | | 1258-1440 |
| | | | | | 1691-2081 |
| | | | | | 2107-2347 |
| | | | | | 2442-2595 |
| | | | | | 2622-3125 |
| | | | | | 3993-4605 |
| | | | | | 4876-5153 |
| | | | | | 5309-5877 |
| HBSAK32 | 61 | 856387 | AL161656 | 919 | 1-186 |
| | | | | | 511-636 |
| HBXCM66 | 62 | 639039 | AC011962 | 920 | 1-102 |
| HCE2H52 | 65 | 847007 | AC022833 | 921 | 1-1271 |
| HCE3B04 | 66 | 831151 | AC021883 | 922 | 1-2450 |
| HCE3B04 | 66 | 831151 | AC021883 | 923 | 1-466 |
| HCE5F78 | 67 | 838101 | AC007318 | 924 | 1-1782 |
| HCE5F78 | 67 | 838101 | AC007318 | 925 | 1-98 |
| HCEEE79 | 68 | 560609 | AC006923 | 926 | 1-1044 |
| HCEEE79 | 68 | 560609 | AC006923 | 927 | 1-207 |
| HCEEU18 | 70 | 688041 | AC008469 | 928 | 1-169 |
| HCEEU18 | 70 | 688041 | AC026400 | 929 | 1-170 |
| HCEEU18 | 70 | 688041 | AC008469 | 930 | 1-304 |
| | | | | | 420-602 |
| | | | | | 1427-2108 |
| | | | | | 2323-2645 |
| | | | | | 3613-3987 |
| | | | | | 4129-4442 |
| | | | | | 4600-4731 |
| | | | | | 4868-5039 |
| | | | | | 5408-5538 |
| | | | | | 5624-5776 |
| | | | | | 6317-7734 |
| HCEEU18 | 70 | 688041 | AC008469 | 931 | 1-294 |
| HCEEU18 | 70 | 688041 | AC026400 | 932 | 1-98 |
| HCEEU18 | 70 | 688041 | AC026400 | 933 | 1-407 |
| HCEGG08 | 72 | 844506 | AC078898 | 934 | 1-640 |
| HCEGG08 | 72 | 844506 | AC074196 | 935 | 1-606 |
| HCEGG08 | 72 | 844506 | AC077693 | 936 | 1-628 |
| HCEGG08 | 72 | 844506 | AC027037 | 937 | 1-640 |
| HCEGG08 | 72 | 844506 | AC026757 | 938 | 1-513 |
| HCEGG08 | 72 | 844506 | AC027036 | 939 | 1-612 |
| HCEGG08 | 72 | 844506 | AC074108 | 940 | 1-462 |
| HCEGG08 | 72 | 844506 | AC074226 | 941 | 1-640 |
| HCEGG08 | 72 | 844506 | AC073166 | 942 | 1-640 |
| HCEGG08 | 72 | 844506 | AC068667 | 943 | 1-654 |
| HCEGG08 | 72 | 844506 | AC024594 | 944 | 1-414 |
| HCEGG08 | 72 | 844506 | AC024261 | 945 | 1-647 |
| HCEGG08 | 72 | 844506 | AC078893 | 946 | 1-640 |
| HCEGG08 | 72 | 844506 | AC073555 | 947 | 1-640 |
| HCEGG08 | 72 | 844506 | AC069474 | 948 | 1-571 |
| HCEGG08 | 72 | 844506 | AC068924 | 949 | 1-640 |
| HCEGG08 | 72 | 844506 | AC066689 | 950 | 1-639 |
| HCEGG08 | 72 | 844506 | AC035249 | 951 | 1-397 |
| HCEGG08 | 72 | 844506 | AC034258 | 952 | 1-648 |
| HCEGG08 | 72 | 844506 | AC027135 | 953 | 1-434 |
| HCEGG08 | 72 | 844506 | AC027035 | 954 | 1-624 |
| HCEGG08 | 72 | 844506 | AC027034 | 955 | 1-509 |
| HCEGG08 | 72 | 844506 | AC026815 | 956 | 1-654 |
| HCEGG08 | 72 | 844506 | AC025781 | 957 | 1-546 |
| HCEGG08 | 72 | 844506 | AC078894 | 958 | 1-654 |
| HCFLN88 | 73 | 610000 | AC005089 | 959 | 1-594 |
| | | | | | 1779-2065 |
| | | | | | 2224-2411 |
| | | | | | 3295-3588 |
| | | | | | 3962-4463 |
| | | | | | 5317-5561 |
| | | | | | 5835-6210 |
| | | | | | 6750-7793 |
| HCFLN88 | 73 | 610000 | AC005089 | 960 | 1-141 |
| HCFLN88 | 73 | 610000 | AC005089 | 961 | 1-215 |
| HCQCM24 | 75 | 845070 | AC024969 | 962 | 1-3278 |
| HCQCM24 | 75 | 845070 | AC026833 | 963 | 1-3270 |
| HCQCM24 | 75 | 845070 | AC024969 | 964 | 1-339 |
| HCQCM24 | 75 | 845070 | AC026833 | 965 | 1-339 |
| HCRBF72 | 77 | 828945 | AL031731 | 966 | 1-228 |
| | | | | | 470-762 |
| | | | | | 793-916 |
| | | | | | 1138-1283 |
| | | | | | 2101-2241 |
| | | | | | 3646-3723 |
| | | | | | 4316-4418 |
| | | | | | 5123-5221 |
| | | | | | 5531-5609 |
| | | | | | 6090-6192 |
| | | | | | 6447-6790 |
| HCRBF72 | 77 | 828945 | AL031731 | 967 | 1-742 |
| | | | | | 941-1493 |
| | | | | | 1926-2063 |
| | | | | | 2330-2427 |
| | | | | | 2939-3397 |
| | | | | | 3456-3806 |
| | | | | | 4127-4407 |
| | | | | | 5411-5701 |
| | | | | | 5758-5887 |
| | | | | | 6247-6369 |
| | | | | | 6418-6967 |
| | | | | | 8694-8799 |
| | | | | | 8827-8931 |
| | | | | | 8973-9140 |
| | | | | | 10098-10228 |
| | | | | | 11027-11789 |
| | | | | | 12063-13656 |
| | | | | | 14974-15080 |
| | | | | | 15481-15672 |
| | | | | | 15724-15921 |
| | | | | | 16055-16089 |
| | | | | | 17154-17467 |
| | | | | | 17730-17886 |
| | | | | | 18256-18550 |
| | | | | | 18657-18902 |
| HCUCF89 | 80 | 637986 | AC022554 | 968 | 1-1066 |
| HCUCF89 | 80 | 637986 | AC022554 | 969 | 1-692 |
| HCUCF89 | 80 | 637986 | AC022554 | 970 | 1-643 |
| HCUCK44 | 81 | 790277 | AC007842 | 971 | 1-1118 |
| HCUCK44 | 81 | 790277 | AC007842 | 972 | 1-415 |
| HCUCK44 | 81 | 790277 | AC007842 | 973 | 1-101 |
| HCWAE64 | 83 | 535893 | AL157935 | 974 | 1-1319 |
| | | | | | 2024-2316 |
| | | | | | 2937-2984 |
| | | | | | 3126-3281 |
| | | | | | 5595-5703 |
| | | | | | 5788-6574 |
| | | | | | 6667-6733 |
| | | | | | 6788-6880 |
| | | | | | 6962-7303 |
| | | | | | 8111-11869 |
| | | | | | 12019-12418 |
| | | | | | 12420-12679 |
| | | | | | 13140-13191 |
| HCWAE64 | 83 | 535893 | AL157935 | 975 | 1-1316 |
| HCWAE64 | 83 | 535893 | AL157935 | 976 | 1-309 |
| HCWFU39 | 84 | 651316 | AP000427 | 977 | 1-2086 |
| | | | | | 2209-2777 |
| | | | | | 3392-4040 |
| | | | | | 5819-5959 |
| HCWUL09 | 85 | 834722 | AL138741 | 978 | 1-755 |
| HCWUL09 | 85 | 834722 | AL138741 | 979 | 1-555 |
| HDHAA42 | 86 | 695710 | AC069193 | 980 | 1-1213 |
| HDHAA42 | 86 | 695710 | AL049629 | 981 | 1-1213 |
| HDHAA42 | 86 | 695710 | AC069193 | 982 | 1-807 |
| HDHAA42 | 86 | 695710 | AL049629 | 983 | 1-807 |
| HDHAA42 | 86 | 695710 | AL049629 | 984 | 1-129 |
| HDPDI72 | 89 | 897277 | AL139238 | 985 | 1-76 |
| | | | | | 3170-3542 |
| | | | | | 4724-5613 |
| | | | | | 6598-6719 |
| | | | | | 6954-7373 |
| | | | | | 8256-8349 |
| | | | | | 10408-11003 |
| HDPDI72 | 89 | 897277 | AL139238 | 986 | 1-279 |
| HDPFF10 | 91 | 853513 | AC023797 | 987 | 1-120 |
| | | | | | 135-715 |
| | | | | | 1005-1364 |
| | | | | | 1715-2180 |
| | | | | | 2566-2672 |
| | | | | | 3355-3621 |
| | | | | | 3641-4033 |
| | | | | | 4196-4285 |
| | | | | | 5100-7482 |
| HDPFF10 | 91 | 853513 | AC023797 | 988 | 1-463 |
| HDPFY18 | 93 | 779450 | AC011875 | 989 | 1-1880 |
| HDPFY18 | 93 | 779450 | AP000848 | 990 | 1-1470 |
| HDPFY18 | 93 | 779450 | AP000663 | 991 | 1-3332 |
| HDPOO76 | 97 | 838594 | AC006483 | 992 | 1-109 |
| | | | | | 132-434 |
| | | | | | 604-3482 |
| HDPOO76 | 97 | 838594 | AC026717 | 993 | 1-1820 |
| HDPOO76 | 97 | 838594 | AC035147 | 994 | 1-1820 |
| HDPOO76 | 97 | 838594 | AC026692 | 995 | 1-1823 |
| HDPOO76 | 97 | 838594 | AC073481 | 996 | 1-2558 |
| HDPOO76 | 97 | 838594 | AC006483 | 997 | 1-216 |
| HDPOO76 | 97 | 838594 | AC006483 | 998 | 1-231 |
| HDPOO76 | 97 | 838594 | AC073481 | 999 | 1-231 |
| HDPXN20 | 100 | 801896 | AP001810 | 1000 | 1-4481 |
| HDPXN20 | 100 | 801896 | AP001649 | 1001 | 1-4481 |
| HDPXN20 | 100 | 801896 | AC021331 | 1002 | 1-4481 |
| HDPXN20 | 100 | 801896 | AP001810 | 1003 | 1-363 |
| HDPXN20 | 100 | 801896 | AP001649 | 1004 | 1-363 |
| HDPXN20 | 100 | 801896 | AC021331 | 1005 | 1-363 |
| HDTAV54 | 102 | 801898 | AC073342 | 1006 | 1-164 |
| | | | | | 208-280 |
| | | | | | 349-1975 |
| | | | | | 1978-2434 |
| | | | | | 2614-2946 |
| | | | | | 4135-9074 |
| | | | | | 9200-9507 |
| HDTAV54 | 102 | 801898 | AC073342 | 1007 | 1-434 |
| HDTGW48 | 103 | 827285 | AL138804 | 1008 | 1-44 |
| | | | | | 712-839 |
| | | | | | 1107-2515 |
| | | | | | 2854-3189 |
| | | | | | 3388-3704 |
| | | | | | 3951-4245 |
| | | | | | 4737-4829 |
| | | | | | 5674-6404 |
| | | | | | 7604-8233 |
| | | | | | 8818-9303 |
| HDTGW48 | 103 | 827285 | AL138804 | 1009 | 1-391 |
| HDTGW48 | 103 | 827285 | AL138804 | 1010 | 1-87 |
| | | | | | 821-1093 |
| HDTLM18 | 104 | 836057 | AL049843 | 1011 | 1-148 |
| | | | | | 811-1104 |
| | | | | | 2196-2793 |
| | | | | | 2930-2991 |
| | | | | | 3921-4047 |
| | | | | | 6575-6627 |
| | | | | | 8124-8659 |
| | | | | | 8741-8843 |
| | | | | | 9448-9886 |
| | | | | | 10480-10524 |
| | | | | | 10944-11103 |
| | | | | | 13917-14450 |
| | | | | | 14801-15344 |
| | | | | | 16392-17295 |
| | | | | | 18110-18311 |
| | | | | | 20445-21421 |
| | | | | | 21596-22268 |
| | | | | | 23857-23968 |
| | | | | | 24205-24585 |
| | | | | | 24623-24701 |
| | | | | | 25168-25575 |
| | | | | | 28078-28391 |
| | | | | | 28548-28707 |
| | | | | | 29039-29839 |
| | | | | | 30732-31495 |
| | | | | | 32024-32487 |
| | | | | | 32521-33216 |
| | | | | | 34511-34647 |
| | | | | | 35166-35720 |
| | | | | | 36527-36797 |
| | | | | | 36993-37125 |
| | | | | | 38178-38288 |
| | | | | | 39341-39646 |
| | | | | | 41511-41570 |
| | | | | | 42307-42873 |
| | | | | | 42914-43014 |
| | | | | | 43248-43465 |
| | | | | | 43589-43690 |
| | | | | | 43724-43909 |
| | | | | | 44170-44333 |
| | | | | | 44517-45130 |
| | | | | | 45497-45961 |
| | | | | | 46215-46842 |
| | | | | | 47926-48126 |
| | | | | | 49391-51961 |
| HDTLM18 | 104 | 836057 | AL049843 | 1012 | 1-2071 |
| HDTLM18 | 104 | 836057 | AL049843 | 1013 | 1-76 |
| | | | | | 2590-2720 |
| | | | | | 4185-4370 |
| | | | | | 7052-7178 |
| | | | | | 7385-7428 |
| HE2CH58 | 105 | 838140 | AC006333 | 1014 | 1-1938 |
| HE2CH58 | 105 | 838140 | AC027585 | 1015 | 1-2368 |
| HE2CH58 | 105 | 838140 | AC006333 | 1016 | 1-430 |
| HE2PO93 | 106 | 771655 | AC020894 | 1017 | 1-353 |
| | | | | | 749-1198 |
| | | | | | 2724-2986 |
| | | | | | 4932-5578 |
| | | | | | 7481-7617 |
| | | | | | 8108-8257 |
| | | | | | 8515-8849 |
| | | | | | 9840-9968 |
| | | | | | 10287-10827 |
| | | | | | 11376-14474 |
| | | | | | 14652-15073 |
| | | | | | 15510-17083 |
| | | | | | 17304-20501 |
| HE2PO93 | 106 | 771655 | AC008590 | 1018 | 1-648 |
| | | | | | 2551-2687 |
| | | | | | 3178-3327 |
| | | | | | 3585-3919 |
| | | | | | 4910-5038 |
| | | | | | 5357-5897 |
| | | | | | 6446-10147 |
| | | | | | 10584-12159 |
| | | | | | 12380-15574 |
| HE2PO93 | 106 | 771655 | AC021468 | 1019 | 1-353 |
| | | | | | 749-1198 |
| | | | | | 2724-2986 |
| | | | | | 4934-5579 |
| | | | | | 7482-7618 |
| | | | | | 8109-8258 |
| | | | | | 8516-8850 |
| | | | | | 9841-9969 |
| | | | | | 10288-10828 |
| | | | | | 11377-13627 |
| | | | | | 13631-13748 |
| | | | | | 13762-15078 |
| | | | | | 15515-17088 |
| | | | | | 17309-20507 |
| HE2PO93 | 106 | 771655 | AC020894 | 1020 | 1-372 |
| HE2PO93 | 106 | 771655 | AC020894 | 1021 | 1-315 |
| | | | | | 893-1242 |
| HE2PO93 | 106 | 771655 | AC021468 | 1022 | 1-350 |
| HE2PO93 | 106 | 771655 | AC021468 | 1023 | 1-372 |
| HE6DO92 | 109 | 562767 | AC007276 | 1024 | 1-946 |
| HE6DO92 | 109 | 562767 | AC074010 | 1025 | 1-946 |
| HE6DO92 | 109 | 562767 | AC007276 | 1026 | 1-405 |
| HE6DO92 | 109 | 562767 | AC074010 | 1027 | 1-405 |
| HE6EY13 | 110 | 847058 | AC003688 | 1028 | 1-449 |
| | | | | | 4037-4176 |
| | | | | | 4301-4366 |
| | | | | | 4461-4586 |
| | | | | | 4781-4860 |
| | | | | | 5274-5391 |
| | | | | | 5498-5619 |
| | | | | | 6604-6940 |
| | | | | | 7008-7096 |
| | | | | | 7103-8056 |
| HE6EY13 | 110 | 847058 | AC011022 | 1029 | 1-1405 |
| HE6EY13 | 110 | 847058 | AC023963 | 1030 | 1-1333 |
| HE6EY13 | 110 | 847058 | AC003688 | 1031 | 1-931 |
| | | | | | 983-1131 |
| | | | | | 1504-2295 |
| HE6EY13 | 110 | 847058 | AC003688 | 1032 | 1-286 |
| HE6EY13 | 110 | 847058 | AC011022 | 1033 | 1-274 |
| HE6EY13 | 110 | 847058 | AC023963 | 1034 | 1-274 |
| HE8BQ49 | 111 | 589443 | AC009225 | 1035 | 1-1857 |
| HE8SG96 | 112 | 862016 | AL138707 | 1036 | 1-152 |
| | | | | | 684-1297 |
| | | | | | 1697-3720 |
| | | | | | 4478-6193 |
| HE8SG96 | 112 | 862016 | AL138707 | 1037 | 1-336 |
| HEBCI18 | 116 | 831464 | AC013399 | 1038 | 1-3602 |
| HEBCI18 | 116 | 831464 | AC013399 | 1039 | 1-651 |
| HEBDF77 | 117 | 692347 | AL078460 | 1040 | 1-1933 |
| HEBDF77 | 117 | 692347 | AL078460 | 1041 | 1-269 |
| HEBDF77 | 117 | 692347 | AL078460 | 1042 | 1-176 |
| HEBDQ91 | 118 | 840288 | AC008623 | 1043 | 1-2883 |
| HEBDQ91 | 118 | 840288 | AC008623 | 1044 | 1-350 |
| HEBDQ91 | 118 | 840288 | AC008623 | 1045 | 1-555 |
| HEBFR46 | 119 | 847064 | AC006483 | 1046 | 1-70 |
| | | | | | 282-644 |
| | | | | | 789-4243 |
| HEBFR46 | 119 | 847064 | AC073481 | 1047 | 1-2167 |
| | | | | | 2174-3461 |
| HEBFR46 | 119 | 847064 | AC006483 | 1048 | 1-344 |
| HEBFR46 | 119 | 847064 | AC006483 | 1049 | 1-195 |
| HEBGE07 | 120 | 798096 | AC021918 | 1050 | 1-1899 |
| HEBGE07 | 120 | 798096 | AC021918 | 1051 | 1-225 |
| HELAT35 | 121 | 693175 | AC008880 | 1052 | 1-2115 |
| HELAT35 | 121 | 693175 | AC016613 | 1053 | 1-2115 |
| HELBU54 | 122 | 637624 | AC011004 | 1054 | 1-1736 |
| HELBU54 | 122 | 637624 | AC011004 | 1055 | 1-404 |
| HELBU54 | 122 | 637624 | AC011004 | 1056 | 1-104 |
| HEMEY47 | 123 | 834491 | AL133240 | 1057 | 1-144 |
| | | | | | 3483-4002 |
| | | | | | 4138-4196 |
| | | | | | 4835-5233 |
| | | | | | 8422-9149 |
| | | | | | 10684-10795 |
| | | | | | 11255-11435 |
| | | | | | 12025-12186 |
| | | | | | 12266-12376 |
| | | | | | 13381-13513 |
| | | | | | 14514-14661 |
| | | | | | 16248-16363 |
| | | | | | 17221-17433 |
| | | | | | 18618-18721 |
| | | | | | 20181-20371 |
| | | | | | 21019-21314 |
| | | | | | 22519-22957 |
| | | | | | 24380-25014 |
| | | | | | 25275-25783 |
| | | | | | 29344-29462 |
| | | | | | 30160-30257 |
| | | | | | 32036-32474 |
| | | | | | 33138-34013 |
| | | | | | 34369-35308 |
| | | | | | 35672-35908 |
| | | | | | 36996-37299 |
| | | | | | 39125-39261 |
| | | | | | 39667-43056 |
| HEMEY47 | 123 | 834491 | AL121773 | 1058 | 1-144 |
| | | | | | 3483-4002 |
| | | | | | 4138-4196 |
| | | | | | 4835-5233 |
| | | | | | 8422-9149 |
| | | | | | 11252-11432 |
| | | | | | 12022-12183 |
| | | | | | 12263-12373 |
| | | | | | 13378-13510 |
| | | | | | 14511-14658 |
| | | | | | 16245-16360 |
| | | | | | 17218-17348 |
| | | | | | 17358-17438 |
| | | | | | 20176-20366 |
| | | | | | 21014-21309 |
| | | | | | 22514-22952 |
| | | | | | 24263-25009 |
| | | | | | 25270-25778 |
| | | | | | 29339-29457 |
| | | | | | 30154-30263 |
| | | | | | 32033-32471 |
| | | | | | 33135-34010 |
| | | | | | 34366-35305 |
| | | | | | 35669-35905 |
| | | | | | 36993-37296 |
| | | | | | 39122-39258 |
| | | | | | 39664-43053 |
| HEMEY47 | 123 | 834491 | AL133240 | 1059 | 1-667 |
| HEMEY47 | 123 | 834491 | AL133240 | 1060 | 1-120 |
| | | | | | 216-786 |
| | | | | | 890-1198 |
| | | | | | 1376-1780 |
| | | | | | 2002-2592 |
| | | | | | 2730-2848 |
| | | | | | 3192-4374 |
| | | | | | 4397-4612 |
| | | | | | 4988-5825 |
| HEMEY47 | 123 | 834491 | AL121773 | 1061 | 1-120 |
| | | | | | 215-785 |
| | | | | | 889-1197 |
| | | | | | 1375-1779 |
| | | | | | 2001-2591 |
| | | | | | 2729-2847 |
| | | | | | 3191-4373 |
| | | | | | 4396-4611 |
| | | | | | 4998-5824 |
| HEMEY47 | 123 | 834491 | AL121773 | 1062 | 1-667 |
| HEPBA14 | 125 | 855935 | AC027590 | 1063 | 1-700 |
| | | | | | 959-1716 |
| HEPBA14 | 125 | 855935 | AC027590 | 1064 | 1-491 |
| HETEY67 | 128 | 704077 | AL133477 | 1065 | 1-89 |
| | | | | | 107-4333 |
| HETEY67 | 128 | 704077 | AL353578 | 1066 | 1-89 |
| | | | | | 107-2184 |
| HETEY67 | 128 | 704077 | AL133477 | 1067 | 1-110 |
| | | | | | 140-243 |
| | | | | | 918-1001 |
| | | | | | 2463-2748 |
| | | | | | 3495-3652 |
| HETEY67 | 128 | 704077 | AL353578 | 1068 | 1-152 |
| HFCDW95 | 129 | 847383 | AC006388 | 1069 | 1-3484 |
| HFCDW95 | 129 | 847383 | AC006388 | 1070 | 1-1218 |
| HFCDW95 | 129 | 847383 | AC006388 | 1071 | 1-158 |
| HFEAY59 | 131 | 658685 | AC005919 | 1072 | 1-490 |
| | | | | | 976-1063 |
| | | | | | 1264-1351 |
| | | | | | 1663-1956 |
| | | | | | 2076-2238 |
| | | | | | 2674-2837 |
| | | | | | 2910-3034 |
| | | | | | 4517-4686 |
| | | | | | 4804-5021 |
| | | | | | 5234-5282 |
| | | | | | 5397-5729 |
| | | | | | 7103-7442 |
| HFEAY59 | 131 | 658685 | AC005919 | 1073 | 1-155 |
| HFGAJ16 | 133 | 580824 | U52111 | 1074 | 1-208 |
| | | | | | 332-897 |
| | | | | | 1117-1259 |
| | | | | | 3436-3539 |
| | | | | | 8714-8869 |
| | | | | | 9007-9519 |
| | | | | | 9960-10222 |
| | | | | | 10562-10787 |
| | | | | | 11193-11396 |
| | | | | | 12116-12416 |
| | | | | | 12475-12631 |
| | | | | | 17840-18308 |
| | | | | | 20205-20451 |
| | | | | | 21348-21594 |
| | | | | | 22043-22408 |
| | | | | | 23431-23917 |
| HFGAJ16 | 133 | 580824 | AC002041 | 1075 | 1-254 |
| | | | | | 1127-1340 |
| | | | | | 1821-2184 |
| | | | | | 2518-3152 |
| | | | | | 3214-3699 |
| HFGAJ16 | 133 | 580824 | AC009057 | 1076 | 1-254 |
| | | | | | 1127-1340 |
| | | | | | 1821-2184 |
| | | | | | 2518-3152 |
| | | | | | 3214-3699 |
| HFGAJ16 | 133 | 580824 | U52111 | 1077 | 1-457 |
| | | | | | 529-1204 |
| HFGAJ16 | 133 | 580824 | AC002041 | 1078 | 1-469 |
| HFGAJ16 | 133 | 580824 | AC009057 | 1079 | 1-469 |
| HFIJA29 | 135 | 839206 | AL031259 | 1080 | 1-1291 |
| | | | | | 1460-2067 |
| | | | | | 2069-2908 |
| | | | | | 3053-3754 |
| | | | | | 4093-4182 |
| | | | | | 4546-4650 |
| | | | | | 5612-6170 |
| | | | | | 6932-9872 |
| HFIJA29 | 135 | 839206 | AC009954 | 1081 | 1-1294 |
| | | | | | 1463-2070 |
| | | | | | 2072-2911 |
| | | | | | 3056-3757 |
| | | | | | 4096-4185 |
| | | | | | 4549-4653 |
| | | | | | 5614-6172 |
| | | | | | 6935-9878 |
| HFIJA29 | 135 | 839206 | AL031259 | 1082 | 1-426 |
| HFIJA29 | 135 | 839206 | AL031259 | 1083 | 1-829 |
| | | | | | 1325-1871 |
| | | | | | 2204-2663 |
| | | | | | 3085-3251 |
| | | | | | 4136-4238 |
| | | | | | 4289-4388 |
| | | | | | 4564-4997 |
| | | | | | 5413-5945 |
| | | | | | 8022-8401 |
| | | | | | 8405-8923 |
| | | | | | 10401-10602 |
| | | | | | 10628-11074 |
| | | | | | 15099-15200 |
| | | | | | 15346-15984 |
| | | | | | 18400-18491 |
| HFIJA29 | 135 | 839206 | AC009954 | 1084 | 1-829 |
| | | | | | 1325-1871 |
| | | | | | 2204-2663 |
| | | | | | 3087-3253 |
| | | | | | 4262-4399 |
| | | | | | 4571-5004 |
| | | | | | 5420-5952 |
| | | | | | 8016-8395 |
| | | | | | 8399-8917 |
| | | | | | 10395-10596 |
| | | | | | 10622-11056 |
| | | | | | 15325-15963 |
| | | | | | 18377-18495 |
| HFIJA29 | 135 | 839206 | AC009954 | 1085 | 1-426 |
| HFIJA68 | 136 | 847074 | AC010550 | 1086 | 1-127 |
| HFKEU12 | 138 | 634006 | AC010443 | 1087 | 1-1026 |
| HFKEU12 | 138 | 634006 | AC021087 | 1088 | 1-1026 |
| HFKEU12 | 138 | 634006 | AC027825 | 1089 | 1-1026 |
| HFKEU12 | 138 | 634006 | AC027825 | 1090 | 1-263 |
| HFKFX64 | 139 | 566835 | AP001203 | 1091 | 1-870 |
| HFKFX64 | 139 | 566835 | AC025291 | 1092 | 1-868 |
| HFKFX64 | 139 | 566835 | AC010798 | 1093 | 1-868 |
| HFKFX64 | 139 | 566835 | AP001203 | 1094 | 1-750 |
| HFKFX64 | 139 | 566835 | AC025291 | 1095 | 1-750 |
| HFKFX64 | 139 | 566835 | AC010798 | 1096 | 1-750 |
| HFPDS07 | 140 | 821646 | AC067945 | 1097 | 1-3965 |
| HFPDS07 | 140 | 821646 | AC067945 | 1098 | 1-814 |
| HFPDS07 | 140 | 821646 | AC067945 | 1099 | 1-743 |
| HFRAB10 | 141 | 745380 | AC067763 | 1100 | 1-2395 |
| HFRAB10 | 141 | 745380 | AC012263 | 1101 | 1-2395 |
| HFRAB10 | 141 | 745380 | AC067763 | 1102 | 1-125 |
| HFRAB10 | 141 | 745380 | AC012263 | 1103 | 1-125 |
| HFRAB10 | 141 | 745380 | AC012263 | 1104 | 1-622 |
| HFVGK35 | 143 | 731868 | AC018362 | 1105 | 1-49 |
| | | | | | 463-1004 |
| | | | | | 2131-2239 |
| | | | | | 2799-3339 |
| | | | | | 3639-3668 |
| | | | | | 3679-6187 |
| | | | | | 7308-7451 |
| | | | | | 7701-7829 |
| | | | | | 8065-8968 |
| HFXBT66 | 145 | 580831 | AL162497 | 1106 | 1-955 |
| HFXBT66 | 145 | 580831 | AL162497 | 1107 | 1-479 |
| HGBER72 | 147 | 826710 | AL157935 | 1108 | 1-1319 |
| | | | | | 2024-2316 |
| | | | | | 2937-2984 |
| | | | | | 3126-3281 |
| | | | | | 5595-5703 |
| | | | | | 5788-6574 |
| | | | | | 6667-6733 |
| | | | | | 6788-6880 |
| | | | | | 6962-7303 |
| | | | | | 8111-11869 |
| | | | | | 12019-12418 |
| | | | | | 12420-12679 |
| | | | | | 13140-13191 |
| HGBER72 | 147 | 826710 | AL157935 | 1109 | 1-1316 |
| HGBER72 | 147 | 826710 | AL157935 | 1110 | 1-309 |
| HGLBG15 | 150 | 701990 | AC005082 | 1111 | 1-252 |
| | | | | | 2150-2418 |
| | | | | | 2461-2695 |
| | | | | | 2700-3101 |
| | | | | | 3368-3776 |
| | | | | | 6066-6250 |
| | | | | | 7105-7363 |
| | | | | | 8329-9740 |
| HGLBG15 | 150 | 701990 | AC073992 | 1112 | 1-259 |
| | | | | | 1225-2636 |
| HGLBG15 | 150 | 701990 | AC005082 | 1113 | 1-546 |
| HGLBG15 | 150 | 701990 | AC073992 | 1114 | 1-282 |
| HHEGS55 | 151 | 858372 | AC009679 | 1115 | 1-565 |
| HHEGS55 | 151 | 858372 | AC016824 | 1116 | 1-902 |
| HHFEC39 | 153 | 609873 | AL022726 | 1117 | 1-819 |
| | | | | | 1137-4813 |
| HHFEC39 | 153 | 609873 | AL022726 | 1118 | 1-509 |
| HHFFS40 | 156 | 824059 | AC022423 | 1119 | 1-2017 |
| HHFFS40 | 156 | 824059 | AC025178 | 1120 | 1-2017 |
| HHFFS40 | 156 | 824059 | AC022444 | 1121 | 1-2017 |
| HHGDT26 | 158 | 658692 | AC010754 | 1122 | 1-1584 |
| HHGDT26 | 158 | 658692 | AC016127 | 1123 | 1-1584 |
| | | | | | 1639-1876 |
| HHGDT26 | 158 | 658692 | AC023989 | 1124 | 1-1584 |
| | | | | | 1639-1876 |
| HHPFU28 | 159 | 824573 | AC069200 | 1125 | 1-2595 |
| HHPFU28 | 159 | 824573 | AC069200 | 1126 | 1-3998 |
| HHPFU28 | 159 | 824573 | AC069200 | 1127 | 1-777 |
| HHSBI65 | 160 | 801910 | AF205589 | 1128 | 1-1703 |
| | | | | | 1798-2217 |
| | | | | | 2302-3089 |
| HHSBI65 | 160 | 801910 | AF205589 | 1129 | 1-531 |
| | | | | | 571-1759 |
| | | | | | 1862-2104 |
| | | | | | 2219-2722 |
| HHSDI53 | 161 | 862028 | AP001456 | 1130 | 1-1611 |
| | | | | | 1654-2020 |
| | | | | | 2187-2263 |
| HHSDI53 | 161 | 862028 | AL109936 | 1131 | 1-1611 |
| | | | | | 1654-2020 |
| | | | | | 2186-2322 |
| | | | | | 2673-3243 |
| | | | | | 3291-3857 |
| | | | | | 4276-4892 |
| | | | | | 5002-5380 |
| | | | | | 8185-8499 |
| | | | | | 8705-8842 |
| | | | | | 10146-10298 |
| | | | | | 12526-12652 |
| | | | | | 12780-14327 |
| HHSDI53 | 161 | 862028 | AP001456 | 1132 | 1-482 |
| HHSDI53 | 161 | 862028 | AL109936 | 1133 | 1-188 |
| HHSGL28 | 163 | 801912 | AC024242 | 1134 | 1-2154 |
| HHSGL28 | 163 | 801912 | AC020584 | 1135 | 1-215 |
| | | | | | 233-1205 |
| HHSGL28 | 163 | 801912 | AC024242 | 1136 | 1-216 |
| | | | | | 952-1969 |
| HHSGL28 | 163 | 801912 | AC020584 | 1137 | 1-635 |
| HISBA38 | 164 | 561711 | AL137020 | 1138 | 1-1169 |
| HISBA38 | 164 | 561711 | AL359254 | 1139 | 1-1169 |
| HISBA38 | 164 | 561711 | AL137020 | 1140 | 1-702 |
| HISBA38 | 164 | 561711 | AL359254 | 1141 | 1-702 |
| HJMAV41 | 166 | 862029 | AC008998 | 1142 | 1-239 |
| | | | | | 975-1119 |
| | | | | | 1204-1298 |
| | | | | | 3076-3230 |
| | | | | | 4100-4205 |
| | | | | | 5256-5376 |
| | | | | | 5476-5596 |
| | | | | | 6626-6943 |
| | | | | | 7508-8143 |
| HJPCH08 | 170 | 840365 | AC004826 | 1143 | 1-71 |
| | | | | | 475-867 |
| | | | | | 2289-2390 |
| | | | | | 2475-2596 |
| | | | | | 3191-3333 |
| | | | | | 3458-3644 |
| | | | | | 3729-3859 |
| | | | | | 4038-4233 |
| | | | | | 4338-4451 |
| | | | | | 4558-4626 |
| | | | | | 4832-4977 |
| | | | | | 5108-5272 |
| | | | | | 5380-5622 |
| | | | | | 5698-5816 |
| | | | | | 5965-6067 |
| | | | | | 6380-6580 |
| | | | | | 6829-6920 |
| | | | | | 7162-7299 |
| | | | | | 7943-10018 |
| | | | | | 10503-10623 |
| | | | | | 10699-10776 |
| | | | | | 10917-11336 |
| | | | | | 12343-12406 |
| | | | | | 12731-13275 |
| HJPCH08 | 170 | 840365 | AC004826 | 1144 | 1-406 |
| | | | | | 862-1119 |
| | | | | | 1423-1689 |
| | | | | | 2886-2989 |
| | | | | | 5361-5431 |
| | | | | | 5969-6059 |
| | | | | | 6874-7181 |
| | | | | | 9823-9980 |
| | | | | | 10928-11194 |
| | | | | | 12667-12838 |
| | | | | | 17063-18165 |
| | | | | | 18168-18649 |
| | | | | | 18785-19579 |
| | | | | | 19733-19780 |
| | | | | | 20247-20355 |
| | | | | | 21063-21415 |
| | | | | | 21546-22630 |
| | | | | | 23320-23541 |
| | | | | | 24276-24323 |
| | | | | | 24510-24602 |
| | | | | | 24903-25357 |
| | | | | | 26015-27115 |
| | | | | | 27309-28272 |
| | | | | | 28601-28879 |
| | | | | | 29413-29552 |
| | | | | | 30539-30602 |
| | | | | | 30728-31110 |
| | | | | | 31231-31353 |
| | | | | | 32257-32325 |
| | | | | | 33895-34173 |
| | | | | | 35081-35392 |
| | | | | | 37763-37860 |
| | | | | | 38789-38822 |
| | | | | | 38920-39119 |
| HJPCH08 | 170 | 840365 | AC004826 | 1145 | 1-424 |
| | | | | | 2065-2241 |
| HKACI79 | 172 | 853361 | AC006512 | 1146 | 1-658 |
| | | | | | 3090-3543 |
| | | | | | 4479-5105 |
| | | | | | 5885-6846 |
| | | | | | 7103-9707 |
| | | | | | 9914-10293 |
| | | | | | 11523-12034 |
| | | | | | 12067-12181 |
| | | | | | 13769-14031 |
| | | | | | 14199-14291 |
| | | | | | 14584-14790 |
| | | | | | 15123-15154 |
| | | | | | 17039-17482 |
| | | | | | 17539-17987 |
| | | | | | 18697-19052 |
| | | | | | 19112-19380 |
| | | | | | 20023-20268 |
| | | | | | 21158-21598 |
| | | | | | 21817-22221 |
| | | | | | 23565-23665 |
| | | | | | 23906-24076 |
| | | | | | 24981-25506 |
| | | | | | 25510-25861 |
| | | | | | 25981-26645 |
| | | | | | 26661-27449 |
| | | | | | 27717-27812 |
| | | | | | 27991-28024 |
| | | | | | 28437-28888 |
| | | | | | 29651-33442 |
| | | | | | 33621-34089 |
| | | | | | 34245-34808 |
| | | | | | 34819-35284 |
| | | | | | 35854-35960 |
| | | | | | 38525-38771 |
| HKACI79 | 172 | 853361 | AC011841 | 1147 | 1-710 |
| | | | | | 902-1864 |
| | | | | | 1997-2121 |
| | | | | | 2334-3824 |
| | | | | | 4232-5905 |
| HKACI79 | 172 | 853361 | AC011043 | 1148 | 1-712 |
| | | | | | 904-1867 |
| | | | | | 1874-1906 |
| | | | | | 2000-2124 |
| | | | | | 2337-3891 |
| HKACI79 | 172 | 853361 | AC078939 | 1149 | 1-646 |
| | | | | | 837-1797 |
| | | | | | 1804-1836 |
| | | | | | 1930-3820 |
| | | | | | 4161-5834 |
| HKACI79 | 172 | 853361 | AC006512 | 1150 | 1-315 |
| | | | | | 439-531 |
| | | | | | 707-1080 |
| | | | | | 1144-1227 |
| | | | | | 1491-1845 |
| | | | | | 2113-2321 |
| | | | | | 2700-3556 |
| | | | | | 3818-4307 |
| | | | | | 4336-4813 |
| | | | | | 4958-5775 |
| HKACI79 | 172 | 853361 | AC006512 | 1151 | 1-738 |
| HKACI79 | 172 | 853361 | AC011841 | 1152 | 1-541 |
| HKACI79 | 172 | 853361 | AC011841 | 1153 | 1-105 |
| HKACI79 | 172 | 853361 | AC011043 | 1154 | 1-105 |
| HKACI79 | 172 | 853361 | AC078939 | 1155 | 1-564 |
| HKACI79 | 172 | 853361 | AC078939 | 1156 | 1-105 |
| HKGBF25 | 174 | 738797 | AL390999 | 1157 | 1-1996 |
| HKGBF25 | 174 | 738797 | AC012079 | 1158 | 1-1997 |
| HKMLK03 | 175 | 734213 | AC007014 | 1159 | 1-1463 |
| HKMLK03 | 175 | 734213 | AC007493 | 1160 | 1-1439 |
| HKMLK03 | 175 | 734213 | AC007014 | 1161 | 1-205 |
| HKMLK03 | 175 | 734213 | AC007014 | 1162 | 1-509 |
| HKMLM95 | 176 | 840367 | AC006372 | 1163 | 1-1625 |
| HKMLM95 | 176 | 840367 | AC006372 | 1164 | 1-764 |
| HKMLM95 | 176 | 840367 | AC006372 | 1165 | 1-259 |
| HLDBG17 | 177 | 855953 | AL161798 | 1166 | 1-1403 |
| HLDCA54 | 178 | 842190 | AL135791 | 1167 | 1-109 |
| | | | | | 1747-2145 |
| | | | | | 4610-5526 |
| | | | | | 5738-7029 |
| | | | | | 7185-8965 |
| HLDCA54 | 178 | 842190 | AF205588 | 1168 | 1-109 |
| | | | | | 1741-2139 |
| | | | | | 4606-5522 |
| | | | | | 5734-7025 |
| | | | | | 7181-8960 |
| HLDCA54 | 178 | 842190 | AL390779 | 1169 | 1-917 |
| | | | | | 1129-2420 |
| | | | | | 2576-4357 |
| HLDCA54 | 178 | 842190 | AL135791 | 1170 | 1-242 |
| HLDCA54 | 178 | 842190 | AF205588 | 1171 | 1-242 |
| HLDCA54 | 178 | 842190 | AL390779 | 1172 | 1-242 |
| HLHAP05 | 181 | 638476 | AC009097 | 1173 | 1-101 |
| HLHCS23 | 182 | 560663 | AL356385 | 1174 | 1-1419 |
| HLHCS23 | 182 | 560663 | AC016501 | 1175 | 1-1419 |
| HLHCS23 | 182 | 560663 | AL356385 | 1176 | 1-560 |
| HLHCS23 | 182 | 560663 | AC016501 | 1177 | 1-560 |
| HLICO10 | 185 | 658740 | AL031685 | 1178 | 1-165 |
| | | | | | 1532-2565 |
| | | | | | 2618-3686 |
| | | | | | 4070-4320 |
| | | | | | 4665-5083 |
| | | | | | 5172-5547 |
| | | | | | 5902-6305 |
| | | | | | 7276-9100 |
| | | | | | 9742-9863 |
| | | | | | 10008-10531 |
| | | | | | 11381-11716 |
| | | | | | 12759-13260 |
| | | | | | 15686-17570 |
| HLICO10 | 185 | 658740 | AL031685 | 1179 | 1-182 |
| HLICO10 | 185 | 658740 | AL031685 | 1180 | 1-113 |
| HLJBS28 | 186 | 658742 | AC026779 | 1181 | 1-78 |
| | | | | | 2390-2473 |
| | | | | | 5457-7057 |
| HLJBS28 | 186 | 658742 | AC008482 | 1182 | 1-93 |
| | | | | | 1668-1990 |
| | | | | | 3077-4682 |
| HLJBS28 | 186 | 658742 | AC026779 | 1183 | 1-651 |
| HLJBS28 | 186 | 658742 | AC008482 | 1184 | 1-807 |
| HLMBW89 | 187 | 701996 | AC000378 | 1185 | 1-58 |
| | | | | | 638-973 |
| | | | | | 1260-1369 |
| | | | | | 2693-4145 |
| | | | | | 4457-5771 |
| | | | | | 6287-6925 |
| | | | | | 6952-7375 |
| | | | | | 7728-8216 |
| | | | | | 9647-12604 |
| HLMBW89 | 187 | 701996 | AC026957 | 1186 | 1-887 |
| | | | | | 1199-2410 |
| | | | | | 2513-2977 |
| HLMBW89 | 187 | 701996 | AC026458 | 1187 | 1-222 |
| | | | | | 1116-1198 |
| | | | | | 1311-1421 |
| | | | | | 1946-2070 |
| | | | | | 3553-3703 |
| | | | | | 4985-5195 |
| | | | | | 5609-5700 |
| | | | | | 6069-6182 |
| | | | | | 6316-7356 |
| | | | | | 7445-7513 |
| | | | | | 7568-7845 |
| | | | | | 7913-7973 |
| | | | | | 8815-9222 |
| | | | | | 10511-11963 |
| | | | | | 12275-13965 |
| | | | | | 14045-14129 |
| HLMBW89 | 187 | 701996 | AF165423 | 1188 | 1-58 |
| | | | | | 1007-1411 |
| | | | | | 2729-3447 |
| | | | | | 3684-4144 |
| | | | | | 4496-6259 |
| | | | | | 6397-6480 |
| HLMBW89 | 187 | 701996 | AC000378 | 1189 | 1-931 |
| HLMBW89 | 187 | 701996 | AC000378 | 1190 | 1-1510 |
| HLMBW89 | 187 | 701996 | AC026957 | 1191 | 1-313 |
| HLMBW89 | 187 | 701996 | AF165423 | 1192 | 1-69 |
| | | | | | 124-401 |
| HLMGP50 | 188 | 647603 | AC019101 | 1193 | 1-1039 |
| HLMGP50 | 188 | 647603 | AC019101 | 1194 | 1-100 |
| HLMJB64 | 189 | 658699 | AL034550 | 1195 | 1-107 |
| | | | | | 122-1264 |
| | | | | | 1513-4478 |
| HLMJB64 | 189 | 658699 | AL034550 | 1196 | 1-147 |
| | | | | | 445-569 |
| | | | | | 1012-1217 |
| | | | | | 5637-5681 |
| HLQCL64 | 191 | 864966 | AC066616 | 1197 | 1-96 |
| | | | | | 1004-1330 |
| | | | | | 1800-1928 |
| | | | | | 3574-4344 |
| | | | | | 4494-5134 |
| | | | | | 6013-6287 |
| | | | | | 8957-9700 |
| | | | | | 9966-12796 |
| HLQCL64 | 191 | 864966 | AC016050 | 1198 | 1-96 |
| | | | | | 1004-1330 |
| | | | | | 1800-1928 |
| | | | | | 3580-4350 |
| | | | | | 4500-5140 |
| | | | | | 6019-6293 |
| | | | | | 8963-9706 |
| | | | | | 9972-12801 |
| HLQCL64 | 191 | 864966 | AC066616 | 1199 | 1-336 |
| HLQCL64 | 191 | 864966 | AC016050 | 1200 | 1-336 |
| HLWBB73 | 193 | 740757 | AL117352 | 1201 | 1-123 |
| | | | | | 1745-1979 |
| | | | | | 2193-2318 |
| | | | | | 3405-3541 |
| | | | | | 5983-6429 |
| | | | | | 6462-6536 |
| | | | | | 6985-7400 |
| | | | | | 7630-10558 |
| HLWBB73 | 193 | 740757 | AL358784 | 1202 | 1-123 |
| | | | | | 1743-1977 |
| | | | | | 2191-2316 |
| | | | | | 3403-3539 |
| | | | | | 5981-6427 |
| | | | | | 6460-6534 |
| | | | | | 6983-7398 |
| | | | | | 7627-10554 |
| HLWBB73 | 193 | 740757 | AC011945 | 1203 | 1-2915 |
| HLWBB73 | 193 | 740757 | AL117352 | 1204 | 1-1016 |
| HLWBB73 | 193 | 740757 | AL358784 | 1205 | 1-1016 |
| HLWBB73 | 193 | 740757 | AC011945 | 1206 | 1-416 |
| HLWBB73 | 193 | 740757 | AC011945 | 1207 | 1-1016 |
| HLYEU59 | 195 | 582084 | AC024338 | 1208 | 1-1121 |
| HLYEU59 | 195 | 582084 | AC023270 | 1209 | 1-1121 |
| HLYEU59 | 195 | 582084 | AC024338 | 1210 | 1-498 |
| HLYEU59 | 195 | 582084 | AC023270 | 1211 | 1-498 |
| HLYGE16 | 197 | 651339 | AC025594 | 1212 | 1-272 |
| | | | | | 301-388 |
| | | | | | 531-1439 |
| | | | | | 1461-3200 |
| HLYGE16 | 197 | 651339 | AC073849 | 1213 | 1-272 |
| | | | | | 301-388 |
| | | | | | 531-1439 |
| | | | | | 1461-3200 |
| HLYGE16 | 197 | 651339 | AC025594 | 1214 | 1-337 |
| HLYGE16 | 197 | 651339 | AC073849 | 1215 | 1-337 |
| HMCFH60 | 199 | 654853 | AL122034 | 1216 | 1-785 |
| | | | | | 1072-3055 |
| HMCFH60 | 199 | 654853 | AC073394 | 1217 | 1-326 |
| | | | | | 1898-2079 |
| | | | | | 2460-2702 |
| | | | | | 4498-4586 |
| | | | | | 5598-7296 |
| | | | | | 7560-7669 |
| | | | | | 8015-8460 |
| | | | | | 8479-8539 |
| | | | | | 8918-9242 |
| | | | | | 10451-10975 |
| | | | | | 13375-13521 |
| | | | | | 13561-15769 |
| | | | | | 16055-18038 |
| HMCFH60 | 199 | 654853 | AL160264 | 1218 | 1-86 |
| | | | | | 1101-2799 |
| | | | | | 3063-3172 |
| | | | | | 3518-3963 |
| | | | | | 3982-4042 |
| | | | | | 4421-4745 |
| | | | | | 5954-6478 |
| | | | | | 8877-9023 |
| | | | | | 9063-11271 |
| | | | | | 11557-13540 |
| HMCFH60 | 199 | 654853 | AC073394 | 1219 | 1-309 |
| HMCFH60 | 199 | 654853 | AC073394 | 1220 | 1-577 |
| HMDAB29 | 200 | 584789 | AC027264 | 1221 | 1-147 |
| HMDAB29 | 200 | 584789 | AC068682 | 1222 | 1-153 |
| HMDAB29 | 200 | 584789 | AL354887 | 1223 | 1-1433 |
| HMDAB29 | 200 | 584789 | AL157408 | 1224 | 1-1434 |
| HMDAB29 | 200 | 584789 | AL354887 | 1225 | 1-577 |
| HMDAB29 | 200 | 584789 | AL354887 | 1226 | 1-196 |
| HMDAB29 | 200 | 584789 | AL157408 | 1227 | 1-577 |
| HMDAB29 | 200 | 584789 | AL157408 | 1228 | 1-196 |
| HMDAD44 | 201 | 566854 | AC012370 | 1229 | 1-145 |
| | | | | | 2813-4454 |
| HMDAD44 | 201 | 566854 | AC034121 | 1230 | 1-1569 |
| HMDAD44 | 201 | 566854 | AC012370 | 1231 | 1-787 |
| HMDAD44 | 201 | 566854 | AC012370 | 1232 | 1-622 |
| HMEDE24 | 203 | 837027 | AC011078 | 1233 | 1-297 |
| | | | | | 359-416 |
| | | | | | 3247-3653 |
| | | | | | 6083-6236 |
| | | | | | 9753-10036 |
| | | | | | 11128-11233 |
| | | | | | 12148-12514 |
| | | | | | 12635-13141 |
| | | | | | 15604-16463 |
| | | | | | 19071-19190 |
| | | | | | 19476-20232 |
| | | | | | 20321-20638 |
| | | | | | 21200-21594 |
| | | | | | 21959-22219 |
| | | | | | 23120-23362 |
| | | | | | 23467-24143 |
| | | | | | 24766-24853 |
| | | | | | 25725-26143 |
| | | | | | 26310-26455 |
| | | | | | 27545-30619 |
| | | | | | 30708-31169 |
| HMELM75 | 204 | 587307 | AL138846 | 1234 | 1-304 |
| | | | | | 423-553 |
| | | | | | 1434-2199 |
| | | | | | 3430-3470 |
| | | | | | 6425-6910 |
| | | | | | 7169-7453 |
| | | | | | 7726-8594 |
| | | | | | 8716-9187 |
| | | | | | 9274-9340 |
| | | | | | 10220-10323 |
| | | | | | 10333-10484 |
| | | | | | 10770-10868 |
| | | | | | 12169-12276 |
| | | | | | 12626-12744 |
| | | | | | 12959-13087 |
| | | | | | 13628-13739 |
| | | | | | 14496-14592 |
| | | | | | 15842-17239 |
| HMELM75 | 204 | 587307 | AC023225 | 1235 | 1-63 |
| | | | | | 949-1052 |
| | | | | | 1062-1217 |
| | | | | | 1500-1598 |
| | | | | | 2892-2999 |
| | | | | | 3350-3468 |
| | | | | | 3685-3811 |
| | | | | | 4351-4478 |
| | | | | | 5217-5305 |
| | | | | | 6563-7960 |
| HMELM75 | 204 | 587307 | AL138846 | 1236 | 1-442 |
| HMELM75 | 204 | 587307 | AL138846 | 1237 | 1-638 |
| HMELM75 | 204 | 587307 | AC023225 | 1238 | 1-472 |
| HMELM75 | 204 | 587307 | AC023225 | 1239 | 1-638 |
| HMIAK10 | 205 | 562774 | AP000817 | 1240 | 1-1044 |
| HMIAK10 | 205 | 562774 | AC024177 | 1241 | 1-1047 |
| HMIAK10 | 205 | 562774 | AC011009 | 1242 | 1-1047 |
| HMIBD93 | 206 | 634227 | AC010913 | 1243 | 1-3640 |
| HMIBD93 | 206 | 634227 | AC010913 | 1244 | 1-495 |
| | | | | | 593-668 |
| | | | | | 670-1055 |
| | | | | | 1578-1799 |
| | | | | | 2445-2717 |
| | | | | | 3103-3203 |
| | | | | | 3284-3751 |
| | | | | | 3841-4032 |
| | | | | | 5093-5261 |
| | | | | | 5443-5872 |
| | | | | | 5922-6838 |
| | | | | | 7633-8170 |
| | | | | | 8304-8491 |
| | | | | | 8968-9029 |
| | | | | | 9888-10020 |
| | | | | | 10479-10733 |
| | | | | | 10807-10958 |
| | | | | | 11020-11132 |
| | | | | | 12080-12373 |
| | | | | | 12464-12585 |
| | | | | | 13223-13381 |
| | | | | | 17379-17471 |
| | | | | | 18572-19447 |
| HMIBF07 | 207 | 603528 | AC022833 | 1245 | 1-1721 |
| HMICP65 | 208 | 847403 | AL162741 | 1246 | 1-45 |
| HMICP65 | 208 | 847403 | AL162741 | 1247 | 1-102 |
| HMSHU20 | 213 | 847410 | AL354889 | 1248 | 1-43 |
| | | | | | 642-699 |
| | | | | | 1506-4529 |
| HMSHU20 | 213 | 847410 | AL161660 | 1249 | 1-3030 |
| HMSHU20 | 213 | 847410 | AL354889 | 1250 | 1-713 |
| HMSHU20 | 213 | 847410 | AL161660 | 1251 | 1-1063 |
| HMWJF53 | 218 | 758158 | AC021016 | 1252 | 1-739 |
| | | | | | 792-852 |
| | | | | | 1482-1572 |
| | | | | | 1670-4387 |
| HMWJF53 | 218 | 758158 | AC021016 | 1253 | 1-276 |
| HNEAK81 | 219 | 722235 | AL122015 | 1254 | 1-1226 |
| HNECL22 | 220 | 799541 | AF216674 | 1255 | 1-2837 |
| HNECL22 | 220 | 799541 | AC051642 | 1256 | 1-2201 |
| HNECL22 | 220 | 799541 | AF216674 | 1257 | 1-462 |
| HNECL22 | 220 | 799541 | AF216674 | 1258 | 1-836 |
| HNECL22 | 220 | 799541 | AC051642 | 1259 | 1-462 |
| HNECW49 | 221 | 639117 | AC011864 | 1260 | 1-522 |
| HNECW49 | 221 | 639117 | AC011864 | 1261 | 1-607 |
| HNECW49 | 221 | 639117 | AC011864 | 1262 | 1-741 |
| HNFHF34 | 224 | 722237 | AL356273 | 1263 | 1-166 |
| | | | | | 514-644 |
| | | | | | 1028-1685 |
| | | | | | 1982-3144 |
| | | | | | 3435-4099 |
| | | | | | 4640-4876 |
| | | | | | 5013-5854 |
| | | | | | 5857-6266 |
| | | | | | 6404-6685 |
| | | | | | 7094-7657 |
| | | | | | 7772-7976 |
| | | | | | 8288-8547 |
| | | | | | 8731-9316 |
| | | | | | 9327-11445 |
| HNFHF34 | 224 | 722237 | AL356273 | 1264 | 1-535 |
| HNFHF34 | 224 | 722237 | AL356273 | 1265 | 1-197 |
| HNGAM58 | 225 | 688114 | AP000023 | 1266 | 1-104 |
| | | | | | 106-313 |
| HNGAM58 | 225 | 688114 | AL353625 | 1267 | 1-1881 |
| | | | | | 2735-2808 |
| | | | | | 3883-4043 |
| | | | | | 5519-5602 |
| | | | | | 5702-5845 |
| | | | | | 6903-7175 |
| | | | | | 9926-10120 |
| | | | | | 11625-12238 |
| | | | | | 12343-12673 |
| | | | | | 12887-13212 |
| | | | | | 13309-13473 |
| | | | | | 13482-13691 |
| | | | | | 14962-15187 |
| | | | | | 15799-16641 |
| | | | | | 17298-17447 |
| | | | | | 18403-18517 |
| | | | | | 21404-21557 |
| | | | | | 22366-22603 |
| | | | | | 22625-23551 |
| | | | | | 25581-25730 |
| | | | | | 26277-26682 |
| | | | | | 26765-26975 |
| | | | | | 28188-28352 |
| | | | | | 30552-30705 |
| | | | | | 32576-32797 |
| | | | | | 33083-33326 |
| | | | | | 33654-33791 |
| | | | | | 34515-34643 |
| | | | | | 36494-36685 |
| | | | | | 37580-37916 |
| | | | | | 38168-38308 |
| | | | | | 38903-39515 |
| | | | | | 41650-41749 |
| | | | | | 42020-42153 |
| | | | | | 42920-43144 |
| | | | | | 43218-43346 |
| | | | | | 43937-44019 |
| | | | | | 44180-44379 |
| | | | | | 44623-44800 |
| | | | | | 44905-45050 |
| | | | | | 45835-46036 |
| | | | | | 47456-47567 |
| HNGAM58 | 225 | 688114 | AL136325 | 1268 | 1-308 |
| HNGAM58 | 225 | 688114 | AL078472 | 1269 | 1-114 |
| | | | | | 116-323 |
| HNGAM58 | 225 | 688114 | AL049776 | 1270 | 1-229 |
| | | | | | 1654-1686 |
| | | | | | 1809-1912 |
| | | | | | 3738-4062 |
| HNGAM58 | 225 | 688114 | AL031176 | 1271 | 1-310 |
| HNGAM58 | 225 | 688114 | AL022329 | 1272 | 1-255 |
| HNGAM58 | 225 | 688114 | AL022302 | 1273 | 1-97 |
| | | | | | 591-698 |
| | | | | | 4315-4635 |
| HNGAM58 | 225 | 688114 | AF111169 | 1274 | 1-287 |
| HNGAM58 | 225 | 688114 | AF001550 | 1275 | 1-313 |
| HNGAM58 | 225 | 688114 | AC009303 | 1276 | 1-320 |
| | | | | | 5298-5444 |
| | | | | | 5797-6110 |
| HNGAM58 | 225 | 688114 | AC008958 | 1277 | 1-300 |
| | | | | | 1024-1341 |
| | | | | | 2289-2604 |
| HNGAM58 | 225 | 688114 | AC008554 | 1278 | 1-306 |
| HNGAM58 | 225 | 688114 | AC008101 | 1279 | 1-115 |
| | | | | | 165-466 |
| | | | | | 966-1404 |
| | | | | | 1633-1705 |
| | | | | | 1926-2060 |
| | | | | | 3344-3376 |
| | | | | | 3578-3674 |
| | | | | | 3887-4181 |
| | | | | | 6025-6290 |
| | | | | | 10101-10428 |
| | | | | | 10551-10654 |
| | | | | | 11804-11921 |
| | | | | | 12916-13092 |
| | | | | | 14481-14684 |
| | | | | | 15589-15954 |
| | | | | | 16784-17082 |
| | | | | | 17091-17304 |
| | | | | | 18309-18919 |
| | | | | | 19343-19668 |
| | | | | | 20553-20853 |
| | | | | | 25924-26171 |
| | | | | | 26200-26512 |
| | | | | | 27209-27666 |
| HNGAM58 | 225 | 688114 | AC008079 | 1280 | 1-627 |
| | | | | | 2228-2466 |
| | | | | | 3557-3606 |
| | | | | | 4115-4251 |
| | | | | | 4459-4879 |
| | | | | | 5931-6271 |
| | | | | | 6478-6648 |
| | | | | | 7457-7555 |
| | | | | | 9361-9509 |
| | | | | | 9666-9964 |
| | | | | | 10062-10151 |
| | | | | | 12863-13276 |
| | | | | | 13550-13664 |
| | | | | | 13714-14020 |
| | | | | | 14515-14953 |
| | | | | | 15183-15255 |
| | | | | | 15463-15610 |
| | | | | | 16895-16927 |
| | | | | | 17129-17225 |
| | | | | | 17423-17724 |
| | | | | | 19577-19842 |
| | | | | | 23640-23967 |
| | | | | | 24090-24252 |
| | | | | | 26455-26631 |
| | | | | | 29128-29493 |
| | | | | | 30323-30621 |
| | | | | | 30630-30843 |
| | | | | | 31848-32458 |
| | | | | | 32882-33207 |
| | | | | | 34093-34392 |
| | | | | | 39463-39710 |
| | | | | | 39737-40052 |
| | | | | | 40755-41206 |
| HNGAM58 | 225 | 688114 | AC008008 | 1281 | 1-315 |
| HNGAM58 | 225 | 688114 | AC007666 | 1282 | 1-299 |
| HNGAM58 | 225 | 688114 | AC007619 | 1283 | 1-211 |
| HNGAM58 | 225 | 688114 | AC007324 | 1284 | 1-299 |
| HNGAM58 | 225 | 688114 | AC006965 | 1285 | 1-174 |
| HNGAM58 | 225 | 688114 | AC006946 | 1286 | 1-308 |
| HNGAM58 | 225 | 688114 | AC006548 | 1287 | 1-308 |
| HNGAM58 | 225 | 688114 | AC005846 | 1288 | 1-465 |
| HNGAM58 | 225 | 688114 | AC005598 | 1289 | 1-318 |
| HNGAM58 | 225 | 688114 | AC005594 | 1290 | 1-1731 |
| | | | | | 2759-3460 |
| | | | | | 4610-4721 |
| | | | | | 6663-6905 |
| | | | | | 7470-7615 |
| | | | | | 7961-8099 |
| | | | | | 8133-8446 |
| | | | | | 9437-9675 |
| | | | | | 10398-10546 |
| | | | | | 11600-11958 |
| | | | | | 12691-12876 |
| | | | | | 13531-13671 |
| | | | | | 14345-14499 |
| | | | | | 15652-15734 |
| | | | | | 17947-18305 |
| | | | | | 18918-19598 |
| | | | | | 20151-20330 |
| | | | | | 22326-22428 |
| HNGAM58 | 225 | 688114 | AC005342 | 1291 | 1-210 |
| HNGAM58 | 225 | 688114 | AC005221 | 1292 | 1-737 |
| HNGAM58 | 225 | 688114 | AC004477 | 1293 | 1-138 |
| HNGAM58 | 225 | 688114 | AC004460 | 1294 | 1-290 |
| | | | | | 747-4223 |
| | | | | | 4433-4702 |
| HNGAM58 | 225 | 688114 | AC004019 | 1295 | 1-299 |
| HNGAM58 | 225 | 688114 | AC002519 | 1296 | 1-295 |
| HNGAM58 | 225 | 688114 | AC002476 | 1297 | 1-40 |
| | | | | | 4020-4364 |
| HNGAM58 | 225 | 688114 | AC073220 | 1298 | 1-311 |
| | | | | | 766-4242 |
| | | | | | 4507-4721 |
| HNGAM58 | 225 | 688114 | AC019126 | 1299 | 1-1000 |
| | | | | | 1425-1500 |
| | | | | | 3144-3288 |
| | | | | | 4770-5081 |
| | | | | | 5584-5635 |
| HNGAM58 | 225 | 688114 | AC016772 | 1300 | 1-209 |
| HNGAM58 | 225 | 688114 | AC015804 | 1301 | 1-139 |
| HNGAM58 | 225 | 688114 | AC007194 | 1302 | 1-108 |
| HNGAM58 | 225 | 688114 | AC011740 | 1303 | 1-138 |
| HNGAM58 | 225 | 688114 | AL138740 | 1304 | 1-323 |
| HNGAM58 | 225 | 688114 | AL135839 | 1305 | 1-115 |
| | | | | | 161-358 |
| HNGAM58 | 225 | 688114 | AC022148 | 1306 | 1-427 |
| HNGAM58 | 225 | 688114 | Z82199 | 1307 | 1-549 |
| HNGAM58 | 225 | 688114 | AJ239319 | 1308 | 1-335 |
| | | | | | 1031-1609 |
| | | | | | 1922-2102 |
| | | | | | 4742-4918 |
| | | | | | 4925-5059 |
| HNGAM58 | 225 | 688114 | AC023221 | 1309 | 1-129 |
| HNGAM58 | 225 | 688114 | AC011994 | 1310 | 1-1939 |
| HNGAM58 | 225 | 688114 | AC011330 | 1311 | 1-139 |
| HNGAM58 | 225 | 688114 | AL121956 | 1312 | 1-1881 |
| | | | | | 2735-2808 |
| | | | | | 3883-4043 |
| | | | | | 5519-5602 |
| | | | | | 5702-5845 |
| | | | | | 6903-7175 |
| | | | | | 9926-10120 |
| | | | | | 11625-12238 |
| | | | | | 12343-12673 |
| | | | | | 12887-13212 |
| | | | | | 13309-13473 |
| | | | | | 13482-13691 |
| | | | | | 14962-15187 |
| | | | | | 15799-16641 |
| | | | | | 17298-17447 |
| | | | | | 18403-18517 |
| | | | | | 21404-21557 |
| | | | | | 22366-22603 |
| | | | | | 22625-23551 |
| | | | | | 25581-25730 |
| | | | | | 26277-26682 |
| | | | | | 26765-26975 |
| | | | | | 28188-28352 |
| | | | | | 30552-30705 |
| | | | | | 32576-32797 |
| | | | | | 33083-33326 |
| | | | | | 33654-33791 |
| | | | | | 34515-34643 |
| | | | | | 36494-36685 |
| | | | | | 37580-37916 |
| | | | | | 38168-38308 |
| | | | | | 38903-39515 |
| | | | | | 41650-41749 |
| | | | | | 42020-42153 |
| | | | | | 42920-43144 |
| | | | | | 43218-43346 |
| | | | | | 43937-44019 |
| | | | | | 44180-44379 |
| | | | | | 44623-44800 |
| | | | | | 44905-45050 |
| | | | | | 45835-46036 |
| | | | | | 47456-47567 |
| HNGAM58 | 225 | 688114 | AL354950 | 1313 | 1-141 |
| HNGAM58 | 225 | 688114 | AL160471 | 1314 | 1-803 |
| | | | | | 1156-1259 |
| | | | | | 3445-3580 |
| | | | | | 3733-3821 |
| | | | | | 8085-13120 |
| | | | | | 13277-13410 |
| | | | | | 14706-14802 |
| | | | | | 16142-16310 |
| | | | | | 16698-16741 |
| | | | | | 17373-17479 |
| | | | | | 20963-21108 |
| | | | | | 21604-21661 |
| | | | | | 21848-21963 |
| | | | | | 22062-22282 |
| | | | | | 22767-22904 |
| | | | | | 28319-28430 |
| | | | | | 31284-31384 |
| | | | | | 34181-34362 |
| | | | | | 35804-36251 |
| | | | | | 38170-38635 |
| | | | | | 39137-39685 |
| | | | | | 39978-40068 |
| | | | | | 40645-41002 |
| | | | | | 41212-41423 |
| | | | | | 43834-43966 |
| | | | | | 46252-46498 |
| | | | | | 47334-48322 |
| | | | | | 49425-49722 |
| | | | | | 50320-50738 |
| | | | | | 54716-54877 |
| HNGAM58 | 225 | 688114 | AC027130 | 1315 | 1-312 |
| HNGAM58 | 225 | 688114 | AC021669 | 1316 | 1-140 |
| HNGAM58 | 225 | 688114 | AC012620 | 1317 | 1-167 |
| HNGAM58 | 225 | 688114 | AC012124 | 1318 | 1-741 |
| | | | | | 2154-2713 |
| | | | | | 5013-5152 |
| | | | | | 5488-5667 |
| HNGAM58 | 225 | 688114 | AL157832 | 1319 | 1-141 |
| HNGAM58 | 225 | 688114 | AC022454 | 1320 | 1-153 |
| HNGAM58 | 225 | 688114 | AL357518 | 1321 | 1-131 |
| HNGAM58 | 225 | 688114 | AC004971 | 1322 | 1-124 |
| | | | | | 1636-1805 |
| | | | | | 3545-3919 |
| | | | | | 5034-5269 |
| | | | | | 5857-6264 |
| | | | | | 6457-6771 |
| | | | | | 6927-7080 |
| | | | | | 7527-7850 |
| | | | | | 7906-8247 |
| HNGAM58 | 225 | 688114 | AP000023 | 1323 | 1-83 |
| HNGAM58 | 225 | 688114 | AL353625 | 1324 | 1-354 |
| HNGAM58 | 225 | 688114 | AL136325 | 1325 | 1-149 |
| HNGAM58 | 225 | 688114 | AL078472 | 1326 | 1-83 |
| HNGAM58 | 225 | 688114 | AL022329 | 1327 | 1-636 |
| HNGAM58 | 225 | 688114 | AL022302 | 1328 | 1-101 |
| HNGAM58 | 225 | 688114 | AL022302 | 1329 | 1-461 |
| HNGAM58 | 225 | 688114 | AF111169 | 1330 | 1-101 |
| HNGAM58 | 225 | 688114 | AC009303 | 1331 | 1-222 |
| HNGAM58 | 225 | 688114 | AC008958 | 1332 | 1-374 |
| HNGAM58 | 225 | 688114 | AC008554 | 1333 | 1-100 |
| HNGAM58 | 225 | 688114 | AC008101 | 1334 | 1-159 |
| HNGAM58 | 225 | 688114 | AC008079 | 1335 | 1-159 |
| HNGAM58 | 225 | 688114 | AC008079 | 1336 | 1-73 |
| | | | | | 300-338 |
| | | | | | 801-1164 |
| | | | | | 3740-5359 |
| | | | | | 5459-6041 |
| HNGAM58 | 225 | 688114 | AC008008 | 1337 | 1-656 |
| HNGAM58 | 225 | 688114 | AC007666 | 1338 | 1-90 |
| | | | | | 145-413 |
| HNGAM58 | 225 | 688114 | AC007324 | 1339 | 1-214 |
| | | | | | 1219-1829 |
| HNGAM58 | 225 | 688114 | AC007324 | 1340 | 1-300 |
| HNGAM58 | 225 | 688114 | AC006965 | 1341 | 1-168 |
| HNGAM58 | 225 | 688114 | AC006946 | 1342 | 1-83 |
| HNGAM58 | 225 | 688114 | AC006548 | 1343 | 1-83 |
| HNGAM58 | 225 | 688114 | AC005598 | 1344 | 1-279 |
| HNGAM58 | 225 | 688114 | AC005598 | 1345 | 1-471 |
| HNGAM58 | 225 | 688114 | AC005594 | 1346 | 1-232 |
| HNGAM58 | 225 | 688114 | AC005221 | 1347 | 1-334 |
| | | | | | 1068-1453 |
| | | | | | 1964-2261 |
| | | | | | 2279-2734 |
| | | | | | 3142-3837 |
| | | | | | 3844-4120 |
| | | | | | 5655-6150 |
| HNGAM58 | 225 | 688114 | AC004477 | 1348 | 1-114 |
| HNGAM58 | 225 | 688114 | AC004460 | 1349 | 1-327 |
| HNGAM58 | 225 | 688114 | AC004019 | 1350 | 1-90 |
| | | | | | 145-413 |
| HNGAM58 | 225 | 688114 | AC002476 | 1351 | 1-232 |
| HNGAM58 | 225 | 688114 | AC073220 | 1352 | 1-327 |
| HNGAM58 | 225 | 688114 | AC019126 | 1353 | 1-84 |
| HNGAM58 | 225 | 688114 | AC019126 | 1354 | 1-510 |
| HNGAM58 | 225 | 688114 | AC016772 | 1355 | 1-90 |
| | | | | | 270-523 |
| | | | | | 1613-1654 |
| | | | | | 2621-2727 |
| | | | | | 4508-4585 |
| | | | | | 4669-4747 |
| | | | | | 5079-5131 |
| HNGAM58 | 225 | 688114 | AC016772 | 1356 | 1-554 |
| HNGAM58 | 225 | 688114 | AC015804 | 1357 | 1-456 |
| HNGAM58 | 225 | 688114 | AC015804 | 1358 | 1-157 |
| HNGAM58 | 225 | 688114 | AC011740 | 1359 | 1-382 |
| | | | | | 1357-2450 |
| | | | | | 4643-5158 |
| HNGAM58 | 225 | 688114 | AC011740 | 1360 | 1-125 |
| HNGAM58 | 225 | 688114 | AL135839 | 1361 | 1-87 |
| HNGAM58 | 225 | 688114 | AC022148 | 1362 | 1-780 |
| HNGAM58 | 225 | 688114 | Z82199 | 1363 | 1-1459 |
| HNGAM58 | 225 | 688114 | Z82199 | 1364 | 1-396 |
| HNGAM58 | 225 | 688114 | AJ239319 | 1365 | 1-129 |
| HNGAM58 | 225 | 688114 | AC023221 | 1366 | 1-130 |
| HNGAM58 | 225 | 688114 | AC011330 | 1367 | 1-465 |
| HNGAM58 | 225 | 688114 | AL121956 | 1368 | 1-354 |
| HNGAM58 | 225 | 688114 | AL354950 | 1369 | 1-485 |
| HNGAM58 | 225 | 688114 | AL354950 | 1370 | 1-116 |
| HNGAM58 | 225 | 688114 | AL160471 | 1371 | 1-244 |
| | | | | | 834-940 |
| | | | | | 969-1079 |
| | | | | | 1473-1628 |
| HNGAM58 | 225 | 688114 | AL160471 | 1372 | 1-1366 |
| HNGAM58 | 225 | 688114 | AC021669 | 1373 | 1-786 |
| HNGAM58 | 225 | 688114 | AL157832 | 1374 | 1-485 |
| HNGAM58 | 225 | 688114 | AL157832 | 1375 | 1-116 |
| HNGAM58 | 225 | 688114 | AC004971 | 1376 | 1-913 |
| HNGBH53 | 226 | 532614 | AP001095 | 1377 | 1-634 |
| HNGBH53 | 226 | 532614 | AC007902 | 1378 | 1-634 |
| HNGDX18 | 228 | 1145071 | AL391069 | 1379 | 1-1403 |
| HNGDX18 | 228 | 1145071 | AL158846 | 1380 | 1-193 |
| | | | | | 208-577 |
| | | | | | 894-1167 |
| | | | | | 1401-1629 |
| | | | | | 1918-3320 |
| | | | | | 4039-4082 |
| | | | | | 9400-10337 |
| HNGDX18 | 228 | 1145071 | AL391069 | 1381 | 1-274 |
| HNGDX18 | 228 | 1145071 | AL158846 | 1382 | 1-117 |
| HNGDY34 | 229 | 566863 | AC069508 | 1383 | 1-998 |
| HNGDY34 | 229 | 566863 | AC017028 | 1384 | 1-998 |
| HNGDY34 | 229 | 566863 | AC022705 | 1385 | 1-998 |
| HNGDY34 | 229 | 566863 | AC069508 | 1386 | 1-314 |
| HNGDY34 | 229 | 566863 | AC017028 | 1387 | 1-314 |
| HNGDY34 | 229 | 566863 | AC022705 | 1388 | 1-314 |
| HNGEA34 | 230 | 815678 | AC068137 | 1389 | 1-1100 |
| HNGJB41 | 233 | 852178 | AC004542 | 1390 | 1-108 |
| | | | | | 192-278 |
| | | | | | 349-470 |
| | | | | | 678-804 |
| | | | | | 2945-4433 |
| | | | | | 4687-4749 |
| | | | | | 5583-5951 |
| | | | | | 6304-6501 |
| | | | | | 7398-7867 |
| | | | | | 10583-10956 |
| | | | | | 11008-11440 |
| | | | | | 11603-11875 |
| | | | | | 12070-12473 |
| HNGJB41 | 233 | 852178 | AC004542 | 1391 | 1-976 |
| HNGKT41 | 234 | 836061 | AC008581 | 1392 | 1-1099 |
| HNGNK44 | 235 | 834949 | AC011474 | 1393 | 1-1181 |
| HNGNO53 | 236 | 836063 | AC023387 | 1394 | 1-869 |
| HNGNO53 | 236 | 836063 | AL355500 | 1395 | 1-851 |
| HNGPJ25 | 237 | 834942 | AP002781 | 1396 | 1-1472 |
| HNHCT47 | 238 | 634691 | AC027793 | 1397 | 1-147 |
| HNHCT47 | 238 | 634691 | AC022107 | 1398 | 1-111 |
| HNHCT47 | 238 | 634691 | AP001271 | 1399 | 1-610 |
| HNHCT47 | 238 | 634691 | AP000487 | 1400 | 1-610 |
| HNHCT47 | 238 | 634691 | AP000405 | 1401 | 1-612 |
| HNHCT47 | 238 | 634691 | AP001271 | 1402 | 1-375 |
| HNHCT47 | 238 | 634691 | AP000487 | 1403 | 1-36 |
| | | | | | 434-873 |
| HNHCT47 | 238 | 634691 | AP000405 | 1404 | 1-375 |
| HNHGK22 | 240 | 597451 | AC073193 | 1405 | 1-898 |
| HNHGK22 | 240 | 597451 | AC073193 | 1406 | 1-306 |
| HNHHB10 | 241 | 634589 | AC006275 | 1407 | 1-886 |
| HNHHB10 | 241 | 634589 | AC006275 | 1408 | 1-103 |
| HNTMH79 | 244 | 801921 | AL354986 | 1409 | 1-105 |
| | | | | | 2142-2322 |
| | | | | | 3037-3115 |
| | | | | | 3592-3934 |
| | | | | | 6365-6476 |
| | | | | | 6825-6912 |
| | | | | | 7486-11168 |
| HNTMH79 | 244 | 801921 | AL357500 | 1410 | 1-402 |
| | | | | | 684-807 |
| | | | | | 1045-1149 |
| | | | | | 1642-1887 |
| | | | | | 3186-3374 |
| | | | | | 4081-4159 |
| | | | | | 4636-4978 |
| | | | | | 7409-7520 |
| | | | | | 7869-7956 |
| | | | | | 8530-12212 |
| HNTMH79 | 244 | 801921 | AC025145 | 1411 | 1-105 |
| | | | | | 1122-4804 |
| HNTMH79 | 244 | 801921 | AL354986 | 1412 | 1-661 |
| HNTMH79 | 244 | 801921 | AL354986 | 1413 | 1-124 |
| HNTMH79 | 244 | 801921 | AL357500 | 1414 | 1-661 |
| HNTMH79 | 244 | 801921 | AL357500 | 1415 | 1-518 |
| HNTMH79 | 244 | 801921 | AC025145 | 1416 | 1-661 |
| HODAG07 | 245 | 655356 | AC004061 | 1417 | 1-875 |
| HODAG07 | 245 | 655356 | AC004061 | 1418 | 1-524 |
| HODBB70 | 246 | 520196 | AC006322 | 1419 | 1-561 |
| HODBB70 | 246 | 520196 | AC073110 | 1420 | 1-561 |
| HODBB70 | 246 | 520196 | AC025553 | 1421 | 1-561 |
| HODBB70 | 246 | 520196 | AC006322 | 1422 | 1-1741 |
| HODBB70 | 246 | 520196 | AC006322 | 1423 | 1-354 |
| HODBB70 | 246 | 520196 | AC073110 | 1424 | 1-1741 |
| HODBB70 | 246 | 520196 | AC073110 | 1425 | 1-354 |
| HODBV05 | 247 | 825283 | AC006344 | 1426 | 1-1102 |
| HODCZ32 | 248 | 836069 | AF064861 | 1427 | 1-124 |
| | | | | | 381-660 |
| | | | | | 1835-2487 |
| | | | | | 2976-3577 |
| | | | | | 3785-3919 |
| HODCZ32 | 248 | 836069 | AF129408 | 1428 | 1-124 |
| | | | | | 397-689 |
| | | | | | 1835-2487 |
| | | | | | 2976-3577 |
| | | | | | 3785-3919 |
| HODCZ32 | 248 | 836069 | AF064861 | 1429 | 1-237 |
| HODCZ32 | 248 | 836069 | AF064861 | 1430 | 1-302 |
| HODCZ32 | 248 | 836069 | AF129408 | 1431 | 1-237 |
| HODCZ32 | 248 | 836069 | AF129408 | 1432 | 1-302 |
| HORBS82 | 251 | 638293 | AL034419 | 1433 | 1-1798 |
| HORBS82 | 251 | 638293 | AL034419 | 1434 | 1-1186 |
| HOSEC25 | 253 | 688055 | AL353685 | 1435 | 1-950 |
| HOSEC25 | 253 | 688055 | AL353685 | 1436 | 1-112 |
| HOSEC25 | 253 | 688055 | AL353685 | 1437 | 1-83 |
| | | | | | 1024-4469 |
| HOUCA21 | 256 | 655359 | AP001915 | 1438 | 1-209 |
| HOUCA21 | 256 | 655359 | AC011168 | 1439 | 1-159 |
| HOUCA21 | 256 | 655359 | AC024518 | 1440 | 1-184 |
| HOUCA21 | 256 | 655359 | AC024490 | 1441 | 1-232 |
| HOUCA21 | 256 | 655359 | AC068588 | 1442 | 1-104 |
| HOUCA21 | 256 | 655359 | AC040977 | 1443 | 1-117 |
| HOUCA21 | 256 | 655359 | AC069267 | 1444 | 1-161 |
| HOUCA21 | 256 | 655359 | AC036207 | 1445 | 1-501 |
| | | | | | 2219-2327 |
| | | | | | 2469-3724 |
| | | | | | 3843-3954 |
| | | | | | 5309-5977 |
| | | | | | 6011-6310 |
| | | | | | 6648-6833 |
| HOUCA21 | 256 | 655359 | AC068588 | 1446 | 1-489 |
| HOUCA21 | 256 | 655359 | AC036207 | 1447 | 1-284 |
| HOUCA21 | 256 | 655359 | AC036207 | 1448 | 1-186 |
| HOUDE92 | 257 | 580866 | AC005865 | 1449 | 1-173 |
| | | | | | 553-629 |
| | | | | | 1941-2042 |
| | | | | | 2757-2891 |
| | | | | | 3294-3378 |
| | | | | | 4606-5498 |
| | | | | | 5550-8125 |
| HOVBD85 | 261 | 827362 | AC026132 | 1450 | 1-1111 |
| HOVBD85 | 261 | 827362 | AC026132 | 1451 | 1-315 |
| HPCAL26 | 262 | 762822 | AP000654 | 1452 | 1-4150 |
| HPEBA84 | 263 | 753957 | AL357372 | 1453 | 1-1238 |
| HPEBA84 | 263 | 753957 | AL161799 | 1454 | 1-1112 |
| HPEBA84 | 263 | 753957 | AL357372 | 1455 | 1-294 |
| HPEBA84 | 263 | 753957 | AL357372 | 1456 | 1-140 |
| HPEBA84 | 263 | 753957 | AL161799 | 1457 | 1-294 |
| HPFCI36 | 265 | 855966 | AL161652 | 1458 | 1-174 |
| | | | | | 313-4710 |
| HPJBU43 | 266 | 862058 | AC009285 | 1459 | 1-336 |
| | | | | | 1048-1292 |
| | | | | | 2890-3083 |
| | | | | | 3358-3823 |
| | | | | | 3853-4133 |
| | | | | | 4626-5204 |
| HPMBX22 | 267 | 702012 | AP002360 | 1460 | 1-3049 |
| HPMBX22 | 267 | 702012 | AC015480 | 1461 | 1-1153 |
| HPMBX22 | 267 | 702012 | AC022183 | 1462 | 1-3048 |
| HPMBX22 | 267 | 702012 | AP002000 | 1463 | 1-3043 |
| HPMCJ84 | 268 | 562779 | AC006512 | 1464 | 1-658 |
| | | | | | 3090-3543 |
| | | | | | 4479-5105 |
| | | | | | 5885-6846 |
| | | | | | 7103-9707 |
| | | | | | 9914-10293 |
| | | | | | 11523-12034 |
| | | | | | 12067-12181 |
| | | | | | 13769-14031 |
| | | | | | 14199-14291 |
| | | | | | 14584-14790 |
| | | | | | 15123-15154 |
| | | | | | 17039-17482 |
| | | | | | 17539-17987 |
| | | | | | 18697-19052 |
| | | | | | 19112-19380 |
| | | | | | 20023-20268 |
| | | | | | 21158-21598 |
| | | | | | 21817-22221 |
| | | | | | 23565-23665 |
| | | | | | 23906-24076 |
| | | | | | 24981-25506 |
| | | | | | 25510-25861 |
| | | | | | 25981-26645 |
| | | | | | 26661-27449 |
| | | | | | 27717-27812 |
| | | | | | 27991-28024 |
| | | | | | 28437-28888 |
| | | | | | 29651-33442 |
| | | | | | 33621-34089 |
| | | | | | 34245-34808 |
| | | | | | 34819-35284 |
| | | | | | 35854-35960 |
| | | | | | 38525-38771 |
| HPMCJ84 | 268 | 562779 | AC017104 | 1465 | 1-779 |
| HPMCJ84 | 268 | 562779 | AC006512 | 1466 | 1-315 |
| | | | | | 439-531 |
| | | | | | 707-1080 |
| | | | | | 1144-1227 |
| | | | | | 1491-1845 |
| | | | | | 2113-2321 |
| | | | | | 2700-3556 |
| | | | | | 3818-4307 |
| | | | | | 4336-4813 |
| | | | | | 4958-5775 |
| HPMCJ84 | 268 | 562779 | AC006512 | 1467 | 1-738 |
| HPMCJ84 | 268 | 562779 | AC017104 | 1468 | 1-587 |
| HPMCJ84 | 268 | 562779 | AC017104 | 1469 | 1-753 |
| HPMCV30 | 269 | 612870 | AC006512 | 1470 | 1-658 |
| | | | | | 3090-3543 |
| | | | | | 4479-5105 |
| | | | | | 5885-6846 |
| | | | | | 7103-9707 |
| | | | | | 9914-10293 |
| | | | | | 11523-12034 |
| | | | | | 12067-12181 |
| | | | | | 13769-14031 |
| | | | | | 14199-14291 |
| | | | | | 14584-14790 |
| | | | | | 15123-15154 |
| | | | | | 17039-17482 |
| | | | | | 17539-17987 |
| | | | | | 18697-19052 |
| | | | | | 19112-19380 |
| | | | | | 20023-20268 |
| | | | | | 21158-21598 |
| | | | | | 21817-22221 |
| | | | | | 23565-23665 |
| | | | | | 23906-24076 |
| | | | | | 24981-25506 |
| | | | | | 25510-25861 |
| | | | | | 25981-26645 |
| | | | | | 26661-27449 |
| | | | | | 27717-27812 |
| | | | | | 27991-28024 |
| | | | | | 28437-28888 |
| | | | | | 29651-33442 |
| | | | | | 33621-34089 |
| | | | | | 34245-34808 |
| | | | | | 34819-35284 |
| | | | | | 35854-35960 |
| | | | | | 38525-38771 |
| HPMCV30 | 269 | 612870 | AC005517 | 1471 | 1-945 |
| HPMCV30 | 269 | 612870 | AC006512 | 1472 | 1-315 |
| | | | | | 439-531 |
| | | | | | 707-1080 |
| | | | | | 1144-1227 |
| | | | | | 1491-1845 |
| | | | | | 2113-2321 |
| | | | | | 2700-3556 |
| | | | | | 3818-4307 |
| | | | | | 4336-4813 |
| | | | | | 4958-5775 |
| HPMCV30 | 269 | 612870 | AC006512 | 1473 | 1-738 |
| HPMCV30 | 269 | 612870 | AC005517 | 1474 | 1-352 |
| HPMCV30 | 269 | 612870 | AC005517 | 1475 | 1-177 |
| HPMFH77 | 270 | 702014 | AL357792 | 1476 | 1-78 |
| | | | | | 1506-1910 |
| | | | | | 2138-2352 |
| | | | | | 3564-3655 |
| | | | | | 3894-3990 |
| | | | | | 4679-4802 |
| | | | | | 6730-6826 |
| | | | | | 7263-7346 |
| | | | | | 7463-7531 |
| | | | | | 8845-8944 |
| | | | | | 9220-9407 |
| | | | | | 11682-11793 |
| | | | | | 12453-13057 |
| | | | | | 13114-13869 |
| | | | | | 13880-14347 |
| | | | | | 14370-17543 |
| | | | | | 17664-20113 |
| HPMFH77 | 270 | 702014 | AC012043 | 1477 | 1-78 |
| | | | | | 1506-1910 |
| | | | | | 2138-2352 |
| | | | | | 3564-3655 |
| | | | | | 3894-3990 |
| | | | | | 4679-4802 |
| | | | | | 6730-6826 |
| | | | | | 7263-7346 |
| | | | | | 7463-7531 |
| | | | | | 8845-8944 |
| | | | | | 9220-9407 |
| | | | | | 11682-11793 |
| | | | | | 12453-13057 |
| | | | | | 13114-13869 |
| | | | | | 13880-14347 |
| | | | | | 14370-17540 |
| | | | | | 17661-20110 |
| HPMFH77 | 270 | 702014 | AL357792 | 1478 | 1-423 |
| HPMFH77 | 270 | 702014 | AL357792 | 1479 | 1-974 |
| HPMFH77 | 270 | 702014 | AC012043 | 1480 | 1-974 |
| HPMFH77 | 270 | 702014 | AC012043 | 1481 | 1-423 |
| HPWBA29 | 273 | 561956 | AL160011 | 1482 | 1-318 |
| HPWBA29 | 273 | 561956 | AL160011 | 1483 | 1-568 |
| | | | | | 736-1212 |
| HPWDK06 | 274 | 839825 | AC009469 | 1484 | 1-4685 |
| HRADA42 | 275 | 827302 | AC011890 | 1485 | 1-943 |
| | | | | | 1079-1636 |
| | | | | | 2154-2473 |
| | | | | | 3555-4008 |
| | | | | | 4292-4439 |
| | | | | | 6963-7154 |
| | | | | | 8254-8537 |
| | | | | | 8592-8985 |
| HRADA42 | 275 | 827302 | AC011890 | 1486 | 1-478 |
| HRADF49 | 276 | 866481 | AC068946 | 1487 | 1-142 |
| | | | | | 359-1108 |
| | | | | | 1191-1345 |
| | | | | | 1445-2140 |
| | | | | | 2314-2935 |
| | | | | | 3040-3156 |
| | | | | | 3395-4126 |
| | | | | | 4311-4460 |
| | | | | | 4749-5820 |
| HRADF49 | 276 | 866481 | AC060820 | 1488 | 1-142 |
| | | | | | 359-1109 |
| | | | | | 1193-1348 |
| | | | | | 1448-2142 |
| | | | | | 2318-2944 |
| | | | | | 3056-3166 |
| | | | | | 3405-4136 |
| | | | | | 4321-4472 |
| | | | | | 4762-5836 |
| HRADF49 | 276 | 866481 | AC068946 | 1489 | 1-812 |
| | | | | | 1124-1263 |
| | | | | | 1281-2283 |
| | | | | | 2470-2572 |
| | | | | | 2752-2935 |
| | | | | | 3851-3974 |
| | | | | | 4153-4548 |
| | | | | | 4602-4810 |
| | | | | | 4980-5111 |
| | | | | | 5262-5346 |
| | | | | | 5434-5498 |
| | | | | | 5609-5695 |
| | | | | | 5871-5930 |
| | | | | | 6448-6487 |
| HRADF49 | 276 | 866481 | AC060820 | 1490 | 1-686 |
| HRDAI17 | 279 | 560720 | AL139385 | 1491 | 1-99 |
| HRDAI17 | 279 | 560720 | AC008439 | 1492 | 1-125 |
| HRDAI17 | 279 | 560720 | AC034240 | 1493 | 1-141 |
| HRDAI17 | 279 | 560720 | AC015884 | 1494 | 1-207 |
| HRDAI17 | 279 | 560720 | AC008690 | 1495 | 1-164 |
| HRDAI17 | 279 | 560720 | AC022032 | 1496 | 1-146 |
| HRDAI17 | 279 | 560720 | AC027802 | 1497 | 1-117 |
| HRDAI17 | 279 | 560720 | AC060763 | 1498 | 1-129 |
| HRDAI17 | 279 | 560720 | AC073842 | 1499 | 1-165 |
| HRDAI17 | 279 | 560720 | AC023018 | 1500 | 1-145 |
| HRDAI17 | 279 | 560720 | AC021163 | 1501 | 1-97 |
| | | | | | 402-2108 |
| | | | | | 2292-2943 |
| | | | | | 2997-3408 |
| | | | | | 3423-3481 |
| | | | | | 3551-4145 |
| | | | | | 4557-5026 |
| | | | | | 5029-6260 |
| | | | | | 6276-6930 |
| | | | | | 6936-7000 |
| HRDAI17 | 279 | 560720 | AC068013 | 1502 | 1-125 |
| HRDAI17 | 279 | 560720 | AC023398 | 1503 | 1-134 |
| HRDAI17 | 279 | 560720 | AC015884 | 1504 | 1-131 |
| HRDDQ39 | 280 | 840405 | AC009152 | 1505 | 1-755 |
| HRDER22 | 281 | 688056 | AC021153 | 1506 | 1-554 |
| HRDER22 | 281 | 688056 | AC021153 | 1507 | 1-205 |
| HRDFK37 | 282 | 840381 | AL360017 | 1508 | 1-1274 |
| HRGBD54 | 283 | 828436 | AC005035 | 1509 | 1-461 |
| | | | | | 901-1370 |
| | | | | | 3120-3210 |
| | | | | | 3798-3995 |
| | | | | | 4091-4598 |
| | | | | | 4951-5116 |
| | | | | | 5461-6076 |
| | | | | | 6372-6510 |
| | | | | | 7952-8044 |
| | | | | | 8598-8734 |
| | | | | | 9056-9175 |
| | | | | | 10553-10707 |
| | | | | | 11338-12166 |
| | | | | | 13462-15335 |
| | | | | | 15383-15814 |
| | | | | | 17772-17892 |
| | | | | | 18209-18381 |
| | | | | | 20452-20838 |
| | | | | | 21115-21278 |
| | | | | | 21599-22149 |
| | | | | | 22202-23346 |
| | | | | | 26511-26928 |
| | | | | | 27540-27948 |
| | | | | | 29312-29415 |
| | | | | | 29610-30069 |
| | | | | | 30613-31175 |
| | | | | | 31214-31389 |
| | | | | | 31904-32065 |
| | | | | | 32911-33076 |
| | | | | | 35162-38818 |
| | | | | | 39310-39567 |
| HRGBD54 | 283 | 828436 | AC005035 | 1510 | 1-654 |
| HRGBD54 | 283 | 828436 | AC005035 | 1511 | 1-511 |
| HSAVA08 | 284 | 580870 | AC009030 | 1512 | 1-1052 |
| HSAVA08 | 284 | 580870 | AC009030 | 1513 | 1-431 |
| HSAWZ40 | 286 | 634000 | AC024249 | 1514 | 1-1532 |
| HSAWZ40 | 286 | 634000 | AC024249 | 1515 | 1-409 |
| HSAWZ40 | 286 | 634000 | AC024249 | 1516 | 1-319 |
| HSHAX04 | 288 | 812178 | AL049824 | 1517 | 1-110 |
| | | | | | 1211-1257 |
| | | | | | 1740-1878 |
| | | | | | 3062-3144 |
| | | | | | 3668-3772 |
| | | | | | 4775-5175 |
| | | | | | 5220-5345 |
| | | | | | 7001-7384 |
| | | | | | 8361-8657 |
| | | | | | 8747-8937 |
| | | | | | 9876-9980 |
| | | | | | 12753-12901 |
| | | | | | 13131-13891 |
| | | | | | 14272-14726 |
| | | | | | 14851-16619 |
| | | | | | 16683-17910 |
| | | | | | 18078-18367 |
| HSHAX04 | 288 | 812178 | AL354888 | 1518 | 1-47 |
| | | | | | 1277-1376 |
| | | | | | 2477-2523 |
| | | | | | 3006-3144 |
| | | | | | 4326-4408 |
| | | | | | 4932-5036 |
| | | | | | 6039-6439 |
| | | | | | 6484-6609 |
| | | | | | 8265-8648 |
| | | | | | 9625-9921 |
| | | | | | 10011-10216 |
| | | | | | 11141-11245 |
| | | | | | 14019-14167 |
| | | | | | 14397-15157 |
| | | | | | 15538-15992 |
| | | | | | 16117-17885 |
| | | | | | 17949-19176 |
| | | | | | 19344-19633 |
| HSHAX04 | 288 | 812178 | AL354888 | 1519 | 1-314 |
| HSHAX04 | 288 | 812178 | AL354888 | 1520 | 1-599 |
| HSHBF76 | 289 | 715838 | AC009000 | 1521 | 1-479 |
| | | | | | 1244-1408 |
| | | | | | 1653-1763 |
| | | | | | 1845-1991 |
| | | | | | 2826-3064 |
| | | | | | 3330-3422 |
| | | | | | 3438-3788 |
| HSHBF76 | 289 | 715838 | AC009000 | 1522 | 1-128 |
| HSHBF76 | 289 | 715838 | AC009000 | 1523 | 1-36 |
| | | | | | 1068-1329 |
| | | | | | 1498-2123 |
| | | | | | 3160-3211 |
| HSKDR27 | 290 | 580874 | AC008742 | 1524 | 1-50 |
| | | | | | 1016-1321 |
| | | | | | 1979-2220 |
| | | | | | 2313-3310 |
| HSKDR27 | 290 | 580874 | AC008742 | 1525 | 1-495 |
| HSLHG78 | 291 | 846148 | AL157824 | 1526 | 1-33 |
| | | | | | 5109-7241 |
| | | | | | 7282-11311 |
| HSLHG78 | 291 | 846148 | AC012151 | 1527 | 1-68 |
| | | | | | 2079-2213 |
| | | | | | 2879-2965 |
| | | | | | 3114-3257 |
| | | | | | 4198-4337 |
| | | | | | 6080-6204 |
| | | | | | 8566-8644 |
| | | | | | 13691-19866 |
| HSLHX15 | 292 | 777861 | AC072032 | 1528 | 1-364 |
| HSLHX15 | 292 | 777861 | AC002518 | 1529 | 1-247 |
| HSLHX15 | 292 | 777861 | AC022305 | 1530 | 1-686 |
| HSLHX15 | 292 | 777861 | AC078916 | 1531 | 1-364 |
| HSLHX15 | 292 | 777861 | AC072032 | 1532 | 1-288 |
| HSLHX15 | 292 | 777861 | AC078916 | 1533 | 1-288 |
| HSNAP85 | 293 | 784054 | AC007541 | 1534 | 1-94 |
| | | | | | 2363-2658 |
| | | | | | 3490-3979 |
| | | | | | 4019-7173 |
| HSOAH16 | 295 | 827058 | AC005046 | 1535 | 1-157 |
| | | | | | 1370-1522 |
| | | | | | 1727-1861 |
| | | | | | 2415-2630 |
| | | | | | 3229-3373 |
| | | | | | 3584-3817 |
| | | | | | 6852-7006 |
| | | | | | 7432-7608 |
| | | | | | 9282-9534 |
| | | | | | 10097-10628 |
| | | | | | 10841-11055 |
| | | | | | 11740-11963 |
| | | | | | 13041-13323 |
| | | | | | 13451-13850 |
| | | | | | 14382-15096 |
| | | | | | 16075-16749 |
| | | | | | 18154-18346 |
| | | | | | 18531-18857 |
| | | | | | 19624-20680 |
| | | | | | 20738-21207 |
| | | | | | 22021-22555 |
| | | | | | 22673-23076 |
| | | | | | 25746-25974 |
| | | | | | 26932-27715 |
| | | | | | 27740-30183 |
| | | | | | 30458-30899 |
| | | | | | 31160-32000 |
| | | | | | 32177-32662 |
| | | | | | 33181-33425 |
| | | | | | 33436-33652 |
| | | | | | 33857-34003 |
| | | | | | 34289-34464 |
| | | | | | 34518-34738 |
| | | | | | 36446-37141 |
| | | | | | 37163-38834 |
| | | | | | 38961-39339 |
| HSOAH16 | 295 | 827058 | AC005046 | 1536 | 1-136 |
| HSQBF66 | 296 | 560726 | AC011878 | 1537 | 1-117 |
| | | | | | 4124-5072 |
| | | | | | 5221-5252 |
| HSRBE06 | 298 | 871264 | AP000330 | 1538 | 1-1628 |
| HSRBE06 | 298 | 871264 | AP000330 | 1539 | 1-526 |
| HSRFD18 | 299 | 840771 | AL096819 | 1540 | 1-3975 |
| HSRFD18 | 299 | 840771 | AL096819 | 1541 | 1-304 |
| HSSEA64 | 301 | 853395 | AC005865 | 1542 | 1-173 |
| | | | | | 553-629 |
| | | | | | 1941-2042 |
| | | | | | 2757-2891 |
| | | | | | 3294-3378 |
| | | | | | 4606-5498 |
| | | | | | 5550-8125 |
| HSSEF77 | 302 | 658725 | AC005041 | 1543 | 1-68 |
| | | | | | 87-493 |
| | | | | | 711-838 |
| | | | | | 997-1167 |
| | | | | | 2227-2960 |
| | | | | | 3326-4641 |
| | | | | | 4768-5786 |
| HSSEF77 | 302 | 658725 | AC005041 | 1544 | 1-2920 |
| | | | | | 3439-3667 |
| | | | | | 3839-4332 |
| HSSEF77 | 302 | 658725 | AC005041 | 1545 | 1-143 |
| HSSGJ58 | 304 | 747714 | AL355491 | 1546 | 1-1936 |
| HSSGJ58 | 304 | 747714 | AL356112 | 1547 | 1-1936 |
| HSSGJ58 | 304 | 747714 | AL354665 | 1548 | 1-1932 |
| HSYBI06 | 307 | 740766 | AL049795 | 1549 | 1-135 |
| | | | | | 2267-2358 |
| | | | | | 2759-2859 |
| | | | | | 3659-3775 |
| | | | | | 4814-4946 |
| | | | | | 5270-5730 |
| | | | | | 6026-6474 |
| | | | | | 6782-7341 |
| | | | | | 7359-7475 |
| | | | | | 7777-7939 |
| | | | | | 8137-8247 |
| | | | | | 8262-8548 |
| | | | | | 8649-8729 |
| | | | | | 9467-10551 |
| | | | | | 10640-10701 |
| | | | | | 11022-11356 |
| | | | | | 11406-11450 |
| | | | | | 11517-11645 |
| | | | | | 12002-12057 |
| | | | | | 12580-12713 |
| | | | | | 14863-15041 |
| | | | | | 15151-15479 |
| | | | | | 16120-21982 |
| HSYBI06 | 307 | 740766 | AL049795 | 1550 | 1-98 |
| HSYBI06 | 307 | 740766 | AL049795 | 1551 | 1-110 |
| HT3BF49 | 308 | 838620 | AL355304 | 1552 | 1-2144 |
| HT3BF49 | 308 | 838620 | AL355307 | 1553 | 1-2144 |
| HT3BF49 | 308 | 838620 | AL355304 | 1554 | 1-517 |
| HT3BF49 | 308 | 838620 | AL355307 | 1555 | 1-517 |
| HTEDF18 | 313 | 635528 | AC018573 | 1556 | 1-55 |
| | | | | | 956-1695 |
| HTEDF18 | 313 | 635528 | AL162613 | 1557 | 1-55 |
| | | | | | 956-1695 |
| HTEDF18 | 313 | 635528 | AC018573 | 1558 | 1-114 |
| HTEDF18 | 313 | 635528 | AL162613 | 1559 | 1-114 |
| HTEDF18 | 313 | 635528 | AL162613 | 1560 | 1-115 |
| HTEDJ28 | 314 | 762845 | AC025974 | 1561 | 1-2357 |
| HTEDJ28 | 314 | 762845 | AC013370 | 1562 | 1-2357 |
| HTEGS11 | 317 | 862066 | AC018762 | 1563 | 1-2894 |
| HTEHU59 | 318 | 840385 | AP001003 | 1564 | 1-3207 |
| HTEHU59 | 318 | 840385 | AP001557 | 1565 | 1-3206 |
| HTEHU59 | 318 | 840385 | AP001156 | 1566 | 1-3207 |
| HTEHU59 | 318 | 840385 | AP001003 | 1567 | 1-863 |
| HTEHU59 | 318 | 840385 | AP001003 | 1568 | 1-1399 |
| | | | | | 1504-1948 |
| | | | | | 1956-2672 |
| | | | | | 2761-2905 |
| | | | | | 3007-3135 |
| | | | | | 3290-3445 |
| | | | | | 3537-3653 |
| | | | | | 3746-3913 |
| | | | | | 4010-4131 |
| | | | | | 4251-4428 |
| HTEHU59 | 318 | 840385 | AP001557 | 1569 | 1-863 |
| HTEHU59 | 318 | 840385 | AP001557 | 1570 | 1-1395 |
| | | | | | 1500-1944 |
| | | | | | 1952-2667 |
| | | | | | 2757-2900 |
| | | | | | 3002-3130 |
| | | | | | 3285-3439 |
| HTEHU59 | 318 | 840385 | AP001156 | 1571 | 1-1396 |
| | | | | | 1502-1945 |
| | | | | | 1953-2668 |
| HTEHU59 | 318 | 840385 | AP001156 | 1572 | 1-863 |
| HTLAP64 | 322 | 603913 | AC004556 | 1573 | 1-1668 |
| | | | | | 2186-3003 |
| | | | | | 3754-4253 |
| | | | | | 4400-4483 |
| | | | | | 5365-5868 |
| | | | | | 8438-8508 |
| | | | | | 8913-9031 |
| | | | | | 9113-9151 |
| HTLAP64 | 322 | 603913 | AC051649 | 1574 | 1-1669 |
| | | | | | 2187-3004 |
| | | | | | 3755-4254 |
| | | | | | 4401-4484 |
| | | | | | 5367-5870 |
| | | | | | 8558-8628 |
| | | | | | 9033-9151 |
| | | | | | 9233-9273 |
| HTLBT80 | 323 | 840045 | AL133227 | 1575 | 1-51 |
| | | | | | 476-521 |
| | | | | | 842-1226 |
| | | | | | 1375-1490 |
| | | | | | 3745-4016 |
| | | | | | 4046-4229 |
| | | | | | 4430-4855 |
| | | | | | 5300-6053 |
| | | | | | 6598-6883 |
| | | | | | 7406-7446 |
| | | | | | 7461-8437 |
| | | | | | 8550-8681 |
| | | | | | 8888-8919 |
| | | | | | 8943-9353 |
| | | | | | 9458-9544 |
| | | | | | 9834-10607 |
| | | | | | 11550-11629 |
| | | | | | 12196-12374 |
| | | | | | 13532-14886 |
| HTLBT80 | 323 | 840045 | AL133227 | 1576 | 1-32 |
| | | | | | 712-1071 |
| | | | | | 3453-3870 |
| | | | | | 4197-4326 |
| | | | | | 4639-4751 |
| | | | | | 5131-5202 |
| | | | | | 5588-5638 |
| | | | | | 7454-8108 |
| | | | | | 8670-8767 |
| | | | | | 9511-9692 |
| | | | | | 9754-10134 |
| | | | | | 11109-11226 |
| | | | | | 12456-12607 |
| | | | | | 15237-15316 |
| | | | | | 18143-18311 |
| | | | | | 18429-18478 |
| | | | | | 20682-20982 |
| | | | | | 20988-21295 |
| | | | | | 22686-23061 |
| | | | | | 23358-23495 |
| | | | | | 24076-24612 |
| | | | | | 25196-25334 |
| | | | | | 26760-26926 |
| | | | | | 27041-27152 |
| | | | | | 27271-27379 |
| | | | | | 27697-28289 |
| | | | | | 29024-29340 |
| | | | | | 29761-29840 |
| | | | | | 31168-32681 |
| HTLDA84 | 324 | 686397 | AC013252 | 1577 | 1-193 |
| | | | | | 1090-1263 |
| | | | | | 2131-2278 |
| | | | | | 2342-2772 |
| | | | | | 3175-3278 |
| | | | | | 3880-4063 |
| | | | | | 5308-5664 |
| | | | | | 6255-6390 |
| | | | | | 6546-6710 |
| | | | | | 8111-8419 |
| | | | | | 8911-9048 |
| | | | | | 9056-9151 |
| | | | | | 9349-9871 |
| | | | | | 10386-10510 |
| | | | | | 10884-11035 |
| | | | | | 11336-11428 |
| | | | | | 12106-12228 |
| | | | | | 13268-14698 |
| HTLDA84 | 324 | 686397 | AC013252 | 1578 | 1-355 |
| HTLDU78 | 326 | 637702 | AC011444 | 1579 | 1-1305 |
| HTLDU78 | 326 | 637702 | AC011444 | 1580 | 1-285 |
| HTLDU78 | 326 | 637702 | AC011444 | 1581 | 1-274 |
| HTLEC82 | 327 | 811992 | AC019337 | 1582 | 1-1139 |
| | | | | | 1384-1619 |
| | | | | | 3675-3800 |
| | | | | | 5094-5426 |
| | | | | | 5777-6057 |
| | | | | | 6169-8159 |
| HTLEC82 | 327 | 811992 | AC025769 | 1583 | 1-1141 |
| | | | | | 1386-1621 |
| | | | | | 3679-3804 |
| | | | | | 5102-5434 |
| | | | | | 5785-6065 |
| | | | | | 6177-8168 |
| | | | | | 8171-9355 |
| | | | | | 9390-9624 |
| | | | | | 9657-10390 |
| | | | | | 11962-12241 |
| | | | | | 12874-13031 |
| | | | | | 13270-13327 |
| HTLEC82 | 327 | 811992 | AC008537 | 1584 | 1-1141 |
| | | | | | 1385-1620 |
| | | | | | 3677-3802 |
| | | | | | 5098-5430 |
| | | | | | 5781-6061 |
| | | | | | 6173-8165 |
| HTLEC82 | 327 | 811992 | AC019337 | 1585 | 1-1182 |
| HTLEC82 | 327 | 811992 | AC008537 | 1586 | 1-1186 |
| HTLEV48 | 329 | 723799 | AL079300 | 1587 | 1-833 |
| | | | | | 1783-2055 |
| | | | | | 2908-3362 |
| | | | | | 3583-4048 |
| HTLEV48 | 329 | 723799 | AL079300 | 1588 | 1-163 |
| HTNAM63 | 331 | 566880 | AL160261 | 1589 | 1-498 |
| | | | | | 786-1786 |
| HTNAM63 | 331 | 566880 | AL160261 | 1590 | 1-141 |
| HTOAI50 | 333 | 638623 | AC040933 | 1591 | 1-1413 |
| HTOAI50 | 333 | 638623 | AC025531 | 1592 | 1-1411 |
| HTOAI50 | 333 | 638623 | AC040933 | 1593 | 1-498 |
| HTOAI50 | 333 | 638623 | AC025531 | 1594 | 1-498 |
| HTOAM11 | 334 | 664508 | AC002369 | 1595 | 1-586 |
| | | | | | 2559-2651 |
| | | | | | 3329-3426 |
| | | | | | 3756-5088 |
| HTOAM11 | 334 | 664508 | AP001486 | 1596 | 1-1191 |
| HTOAM11 | 334 | 664508 | AP000875 | 1597 | 1-1192 |
| HTOAM11 | 334 | 664508 | AC002369 | 1598 | 1-228 |
| HTOAM11 | 334 | 664508 | AP001486 | 1599 | 1-711 |
| HTOAM11 | 334 | 664508 | AP001486 | 1600 | 1-374 |
| HTOAM11 | 334 | 664508 | AP000875 | 1601 | 1-710 |
| HTODH57 | 335 | 823126 | AL136531 | 1602 | 1-1646 |
| HTODH57 | 335 | 823126 | AL136531 | 1603 | 1-510 |
| HTODH83 | 336 | 580884 | AC012046 | 1604 | 1-1972 |
| HTODH83 | 336 | 580884 | AC012046 | 1605 | 1-105 |
| HTOGR38 | 339 | 824639 | AL359923 | 1606 | 1-949 |
| HTOGR38 | 339 | 824639 | AL359923 | 1607 | 1-311 |
| | | | | | 1036-1359 |
| HTOGR38 | 339 | 824639 | AL359923 | 1608 | 1-294 |
| HTSFJ32 | 342 | 637720 | AC015734 | 1609 | 1-80 |
| | | | | | 562-915 |
| | | | | | 925-4400 |
| HTSFJ32 | 342 | 637720 | AC015734 | 1610 | 1-463 |
| HTSFJ32 | 342 | 637720 | AC015734 | 1611 | 1-359 |
| HTTEE41 | 344 | 840950 | AC018921 | 1612 | 1-92 |
| | | | | | 318-578 |
| | | | | | 837-912 |
| | | | | | 1091-1249 |
| | | | | | 1321-1387 |
| | | | | | 1862-2192 |
| | | | | | 2485-2579 |
| | | | | | 2708-2831 |
| | | | | | 3685-4257 |
| | | | | | 4547-5127 |
| | | | | | 5811-6037 |
| | | | | | 6562-7076 |
| | | | | | 7541-7678 |
| | | | | | 8069-8191 |
| | | | | | 10100-10207 |
| | | | | | 11102-11688 |
| | | | | | 11721-11847 |
| | | | | | 12201-12335 |
| | | | | | 12532-12641 |
| | | | | | 12888-12991 |
| | | | | | 13027-13546 |
| | | | | | 13637-16146 |
| HTTEE41 | 344 | 840950 | AC018921 | 1613 | 1-100 |
| HTXDB22 | 346 | 853407 | AL031775 | 1614 | 1-701 |
| | | | | | 1446-1660 |
| | | | | | 2327-5963 |
| | | | | | 5998-6343 |
| | | | | | 6348-9247 |
| | | | | | 9973-10269 |
| | | | | | 11408-11597 |
| HTXDB22 | 346 | 853407 | AL133264 | 1615 | 1-590 |
| | | | | | 628-1412 |
| | | | | | 3625-3805 |
| | | | | | 5513-5637 |
| | | | | | 6165-6792 |
| | | | | | 7435-7538 |
| | | | | | 7644-8370 |
| | | | | | 8448-8734 |
| | | | | | 8778-8979 |
| | | | | | 9234-10123 |
| | | | | | 10477-11177 |
| | | | | | 11922-12136 |
| | | | | | 12803-16439 |
| | | | | | 16474-16819 |
| | | | | | 16824-19723 |
| | | | | | 20445-20744 |
| | | | | | 21884-22073 |
| HTXDB22 | 346 | 853407 | AL031775 | 1616 | 1-202 |
| | | | | | 457-1346 |
| HTXDC38 | 347 | 801935 | AC040160 | 1617 | 1-122 |
| | | | | | 511-831 |
| | | | | | 1253-1314 |
| | | | | | 1392-1780 |
| | | | | | 1873-2177 |
| HTXDC38 | 347 | 801935 | AC008594 | 1618 | 1-122 |
| | | | | | 511-831 |
| | | | | | 1253-1314 |
| | | | | | 1392-1780 |
| | | | | | 1873-2177 |
| HTXDC38 | 347 | 801935 | AC040160 | 1619 | 1-1122 |
| | | | | | 1212-2163 |
| | | | | | 2234-2809 |
| | | | | | 2849-3163 |
| | | | | | 4270-5496 |
| | | | | | 5517-6166 |
| | | | | | 7170-7347 |
| | | | | | 7580-7727 |
| | | | | | 7852-7997 |
| | | | | | 8090-8180 |
| | | | | | 8268-8382 |
| | | | | | 8648-8742 |
| | | | | | 8815-8925 |
| HTXDC38 | 347 | 801935 | AC008594 | 1620 | 1-1122 |
| | | | | | 1212-2163 |
| | | | | | 2234-2809 |
| | | | | | 2851-3145 |
| | | | | | 4270-5497 |
| | | | | | 5518-6167 |
| | | | | | 7169-7346 |
| | | | | | 7579-7726 |
| | | | | | 7851-7996 |
| | | | | | 8089-8179 |
| | | | | | 8267-8381 |
| | | | | | 8647-8741 |
| | | | | | 8814-8924 |
| HTXDC77 | 348 | 844258 | AC004182 | 1621 | 1-2744 |
| | | | | | 2917-3357 |
| HTXDC77 | 348 | 844258 | AC018433 | 1622 | 1-2744 |
| | | | | | 2917-3357 |
| HTXDD61 | 349 | 853408 | AC024267 | 1623 | 1-1098 |
| HTXDD61 | 349 | 853408 | AC024267 | 1624 | 1-255 |
| HTXET11 | 351 | 581521 | AC011802 | 1625 | 1-984 |
| HTXET11 | 351 | 581521 | AC025414 | 1626 | 1-984 |
| HTXET11 | 351 | 581521 | AC011802 | 1627 | 1-36 |
| | | | | | 836-964 |
| | | | | | 4059-5438 |
| | | | | | 6005-6176 |
| | | | | | 6789-7120 |
| | | | | | 7124-7588 |
| | | | | | 7735-7827 |
| | | | | | 7925-8770 |
| | | | | | 9057-9545 |
| HTXET11 | 351 | 581521 | AC025414 | 1628 | 1-36 |
| | | | | | 836-964 |
| | | | | | 4059-5438 |
| | | | | | 6002-6173 |
| | | | | | 6786-7117 |
| | | | | | 7121-7585 |
| | | | | | 7732-7809 |
| HTXJD85 | 352 | 840391 | AC078797 | 1629 | 1-1239 |
| HTXJD85 | 352 | 840391 | AC078797 | 1630 | 1-2296 |
| | | | | | 2428-2719 |
| HTXJD85 | 352 | 840391 | AC078797 | 1631 | 1-224 |
| HTXJY08 | 353 | 637774 | AC005962 | 1632 | 1-2075 |
| HTXJY08 | 353 | 637774 | AC004757 | 1633 | 1-2075 |
| HTXJY08 | 353 | 637774 | AC005962 | 1634 | 1-478 |
| HTXJY08 | 353 | 637774 | AC005962 | 1635 | 1-1011 |
| HTXJY08 | 353 | 637774 | AC004757 | 1636 | 1-478 |
| HTXJY08 | 353 | 637774 | AC004757 | 1637 | 1-1011 |
| HUFCL31 | 355 | 801938 | AC012255 | 1638 | 1-417 |
| | | | | | 834-1753 |
| | | | | | 1788-1918 |
| | | | | | 2176-2628 |
| | | | | | 2755-2971 |
| | | | | | 3036-5033 |
| HUFCL31 | 355 | 801938 | AC012255 | 1639 | 1-134 |
| HUSCJ14 | 358 | 894699 | AC007040 | 1640 | 1-149 |
| | | | | | 394-889 |
| | | | | | 1061-1139 |
| | | | | | 2097-2249 |
| | | | | | 2852-3007 |
| | | | | | 5021-5089 |
| | | | | | 5217-5919 |
| | | | | | 6119-8896 |
| HUSCJ14 | 358 | 894699 | AC007040 | 1641 | 1-854 |
| HUSCJ14 | 358 | 894699 | AC007040 | 1642 | 1-397 |
| HUSGU40 | 360 | 684975 | AC072032 | 1643 | 1-364 |
| HUSGU40 | 360 | 684975 | AC022305 | 1644 | 1-686 |
| HUSGU40 | 360 | 684975 | AC078916 | 1645 | 1-364 |
| HUSGU40 | 360 | 684975 | AC072032 | 1646 | 1-288 |
| HUSGU40 | 360 | 684975 | AC078916 | 1647 | 1-288 |
| HUSIR18 | 361 | 762858 | AC068055 | 1648 | 1-149 |
| HUSIR18 | 361 | 762858 | AC022231 | 1649 | 1-151 |
| HUSIR18 | 361 | 762858 | AC010694 | 1650 | 1-202 |
| HUSIR18 | 361 | 762858 | AL160163 | 1651 | 1-258 |
| | | | | | 1798-4171 |
| HUSIR18 | 361 | 762858 | AC027300 | 1652 | 1-158 |
| HUSIR18 | 361 | 762858 | AC073047 | 1653 | 1-170 |
| HUSIR18 | 361 | 762858 | AC009524 | 1654 | 1-151 |
| HUSIR18 | 361 | 762858 | AC068055 | 1655 | 1-77 |
| HUSIR18 | 361 | 762858 | AC010694 | 1656 | 1-77 |
| HUSIR18 | 361 | 762858 | AL160163 | 1657 | 1-117 |
| HWBBQ70 | 364 | 689121 | AL031120 | 1658 | 1-1940 |
| HWBBQ70 | 364 | 689121 | AL137003 | 1659 | 1-292 |
| HWBBQ70 | 364 | 689121 | AL031120 | 1660 | 1-689 |
| HWBBQ70 | 364 | 689121 | AL031120 | 1661 | 1-102 |
| HWBBQ70 | 364 | 689121 | AL137003 | 1662 | 1-689 |
| HWBCN36 | 366 | 722259 | AL031296 | 1663 | 1-670 |
| | | | | | 1590-2584 |
| | | | | | 3609-3751 |
| | | | | | 4204-4803 |
| | | | | | 4847-5271 |
| | | | | | 9874-10146 |
| | | | | | 11847-12328 |
| | | | | | 12493-13051 |
| | | | | | 13395-13635 |
| | | | | | 15455-15917 |
| | | | | | 17288-17739 |
| | | | | | 18945-19908 |
| | | | | | 21414-22006 |
| | | | | | 27737-27823 |
| | | | | | 35955-36575 |
| | | | | | 36643-37204 |
| | | | | | 37341-37504 |
| | | | | | 39154-39312 |
| | | | | | 41736-42263 |
| | | | | | 47221-47669 |
| | | | | | 47712-48167 |
| | | | | | 50898-51095 |
| | | | | | 51163-51655 |
| | | | | | 51716-52580 |
| | | | | | 52706-58181 |
| HWBCN36 | 366 | 722259 | AL109757 | 1664 | 1-670 |
| | | | | | 1590-2583 |
| | | | | | 3578-3751 |
| | | | | | 4203-4802 |
| HWBCN36 | 366 | 722259 | AL031296 | 1665 | 1-274 |
| HWBCN36 | 366 | 722259 | AL109757 | 1666 | 1-425 |
| HWBDJ08 | 367 | 762860 | AL133351 | 1667 | 1-238 |
| | | | | | 2679-2860 |
| | | | | | 6204-6544 |
| | | | | | 6911-7399 |
| | | | | | 7795-7909 |
| | | | | | 8430-8914 |
| | | | | | 9187-9620 |
| | | | | | 9744-10234 |
| | | | | | 11159-11190 |
| | | | | | 11310-11737 |
| | | | | | 12408-16037 |
| HWBDJ08 | 367 | 762860 | AC013339 | 1668 | 1-238 |
| | | | | | 2699-2880 |
| | | | | | 6224-6564 |
| | | | | | 6931-7419 |
| | | | | | 7815-7929 |
| | | | | | 8449-8932 |
| | | | | | 9205-9638 |
| | | | | | 9762-10130 |
| | | | | | 10144-10309 |
| | | | | | 11380-11807 |
| | | | | | 12478-16107 |
| HWBDJ08 | 367 | 762860 | AL133351 | 1669 | 1-466 |
| HWBDJ08 | 367 | 762860 | AC013339 | 1670 | 1-466 |
| HWDAG96 | 369 | 796743 | AL121753 | 1671 | 1-77 |
| | | | | | 91-640 |
| | | | | | 2531-2639 |
| | | | | | 3380-3625 |
| | | | | | 3692-4433 |
| | | | | | 4677-4862 |
| | | | | | 5043-5355 |
| | | | | | 5532-5893 |
| | | | | | 6299-10579 |
| | | | | | 12966-13230 |
| | | | | | 14676-15242 |
| | | | | | 15749-15996 |
| | | | | | 16066-16393 |
| | | | | | 16675-17238 |
| | | | | | 17381-17885 |
| | | | | | 18029-18260 |
| | | | | | 19347-19477 |
| | | | | | 20064-20199 |
| | | | | | 20849-21010 |
| HWDAG96 | 369 | 796743 | AL356652 | 1672 | 1-77 |
| | | | | | 91-640 |
| | | | | | 2531-2639 |
| | | | | | 3380-3625 |
| | | | | | 3692-4433 |
| | | | | | 4677-4862 |
| | | | | | 5043-5355 |
| | | | | | 5532-5893 |
| | | | | | 6299-10590 |
| | | | | | 12979-13243 |
| | | | | | 14689-15255 |
| | | | | | 15762-16052 |
| | | | | | 16079-16406 |
| | | | | | 16688-17251 |
| | | | | | 17394-17898 |
| | | | | | 18042-18273 |
| | | | | | 19363-19509 |
| | | | | | 20088-20188 |
| | | | | | 20863-21024 |
| HWDAG96 | 369 | 796743 | AL121753 | 1673 | 1-437 |
| HWDAG96 | 369 | 796743 | AL121753 | 1674 | 1-638 |
| | | | | | 793-854 |
| HWDAG96 | 369 | 796743 | AL356652 | 1675 | 1-437 |
| HWDAG96 | 369 | 796743 | AL356652 | 1676 | 1-638 |
| | | | | | 793-854 |
| HWDAJ01 | 370 | 794016 | AC015551 | 1677 | 1-670 |
| HWDAJ01 | 370 | 794016 | AC019214 | 1678 | 1-670 |
| HWHPB78 | 371 | 740778 | AL157945 | 1679 | 1-300 |
| | | | | | 364-790 |
| | | | | | 1344-1519 |
| | | | | | 1584-1709 |
| | | | | | 2403-2580 |
| | | | | | 4780-4968 |
| | | | | | 5485-5559 |
| | | | | | 5960-6128 |
| | | | | | 6243-6955 |
| | | | | | 7258-7317 |
| | | | | | 9073-9145 |
| | | | | | 9404-9544 |
| | | | | | 10342-10513 |
| | | | | | 10746-11354 |
| | | | | | 12004-12578 |
| | | | | | 12863-13087 |
| | | | | | 13224-13382 |
| | | | | | 13993-14047 |
| | | | | | 14319-14444 |
| | | | | | 14753-14878 |
| | | | | | 15465-15713 |
| | | | | | 16007-16123 |
| | | | | | 17413-17740 |
| | | | | | 17817-18127 |
| | | | | | 18231-18634 |
| | | | | | 18771-18881 |
| | | | | | 19945-20231 |
| | | | | | 21024-21169 |
| | | | | | 23112-23363 |
| | | | | | 23692-24413 |
| HWHPB78 | 371 | 740778 | AC026283 | 1680 | 1-292 |
| | | | | | 353-776 |
| | | | | | 1340-1506 |
| | | | | | 1568-1696 |
| | | | | | 2408-2534 |
| | | | | | 4767-4955 |
| | | | | | 5472-5546 |
| | | | | | 5957-6293 |
| | | | | | 6373-7085 |
| | | | | | 7386-7445 |
| | | | | | 9201-9273 |
| | | | | | 9532-9672 |
| | | | | | 10470-10641 |
| | | | | | 10873-11481 |
| | | | | | 12131-12705 |
| | | | | | 12990-13214 |
| | | | | | 13351-13509 |
| | | | | | 14119-14173 |
| | | | | | 14445-14570 |
| | | | | | 14879-15004 |
| | | | | | 15604-15844 |
| | | | | | 16133-16253 |
| | | | | | 17540-17867 |
| | | | | | 17944-18254 |
| | | | | | 18356-18755 |
| | | | | | 18892-19002 |
| | | | | | 20066-20352 |
| | | | | | 21146-21308 |
| | | | | | 23235-23486 |
| | | | | | 23813-24533 |
| HWHPB78 | 371 | 740778 | AL157945 | 1681 | 1-490 |
| HWHPB78 | 371 | 740778 | AC026283 | 1682 | 1-318 |
| HWLBO67 | 372 | 834315 | AC011739 | 1683 | 1-517 |
| HWLBO67 | 372 | 834315 | AC011739 | 1684 | 1-586 |
| | | | | | 3120-3867 |
| | | | | | 4726-4866 |
| | | | | | 6044-6395 |
| | | | | | 6686-7156 |
| | | | | | 11614-12016 |
| | | | | | 18205-18501 |
| HWLBO67 | 372 | 834315 | AC011739 | 1685 | 1-202 |
| HE2CA60 | 375 | 888705 | AC005921 | 1686 | 1-74 |
| | | | | | 276-1076 |
| | | | | | 1472-2160 |
| | | | | | 3055-3389 |
| | | | | | 3769-3898 |
| | | | | | 4143-4288 |
| | | | | | 4322-4697 |
| | | | | | 4699-4772 |
| | | | | | 6745-6851 |
| | | | | | 7692-9044 |
| | | | | | 9581-9743 |
| | | | | | 13540-17646 |
| | | | | | 1-74 |
| | | | | | 276-1076 |
| | | | | | 1472-2160 |
| | | | | | 3055-3389 |
| | | | | | 3769-3898 |
| | | | | | 4143-4288 |
| | | | | | 4322-4697 |
| | | | | | 4699-4772 |
| | | | | | 6745-6851 |
| | | | | | 7692-9044 |
| | | | | | 9581-9743 |
| | | | | | 13540-17646 |
| HE2CA60 | 375 | 888705 | AC005921 | 1687 | 1-1466 |
| | | | | | 1-1466 |
| HLWAU42 | 377 | 695737 | AC010794 | 1688 | 1-3291 |
| | | | | | 1-3291 |
| HLWAU42 | 377 | 695737 | AC009985 | 1689 | 1-3291 |
| | | | | | 1-3291 |
| HLWAU42 | 377 | 695737 | AC010794 | 1690 | 1-92 |
| | | | | | 1-92 |
| HLWAU42 | 377 | 695737 | AC010794 | 1691 | 1-279 |
| | | | | | 1-279 |
| | | | | | 736-997 |
| | | | | | 736-997 |
| | | | | | 1377-1619 |
| | | | | | 1377-1619 |
| | | | | | 3065-3511 |
| | | | | | 3065-3511 |
| | | | | | 3829-7852 |
| | | | | | 3829-7852 |
| HLWAU42 | 377 | 695737 | AC009985 | 1692 | 1-279 |
| | | | | | 736-997 |
| | | | | | 1320-1633 |
| | | | | | 3065-3511 |
| | | | | | 3829-7851 |
| | | | | | 1-279 |
| | | | | | 736-997 |
| | | | | | 1320-1633 |
| | | | | | 3065-3511 |
| | | | | | 3829-7851 |
| HEQBJ01 | 380 | 876546 | AC009079 | 1693 | 1-198 |
| | | | | | 1263-1467 |
| | | | | | 2271-2369 |
| | | | | | 5035-5870 |
| | | | | | 5888-6174 |
| | | | | | 6249-6472 |
| | | | | | 7148-11343 |
| | | | | | 1-198 |
| | | | | | 1263-1467 |
| | | | | | 2271-2369 |
| | | | | | 5035-5870 |
| | | | | | 5888-6174 |
| | | | | | 6249-6472 |
| | | | | | 7148-11343 |
| HEQBJ01 | 380 | 876546 | AC009079 | 1694 | 1-173 |
| | | | | | 916-970 |
| | | | | | 1-173 |
| | | | | | 916-970 |
| HTOJL95 | 381 | 762851 | AC011859 | 1695 | 1-2853 |
| | | | | | 1-2853 |
| HTOJL95 | 381 | 762851 | AC026347 | 1696 | 1-2853 |
| | | | | | 1-2853 |
| HTOJL95 | 381 | 762851 | AC011859 | 1697 | 1-421 |
| | | | | | 1-421 |
| HTOJL95 | 381 | 762851 | AC011859 | 1698 | 1-340 |
| | | | | | 1-340 |
| HTOJL95 | 381 | 762851 | AC026347 | 1699 | 1-340 |
| | | | | | 1-340 |
| HTOJL95 | 381 | 762851 | AC026347 | 1700 | 1-421 |
| | | | | | 1-421 |
| HTLIF12 | 382 | 901225 | AC011953 | 1701 | 1-126 |
| HTEEF26 | 383 | 879704 | AC006329 | 1702 | 1-118 |
| | | | | | 1-118 |
| | | | | | 290-360 |
| | | | | | 290-360 |
| | | | | | 635-771 |
| | | | | | 635-771 |
| | | | | | 1248-1417 |
| | | | | | 1248-1417 |
| | | | | | 2755-2831 |
| | | | | | 2755-2831 |
| | | | | | 3548-3667 |
| | | | | | 3548-3667 |
| | | | | | 4852-4986 |
| | | | | | 4852-4986 |
| | | | | | 5016-5119 |
| | | | | | 5016-5119 |
| | | | | | 5247-5774 |
| | | | | | 5247-5774 |
| | | | | | 6507-8421 |
| | | | | | 6507-8421 |
| HTEEF26 | 383 | 879704 | AC006329 | 1703 | 1-367 |
| | | | | | 1-367 |
| HTEED26 | 384 | 762846 | AF214634 | 1704 | 1-2149 |
| | | | | | 1-2149 |
| HTEED26 | 384 | 762846 | AC025931 | 1705 | 1-2153 |
| | | | | | 1-2153 |
| HE8FC45 | 388 | 845672 | AC007000 | 1706 | 1-2261 |
| | | | | | 2328-3085 |
| | | | | | 3093-6210 |
| | | | | | 6306-6555 |
| | | | | | 6630-8724 |
| | | | | | 9378-10405 |
| | | | | | 10433-10732 |
| | | | | | 10766-11172 |
| | | | | | 11591-11805 |
| | | | | | 12605-13216 |
| HE8FC45 | 388 | 845672 | AC006014 | 1707 | 1-1533 |
| | | | | | 2260-2403 |
| | | | | | 2894-3811 |
| | | | | | 5391-5478 |
| | | | | | 5645-5945 |
| | | | | | 7052-7659 |
| | | | | | 7903-8408 |
| | | | | | 8681-9613 |
| | | | | | 10033-11894 |
| | | | | | 13474-17953 |
| | | | | | 17961-21161 |
| | | | | | 21163-21418 |
| | | | | | 21506-23629 |
| | | | | | 23876-25000 |
| | | | | | 25330-25629 |
| | | | | | 25806-26108 |
| | | | | | 26527-26741 |
| | | | | | 27724-27832 |
| | | | | | 27877-28134 |
| | | | | | 28505-29118 |
| | | | | | 29179-29698 |
| | | | | | 30220-30471 |
| | | | | | 30918-31476 |
| | | | | | 33359-33446 |
| | | | | | 33613-33723 |
| | | | | | 34757-35010 |
| | | | | | 35021-35442 |
| | | | | | 37343-39068 |
| HE8FC45 | 388 | 845672 | AC005488 | 1708 | 1-1525 |
| | | | | | 2823-3802 |
| | | | | | 5381-5467 |
| | | | | | 5634-5934 |
| | | | | | 7010-7619 |
| | | | | | 7948-8368 |
| | | | | | 8868-11864 |
| | | | | | 11870-12107 |
| | | | | | 12594-12811 |
| | | | | | 12884-13191 |
| | | | | | 13225-13414 |
| | | | | | 13437-14521 |
| | | | | | 14529-17110 |
| | | | | | 17190-17916 |
| | | | | | 17924-21107 |
| | | | | | 21551-23569 |
| | | | | | 23842-24790 |
| | | | | | 25294-25593 |
| | | | | | 25666-26072 |
| | | | | | 27692-27800 |
| | | | | | 27845-28102 |
| | | | | | 28538-29666 |
| | | | | | 30322-30463 |
| | | | | | 30913-31471 |
| | | | | | 33356-33443 |
| | | | | | 33610-33910 |
| | | | | | 34799-35052 |
| | | | | | 35063-35484 |
| | | | | | 36553-37367 |
| | | | | | 38056-39110 |
| HE8FC45 | 388 | 845672 | AC005098 | 1709 | 1-1716 |
| | | | | | 2360-2501 |
| | | | | | 2897-3814 |
| | | | | | 5395-5482 |
| | | | | | 5649-5949 |
| | | | | | 6624-7332 |
| | | | | | 7837-8257 |
| | | | | | 8530-11755 |
| | | | | | 11758-12386 |
| | | | | | 12495-12713 |
| | | | | | 12792-13099 |
| | | | | | 13250-13315 |
| | | | | | 13337-17835 |
| | | | | | 17902-18103 |
| | | | | | 18336-22003 |
| | | | | | 22097-24218 |
| HE8FC45 | 388 | 845672 | AC005071 | 1710 | 1-960 |
| | | | | | 1108-3199 |
| | | | | | 3473-4418 |
| HE8FC45 | 388 | 845672 | AC004878 | 1711 | 1-980 |
| | | | | | 2557-2644 |
| | | | | | 2811-3111 |
| | | | | | 4255-4862 |
| | | | | | 5191-5611 |
| | | | | | 5884-9106 |
| | | | | | 9112-9349 |
| | | | | | 9832-10053 |
| | | | | | 10126-10433 |
| | | | | | 10467-10656 |
| | | | | | 10679-11417 |
| | | | | | 11461-15048 |
| | | | | | 15173-18370 |
| | | | | | 18955-20842 |
| | | | | | 21089-22211 |
| | | | | | 23017-23232 |
| | | | | | 25096-25345 |
| | | | | | 25716-26329 |
| | | | | | 26453-26909 |
| | | | | | 28140-28698 |
| | | | | | 30582-30669 |
| | | | | | 30836-31136 |
| | | | | | 32001-32686 |
| | | | | | 34133-34567 |
| | | | | | 35036-37131 |
| | | | | | 37137-37181 |
| | | | | | 38806-42375 |
| | | | | | 42420-43181 |
| | | | | | 43189-43972 |
| | | | | | 44198-45300 |
| HE8FC45 | 388 | 845672 | AC005073 | 1712 | 1-1255 |
| | | | | | 1403-3494 |
| | | | | | 3768-4713 |
| HE8FC45 | 388 | 845672 | AC007003 | 1713 | 1-539 |
| | | | | | 783-1288 |
| | | | | | 1410-5415 |
| | | | | | 5538-5768 |
| | | | | | 5818-6125 |
| | | | | | 6276-6341 |
| | | | | | 6363-10846 |
| | | | | | 10854-14320 |
| | | | | | 14396-16493 |
| | | | | | 16760-17881 |
| | | | | | 18212-18511 |
| | | | | | 18545-18951 |
| | | | | | 19370-19584 |
| | | | | | 20384-20991 |
| HE8FC45 | 388 | 845672 | AC061712 | 1714 | 1-1876 |
| | | | | | 1884-5086 |
| | | | | | 5088-5343 |
| | | | | | 5431-7528 |
| | | | | | 7801-8923 |
| HE8FC45 | 388 | 845672 | AC006995 | 1715 | 1-2045 |
| | | | | | 2679-3414 |
| | | | | | 3744-4043 |
| | | | | | 4116-4522 |
| | | | | | 6295-6552 |
| | | | | | 6988-8052 |
| | | | | | 8656-8914 |
| | | | | | 15068-15731 |
| | | | | | 19863-22252 |
| | | | | | 27896-28385 |
| | | | | | 28583-29993 |
| | | | | | 30266-30724 |
| HE8FC45 | 388 | 845672 | AC007000 | 1716 | 1-1192 |
| | | | | | 1740-1980 |
| | | | | | 2324-3297 |
| | | | | | 4882-4969 |
| | | | | | 5136-5436 |
| | | | | | 6223-6476 |
| | | | | | 6487-7106 |
| | | | | | 7435-7855 |
| | | | | | 7977-12142 |
| | | | | | 12173-12247 |
| HE8FC45 | 388 | 845672 | AC006014 | 1717 | 1-979 |
| HE8FC45 | 388 | 845672 | AC006014 | 1718 | 1-929 |
| | | | | | 1161-4487 |
| | | | | | 4579-5506 |
| | | | | | 5664-5765 |
| | | | | | 5979-9483 |
| | | | | | 10048-10856 |
| | | | | | 11336-11702 |
| | | | | | 12041-12251 |
| | | | | | 12253-12463 |
| | | | | | 13816-13903 |
| | | | | | 13917-14426 |
| HE8FC45 | 388 | 845672 | AC005488 | 1719 | 1-867 |
| | | | | | 1144-2852 |
| | | | | | 2949-4487 |
| | | | | | 4579-5789 |
| | | | | | 5978-9485 |
| | | | | | 10048-10911 |
| | | | | | 11334-11700 |
| | | | | | 12034-12509 |
| | | | | | 13205-13321 |
| | | | | | 13907-14417 |
| HE8FC45 | 388 | 845672 | AC005488 | 1720 | 1-735 |
| | | | | | 738-975 |
| HE8FC45 | 388 | 845672 | AC005098 | 1721 | 1-866 |
| | | | | | 1143-2850 |
| | | | | | 2949-4489 |
| | | | | | 4581-5793 |
| | | | | | 5905-8184 |
| | | | | | 8255-9460 |
| | | | | | 10026-10834 |
| | | | | | 11078-11157 |
| | | | | | 11307-11672 |
| | | | | | 12131-12486 |
| | | | | | 13183-13299 |
| | | | | | 13912-14426 |
| HE8FC45 | 388 | 845672 | AC005098 | 1722 | 1-937 |
| HE8FC45 | 388 | 845672 | AC005071 | 1723 | 1-300 |
| HE8FC45 | 388 | 845672 | AC005071 | 1724 | 1-319 |
| HE8FC45 | 388 | 845672 | AC004878 | 1725 | 1-255 |
| HE8FC45 | 388 | 845672 | AC004878 | 1726 | 1-741 |
| | | | | | 818-1073 |
| | | | | | 1163-3038 |
| HE8FC45 | 388 | 845672 | AC005073 | 1727 | 1-257 |
| HE8FC45 | 388 | 845672 | AC005073 | 1728 | 1-300 |
| HE8FC45 | 388 | 845672 | AC007003 | 1729 | 1-614 |
| HE8FC45 | 388 | 845672 | AC061712 | 1730 | 1-300 |
| HE8FC45 | 388 | 845672 | AC061712 | 1731 | 1-2326 |
| | | | | | 2349-2538 |
| | | | | | 2572-2879 |
| | | | | | 2952-3169 |
| | | | | | 3656-3893 |
| | | | | | 3896-7121 |
| | | | | | 7394-7814 |
| | | | | | 8143-8752 |
| | | | | | 10017-10119 |
| HE8FC45 | 388 | 845672 | AC006995 | 1732 | 1-256 |

[0094] Table 1D: The polynucleotides or polypeptides, or agonists or antagonists of the present invention can be used in assays to test for one or more biological activities. If these polynucleotides and polypeptides do exhibit activity in a particular assay, it is likely that these molecules may be involved in the diseases associated with the biological activity. Thus, the polynucleotides or polypeptides, or agonists or antagonists could be used to treat the associated disease.

[0095] The present invention encompasses methods of detecting, preventing, diagnosing, prognosticating, treating, and/or ameliorating a disease or disorder. In preferred embodiments, the present invention encompasses a method of treating an immune disease or disorder comprising administering to a patient in which such detection, treatment, prevention, and/or amelioration is desired a protein, nucleic acid, or antibody of the invention (or fragment or variant thereof) in an amount effective to detect, prevent, diagnose, prognosticate, treat, and/or ameliorate the immune disease or disorder.

[0096] In another embodiment, the present invention also encompasses methods of detecting, preventing, diagnosing, prognosticating, treating, and/or ameliorating an immune disease or disorder; comprising administering to a patient combinations of the proteins, nucleic acids, or antibodies of the invention (or fragments or variants thereof), sharing similar indications as shown in the corresponding rows in Column 3 of Table 1D.

[0097] Table 1D provides information related to biological activities for polynucleotides and polypeptides of the invention (including antibodies, agonists, and/or antagonists thereof). Table 1D also provides information related to assays which may be used to test polynucleotides and polypeptides of the invention (including antibodies, agonists, and/or antagonists thereof) for the corresponding biological activities. The first column (“Gene No.”) provides the gene number in the application for each clone identifier. The second column (“cDNA Clone ID:”) provides the unique clone identifier for each clone as previously described and indicated in Table 1A through Table 1D. The third column (“AA SEQ ID NO:Y”) indicates the Sequence Listing SEQ ID Number for polypeptide sequences encoded by the corresponding cDNA clones (also as indicated in Tables 1A, Table 1B, and Table 2). The fourth column (“Biological Activity”) indicates a biological activity corresponding to the indicated polypeptides (or polynucleotides encoding said polypeptides). The fifth column (“Exemplary Activity Assay”) further describes the corresponding biological activity and also provides information pertaining to the various types of assays which may be performed to test, demonstrate, or quantify the corresponding biological activity.

[0098] Table 1D describes the use of, inter alia, FMAT technology for testing or demonstrating various biological activities. Fluorometric microvolume assay technology (FMAT) is a fluorescence-based system which provides a means to perform nonradioactive cell- and bead-based assays to detect activation of cell signal transduction pathways. This technology was designed specifically for ligand binding and immunological assays. Using this technology, fluorescent cells or beads at the bottom of the well are detected as localized areas of concentrated fluorescence using a data processing system. Unbound flurophore comprising the background signal is ignored, allowing for a wide variety of homogeneous assays. FMAT technology may be used for peptide ligand binding assays, immunofluorescence, apoptosis, cytotoxicity, and bead-based immunocapture assays. See, Miraglia S et. al., “Homogeneous cell and bead based assays for highthroughput screening using flourometric microvolume assay technology,” Journal of Biomolecular Screening; 4:193-204 (1999). In particular, FMAT technology may be used to test, confirm, and/or identify the ability of polypeptides (including polypeptide fragments and variants) to activate signal transduction pathways. For example, FMAT technology may be used to test, confirm, and/or identify the ability of polypeptides to upregulate production of immunomodulatory proteins (such as, for example, interleukins, GM-CSF, Rantes, and Tumor Necrosis factors, as well as other cellular regulators (e.g. insulin)).

[0099] Table 1D also describes the use of kinase assays for testing, demonstrating, or quantifying biological activity. In this regard, the phosphorylation and de-phosphorylation of specific amino acid residues (e.g. Tyrosine, Serine, Threonine) on cell-signal transduction proteins provides a fast, reversible means for activation and de-activation of cellular signal transduction pathways. Moreover, cell signal transduction via phosphorylation/de-phosphorylation is crucial to the regulation of a wide variety of cellular processes (e.g. proliferation, differentiation, migration, apoptosis, etc.). Accordingly, kinase assays provide a powerful tool useful for testing, confirming, and/or identifying polypeptides (including polypeptide fragments and variants) that mediate cell signal transduction events via protein phosphorylation. See e.g., Forrer, P., Tamaskovic R., and Jaussi, R. “Enzyme-Linked Immunosorbent Assay for Measurement of JNK, ERK, and p38 Kinase Activities” Biol. Chem. 379(8-9): 1101-1110 (1998).

LENGTHY TABLE REFERENCED HERE
US20070031842A1-20070208-T00003
Please refer to the end of the specification for access instructions.

[0100] Table 1E: Polynucleotides encoding polypeptides of the present invention can be used in assays to test for one or more biological activities. One such biological activity which may be tested includes the ability of polynucleotides and polypeptides of the invention to stimulate up-regulation or down-regulation of expression of particular genes and proteins. Hence, if polynucleotides and polypeptides of the present invention exhibit activity in altering particular gene and protein expression patterns, it is likely that these polynucleotides and polypeptides of the present invention may be involved in, or capable of effecting changes in, diseases associated with the altered gene and protein expression profiles. Hence, polynucleotides, polypeptides, or antibodies of the present invention could be used to treat said associated diseases.

[0101] TaqMan® assays may be performed to assess the ability of polynucleotides (and polypeptides they encode) to alter the expression pattern of particular “target” genes. TaqMan® reactions are performed to evaluate the ability of a test agent to induce or repress expression of specific genes in different cell types. TaqMan® gene expression quantification assays (“TaqMan® assays”) are well known to, and routinely performed by, those of ordinary skill in the art. TaqMan® assays are performed in a two step reverse transcription/polymerase chain reaction (RT-PCR). In the first (RT) step, cDNA is reverse transcribed from total RNA samples using random hexamer primers. In the second (PCR) step, PCR products are synthesized from the cDNA using gene specific primers.

[0102] To quantify gene expression the Taqman® PCR reaction exploits the 5′ nuclease activity of AmpliTaq Gold® DNA Polymerase to cleave a Taqman® probe (distinct from the primers) during PCR. The Taqman® probe contains a reporter dye at the 5′-end of the probe and a quencher dye at the 3′ end of the probe. When the probe is intact, the proximity of the reporter dye to the quencher dye results in suppression of the reporter fluorescence. During PCR, if the target of interest is present, the probe specifically anneals between the forward and reverse primer sites. AmpliTaq Fold DNA Polymerase then cleaves the probe between the reporter and quencher when the probe hybridizes to the target, resulting in increased fluorescence of the reporter (see FIG. 2). Accumulation of PCR products is detected directly by monitoring the increase in fluorescence of the reporter dye.

[0103] After the probe fragments are displaced from the target, polymerization of the strand continues. The 3′-end of the probe is blocked to prevent extension of the probe during PCR. This process occurs in every cycle and does not interfere with the exponential accumulation of product. The increase in fluorescence signal is detected only if the target sequence is complementary to the probe and is amplified during PCR. Because of these requirements, any nonspecific amplification is not detected.

[0104] For test sample preparation, vector controls or constructs containing the coding sequence for the gene of interest are transfected into cells, such as for example 293T cells, and supernatants collected after 48 hours. For cell treatment and RNA isolation, multiple primary human cells or human cell lines are used; such cells may include but are not limited to, Normal Human Dermal Fibroblasts, Aortic Smooth Muscle, Human Umbilical Vein Endothelial Cells, HepG2, Daudi, Jurkat, U937, Caco, and THP-1 cell lines. Cells are plated in growth media and growth is arrested by culturing without media change for 3 days, or by switching cells to low serum media and incubating overnight. Cells are treated for 1, 6, or 24 hours with either vector control supernatant or sample supernatant (or purified/partially purified protein preparations in buffer). Total RNA is isolated; for example, by using Trizol extraction or by using the Ambion RNAqueous™-4PCR RNA isolation system. Expression levels of multiple genes are analyzed using TAQMAN, and expression in the test sample is compared to control vector samples to identify genes induced or repressed. Each of the above described techniques are well known to, and routinely performed by, those of ordinary skill in the art.

[0105] Table 1E indicates particular disease classes and preferred indications for which polynucleotides, polypeptides, or antibodies of the present invention may be used in detecting, diagnosing, preventing, treating and/or ameliorating said diseases and disorders based on “target” gene expression patterns which may be up- or down-regulated by polynucleotides (and the encoded polypeptides) corresponding to each indicated cDNA Clone ID (shown in Table 1E, Column 2).

[0106] Thus, in preferred embodiments, the present invention encompasses a method of detecting, diagnosing, preventing, treating, and/or ameliorating a disease or disorder listed in the “Disease Class” and/or “Preferred Indication” columns of Table 1E; comprising administering to a patient in which such detection, diagnosis, prevention, or treatment is desired a protein, nucleic acid, or antibody of the invention (or fragment or variant thereof) in an amount effective to detect, diagnose, prevent, treat, or ameliorate the disease or disorder. The first and second columns of Table 1D show the “Gene No.” and “cDNA Clone ID No.”, respectively, indicating certain nucleic acids and proteins (or antibodies against the same) of the invention (including polynucleotide, polypeptide, and antibody fragments or variants thereof) that may be used in detecting, diagnosing, preventing, treating, or ameliorating the disease(s) or disorder(s) indicated in the corresponding row in the “Disease Class” or “Preferred Indication” Columns of Table 1E.

[0107] In another embodiment, the present invention also encompasses methods of detecting, diagnosing, preventing, treating, or ameliorating a disease or disorder listed in the “Disease Class” or “Preferred Indication” Columns of Table 1E; comprising administering to a patient combinations of the proteins, nucleic acids, or antibodies of the invention (or fragments or variants thereof), sharing similar indications as shown in the corresponding rows in the “Disease Class” or “Preferred Indication” Columns of Table 1E.

[0108] The “Disease Class” Column of Table 1E provides a categorized descriptive heading for diseases, disorders, and/or conditions (more fully described below) that may be detected, diagnosed, prevented, treated, or ameliorated by a protein, nucleic acid, or antibody of the invention (or fragment or variant thereof).

[0109] The “Preferred Indication” Column of Table 1E describes diseases, disorders, and/or conditions that may be detected, diagnosed, prevented, treated, or ameliorated by a protein, nucleic acid, or antibody of the invention (or fragment or variant thereof).

[0110] The “Cell Line” and “Exemplary Targets” Columns of Table 1E indicate particular cell lines and target genes, respectively, which may show altered gene expression patterns (i.e., up- or down-regulation of the indicated target gene) in Taqman assays, performed as described above, utilizing polynucleotides of the cDNA Clone ID shown in the corresponding row. Alteration of expression patterns of the indicated “Exemplary Target” genes is correlated with a particular “Disease Class” and/or “Preferred Indication” as shown in the corresponding row under the respective column headings.

[0111] The “Exemplary Accessions” Column indicates GenBank Accessions (available online through the National Center for Biotechnology Information (NCBI) at http://www.ncbi.nlm.nih.gov/) which correspond to the “Exemplary Targets” shown in the adjacent row.

[0112] The recitation of “Cancer” in the “Disease Class” Column indicates that the corresponding nucleic acid and protein, or antibody against the same, of the invention (or fragment or variant thereof) may be used for example, to detect, diagnose, prevent, treat, and/or ameliorate neoplastic diseases and/or disorders (e.g., leukemias, cancers, etc., as described below under “Hyperproliferative Disorders”).

[0113] The recitation of “Immune” in the “Disease Class” column indicates that the corresponding nucleic acid and protein, or antibody against the same, of the invention (or fragment or variant thereof), may be used for example, to detect, diagnose, prevent, treat, and/or ameliorate diseases and/or disorders relating to neoplastic diseases (e.g., as described below under “Hyperproliferative Disorders”), blood disorders (e.g., as described below under “Immune Activity” “Cardiovascular Disorders” and/or “Blood-Related Disorders”), and infections (e.g., as described below under “Infectious Disease”).

[0114] The recitation of “Angiogenesis” in the “Disease Class” column indicates that the corresponding nucleic acid and protein, or antibody against the same, of the invention (or fragment or variant thereof), may be used for example, to detect, diagnose, treat, prevent, and/or ameliorate diseases and/or disorders relating to neoplastic diseases (e.g., as described below under “Hyperproliferative Disorders”), diseases and/or disorders of the cardiovascular system (e.g., as described below under “Cardiovascular Disorders”), diseases and/or disorders involving cellular and genetic abnormalities (e.g., as described below under “Diseases at the Cellular Level”), diseases and/or disorders involving angiogenesis (e.g., as described below under “Anti-Angiogenesis Activity”), to promote or inhibit cell or tissue regeneration (e.g., as described below under “Regeneration”), or to promote wound healing (e.g., as described below under “Wound Healing and Epithelial Cell Proliferation”).

[0115] The recitation of “Diabetes” in the “Disease Class” column indicates that the corresponding nucleic acid and protein, or antibody against the same, of the invention (or fragment or variant thereof), may be used for example, to detect, diagnose, treat, prevent, and/or ameliorate diabetes (including diabetes mellitus types I and II), as well as diseases and/or disorders associated with, or consequential to, diabetes (e.g. as described below under “Endocrine Disorders,” “Renal Disorders,” and “Gastrointestinal Disorders”).

TABLE 1E

| Gene | cDNA | Disease | | | Exemplary | Exemplary |
|---|---|---|---|---|---|---|
| No. | Clone ID | Class | Preferred Indications | Cell Line | Targets | Accessions |
| 62 | HCEGG08 | Immune | Highly preferred indications include immunological disorders | AOSMC | CIS3 | gb\|AB006967\| |
| | | | such as described herein under the heading “Immune Activity” | | Granzyme B | AB006967 |
| | | | and/or “Blood-Related Disorders” (particularly including, but not | | IL1B | gb\|j04071\|HUMCSE |
| | | | limited to, immune disorders involving muscle tissues and the | | IL5 | gb\|X02532\| |
| | | | cardiovascular system (e.g. heart, lungs, circulatory system)). | | | HSIL1BRgb\| |
| | | | Highly preferred embodiments of the invention include methods | | | X12705\|HSBCDFIA |
| | | | of preventing, detecting, diagnosing, treating and/or ameliorating | | | |
| | | | disorders of the immune system (particularly including, but not | | | |
| | | | limited to, immune disorders involving muscle tissue or the | | | |
| | | | cardiovascular system). (AOSMC cells are human aortic smooth | | | |
| | | | muscle cells). | | | |
| 62 | HCEGG08 | Immune | Highly preferred indications include immunological disorders | HEK293 | ICAM | gb\| |
| | | | such as described herein under the heading “Immune Activity” | | | X06990\|HSICAM1 |
| | | | and/or “Blood-Related Disorders” (particularly including, but not | | | |
| | | | limited to, immune disorders involving epithelial cells or the | | | |
| | | | renal system). Highly preferred embodiments of the invention | | | |
| | | | include methods of preventing, detecting, diagnosing, treating | | | |
| | | | and/or ameliorating disorders of the immune system (particularly | | | |
| | | | including, but not limited to, immune disorders involving | | | |
| | | | epithelial cells or the renal system). (The 293 cell line is a human | | | |
| | | | embryonal kidney epithelial cell line available through the ATCC | | | |
| | | | as cell line number CRL-1573). | | | |
| 62 | HCEGG08 | Immune | Highly preferred indications include immunological disorders | HUVEC | CCR7 | gb\| |
| | | | such as described herein under the heading “Immune Activity” | | TNF | X84702\| |
| | | | and/or “Blood-Related Disorders” (particularly including, but not | | | HSDNABLR2 |
| | | | limited to, immune disorders involving endothelial cells). Highly | | | gb\|AJ270944\| |
| | | | preferred embodiments of the invention include methods of | | | HSA27094 |
| | | | preventing, detecting, diagnosing, treating and/or ameliorating | | | |
| | | | disorders of the immune system (particularly including, but not | | | |
| | | | limited to, immune disorders involving endothelial cells). | | | |
| | | | (HUVEC cells are human umbilical vein endothelial cells). | | | |
| 62 | HCEGG08 | Immune | Highly preferred indications include immunological disorders | Jurkat | GATA1 | gb\|X17254\| |
| | | | such as described herein under the heading “Immune Activity” | | Rag1 | HSERYF1 gb\| |
| | | | and/or “Blood-Related Disorders” (particularly including, but not | | Rag2 | M29474\| |
| | | | limited to, immune disorders involving T-cells). Highly | | | HUMRAG1 |
| | | | preferred embodiments of the invention include methods of | | | gb\|AY0111962\| |
| | | | preventing, detecting, diagnosing, treating and/or ameliorating | | | AY011962 |
| | | | disorders of the immune system (particularly including, but not | | | |
| | | | limited to, immune disorders involving T-cells). (The Jurkat cell | | | |
| | | | line is a human T lymphocyte cell line available through the | | | |
| | | | ATCC as cell line number TIB-152). | | | |
| 62 | HCEGG08 | Immune | Highly preferred indications include immunological disorders | Liver | ICAM | gb\|X06990\| |
| | | | such as described herein under the heading “Immune Activity” | | | HSICAM1 |
| | | | and/or “Blood-Related Disorders” (particularly including, but not | | | |
| | | | limited to, immune disorders involving cells of the hepatic | | | |
| | | | system). Highly preferred embodiments of the invention include | | | |
| | | | methods of preventing, detecting, diagnosing, treating and/or | | | |
| | | | ameliorating disorders of the immune system (particularly | | | |
| | | | including, but not limited to, immune disorders involving cells of | | | |
| | | | the hepatic system). | | | |
| 62 | HCEGG08 | Immune | Highly preferred indications include immunological disorders | NHDF | HLA-c | |
| | | | such as described herein under the heading “Immune Activity” | | | |
| | | | and/or “Blood-Related Disorders” (particularly including, but not | | | |
| | | | limited to, immune disorders involving the skin). Highly | | | |
| | | | preferred embodiments of the invention include methods of | | | |
| | | | preventing, detecting, diagnosing, treating and/or ameliorating | | | |
| | | | disorders of the immune system (particularly including, but not | | | |
| | | | limited to, immune disorders involving the skin). (NHDF cells | | | |
| | | | are normal human dermal fibroblasts). | | | |
| 62 | HCEGG08 | Immune | Highly preferred indications include immunological disorders | SK-N-MC | HLA-c | gb\|A30922\|A30922 |
| | | | such as described herein under the heading “Immune Activity” | neuroblastoma | VCAM | |
| | | | and/or “Blood-Related Disorders” (particularly including, but not | | | |
| | | | limited to, immune disorders involving the central nervous | | | |
| | | | system). Highly preferred embodiments of the invention include | | | |
| | | | methods of preventing, detecting, diagnosing, treating and/or | | | |
| | | | ameliorating disorders of the immune system (particularly | | | |
| | | | including, but not limited to, immune disorders involving the | | | |
| | | | central nervous sytem). (The SK-N-MC neuroblastoma cell line | | | |
| | | | is a cell line derived from human brain tissue and is available | | | |
| | | | through the ATCC as cell line number HTB-10). | | | |
| 62 | HCEGG08 | Immune | Highly preferred indications include immunological disorders | THP1 | CCR3 | gb\| |
| | | | such as described herein under the heading “Immune Activity” | | CCR4 | AB023887\| |
| | | | and/or “Blood-Related Disorders” (particularly including, but not | | CTLA4 | AB023887 gb\| |
| | | | limited to, immune disorders involving monocytes). Highly | | Granzyme B | AB023888\| |
| | | | preferred embodiments of the invention include methods of | | Rag2 | AB023888 gb\| |
| | | | preventing, detecting, diagnosing, treating and/or ameliorating | | VCAM | AF316875\| |
| | | | disorders of the immune system (particularly including, but not | | | AF316875 gb\| |
| | | | limited to, immune disorders involving monocytes). (The THP1 | | | J04071\| |
| | | | cell line is a human monocyte cell line available through the | | | HUMCSE gb\| |
| | | | ATCC as cell line number TIB-202). | | | AY011962\| |
| | | | | | | AY011962 |
| | | | | | | gb\|A30922\|A30922 |
| 62 | HCEGG08 | Immune | Highly preferred indications include immunological disorders | U937 | CCR5 | gb\| |
| | | | such as described herein under the heading “Immune Activity” | | CCR7 | AF161918\| |
| | | | and/or “Blood-Related Disorders” (particularly including, but not | | CD25 | AF161918 gb\| |
| | | | limited to, immune disorders involving monocytes). Highly | | CD30 | X84702\| |
| | | | preferred embodiments of the invention include methods of | | CXCR3 | HSDNABLR2 gb\| |
| | | | preventing, detecting, diagnosing, treating and/or ameliorating | | Rag1 | X03137\| |
| | | | disorders of the immune system (particularly including, but not | | Rag2 | HSIL2G7 gb\| |
| | | | limited to, immune disorders involving monocytes). (The U937 | | | Z79783\| |
| | | | cell line is a human monocyte cell line available through the | | | HSCKRL2 gb\| |
| | | | ATCC as cell line number CRL-1593.2). | | | M29474\| |
| | | | | | | HUMRAG1 |
| | | | | | | gb\|AY011962\| |
| | | | | | | AY011962 |
| 305 | HTEEW69 | Immune | Highly preferred indications include immunological disorders | AOSMC | CCR7 | gb\| |
| | | | such as described herein under the heading “Immune Activity” | | CXCR3 | X84702\| |
| | | | and/or “Blood-Related Disorders” (particularly including, but not | | Rag2 | HSDNABLR2 gb\| |
| | | | limited to, immune disorders involving muscle tissues and the | | VLA4 | Z79783\| |
| | | | cardiovascular system (e.g. heart, lungs, circulatory system)). | | | HSCKRL2 gb\| |
| | | | Highly preferred embodiments of the invention include methods | | | AY011962\| |
| | | | of preventing, detecting, diagnosing, treating and/or ameliorating | | | AY011962 |
| | | | disorders of the immune system (particularly including, but not | | | gb\| |
| | | | limited to, immune disorders involving muscle tissue or the | | | X16983\|HSINTAL4 |
| | | | cardiovascular system). (AOSMC cells are human aortic smooth | | | |
| | | | muscle cells). | | | |
| 305 | HTEEW69 | Immune | Highly preferred indications include immunological disorders | Caco-2 | TNF | gb\| |
| | | | such as described herein under the heading “Immune Activity” | | | AJ270944\| |
| | | | and/or “Blood-Related Disorders” (particularly including, but not | | | HSA27094 |
| | | | limited to, immune disorders involving the cells of the | | | |
| | | | gastrointestinal tract). Highly preferred embodiments of the | | | |
| | | | invention include methods of preventing, detecting, diagnosing, | | | |
| | | | treating and/or ameliorating disorders of the immune system | | | |
| | | | (particularly including, but not limited to, immune disorders | | | |
| | | | involving cells of the gastrointestinal tract). (The Caco-2 cell line | | | |
| | | | is a human colorectal adenocarcinoma cell line available through | | | |
| | | | the ATCC as cell line number HTB-37). | | | |
| 305 | HTEEW69 | Immune | Highly preferred indications include immunological disorders | Daudi | GATA3 | gb\| |
| | | | such as described herein under the heading “Immune Activity” | | ICAM | X55037\|HSGATA3 |
| | | | and/or “Blood-Related Disorders” (particularly including, but not | | TNF | gb\| |
| | | | limited to, immune disorders involving the B-cells). Highly | | | X06990\| |
| | | | preferred embodiments of the invention include methods of | | | HSICAM1 gb\| |
| | | | preventing, detecting, diagnosing, treating and/or ameliorating | | | AJ270944\| |
| | | | disorders of the immune system (particularly including, but not | | | HSA27094 |
| | | | limited to, immune disorders involving B-cells). (The Daudi cell | | | |
| | | | line is a human B lymphoblast cell line available through the | | | |
| | | | ATCC as cell line number CCL-213). | | | |
| 305 | HTEEW69 | Immune | Highly preferred indications include immunological disorders | HEK293 | TNF | gb\| |
| | | | such as described herein under the heading “Immune Activity” | | | AJ270944\| |
| | | | and/or “Blood-Related Disorders” (particularly including, but not | | | HSA27094 |
| | | | limited to, immune disorders involving epithelial cells or the | | | |
| | | | renal system). Highly preferred embodiments of the invention | | | |
| | | | include methods of preventing, detecting, diagnosing, treating | | | |
| | | | and/or ameliorating disorders of the immune system (particularly | | | |
| | | | including, but not limited to, immune disorders involving | | | |
| | | | epithelial cells or the renal system). (The 293 cell line is a human | | | |
| | | | embryonal kidney epithelial cell line available through the ATCC | | | |
| | | | as cell line number CRL-1573). | | | |
| 305 | HTEEW69 | Immune | Highly preferred indications include immunological disorders | Liver | ICAM | gb\| |
| | | | such as described herein under the heading “Immune Activity” | | | X06990\|HSICAM1 |
| | | | and/or “Blood-Related Disorders” (particularly including, but not | | | |
| | | | limited to, immune disorders involving cells of the hepatic | | | |
| | | | system). Highly preferred embodiments of the invention include | | | |
| | | | methods of preventing, detecting, diagnosing, treating and/or | | | |
| | | | ameliorating disorders of the immune system (particularly | | | |
| | | | including, but not limited to, immune disorders involving cells of | | | |
| | | | the hepatic system). | | | |
| 305 | HTEEW69 | Immune | Highly preferred indications include immunological disorders | NHDF | CIS3 | gb\| |
| | | | such as described herein under the heading “Immune Activity” | | TNF | AB006967\| |
| | | | and/or “Blood-Related Disorders” (particularly including, but not | | | AB006967 gb\| |
| | | | limited to, immune disorders involving the skin). Highly | | | AJ270944\| |
| | | | preferred embodiments of the invention include methods of | | | HSA27094 |
| | | | preventing, detecting, diagnosing, treating and/or ameliorating | | | |
| | | | disorders of the immune system (particularly including, but not | | | |
| | | | limited to, immune disorders involving the skin). (NHDF cells | | | |
| | | | are normal human dermal fibroblasts). | | | |
| 305 | HTEEW69 | Immune | Highly preferred indications include immunological disorders | SK-N-MC | TNF | gb\| |
| | | | such as described herein under the heading “Immune Activity” | neuroblastoma | VCAM | AJ270944\| |
| | | | and/or “Blood-Related Disorders” (particularly including, but not | | | HSA27094 |
| | | | limited to, immune disorders involving the central nervous | | | gb\|A30922\|A30922 |
| | | | system). Highly preferred embodiments of the invention include | | | |
| | | | methods of preventing, detecting, diagnosing, treating and/or | | | |
| | | | ameliorating disorders of the immune system (particularly | | | |
| | | | including, but not limited to, immune disorders involving the | | | |
| | | | central nervous sytem). (The SK-N-MC neuroblastoma cell line | | | |
| | | | is a cell line derived from human brain tissue and is available | | | |
| | | | through the ATCC as cell line number HTB-10). | | | |
| 305 | HTEEW69 | Immune | Highly preferred indications include immunological disorders | THP1 | CD25 | gb\|X03137\| |
| | | | such as described herein under the heading “Immune Activity” | | CD40 | HSIL2RG7 |
| | | | and/or “Blood-Related Disorders” (particularly including, but not | | GATA3 | gb\|AJ300189\| |
| | | | limited to, immune disorders involving monocytes). Highly | | LTBR | HSA30018 gb\| |
| | | | preferred embodiments of the invention include methods of | | Rag1 | X55037\| |
| | | | preventing, detecting, diagnosing, treating and/or ameliorating | | | HSGATA3 gb\| |
| | | | disorders of the immune system (particularly including, but not | | | AK027080\| |
| | | | limited to, immune disorders involving monocytes). (The THP1 | | | AK027080 gb\| |
| | | | cell line is a human monocyte cell line available through the | | | M29474\| |
| | | | ATCC as cell line number TIB-202). | | | HUMRAG1 |
| 305 | HTEEW69 | Immune | Highly preferred indications include immunological disorders | U937 | IL1B | gb\|X02532\| |
| | | | such as described herein under the heading “Immune Activity” | | TNF | HSIL1BR |
| | | | and/or “Blood-Related Disorders” (particularly including, but not | | | gb\|AJ270944\| |
| | | | limited to, immune disorders involving monocytes). Highly | | | HSA27094 |
| | | | preferred embodiments of the invention include methods of | | | |
| | | | preventing, detecting, diagnosing, treating and/or ameliorating | | | |
| | | | disorders of the immune system (particularly including, but not | | | |
| | | | limited to, immune disorders involving monocytes). (The U937 | | | |
| | | | cell line is a human monocyte cell line available through the | | | |
| | | | ATCC as cell line number CRL-1593.2) | | | |

[0116] Table 2 further characterizes certain encoded polypeptides of the invention, by providing the results of comparisons to protein and protein family databases. The first column provides a unique clone identifier, “Clone ID NO:”, corresponding to a cDNA clone disclosed in Table 1A and/or Table 1B. The second column provides the unique contig identifier, “Contig ID:” which allows correlation with the information in Table 1B. The third column provides the sequence identifier, “SEQ ID NO:”, for the contig polynucleotide sequences. The fourth column provides the analysis method by which the homology/identity disclosed in the Table was determined. The fifth column provides a description of the PFAM/NR hit identified by each analysis. Column six provides the accession number of the PFAM/NR hit disclosed in the fifth column. Column seven, score/percent identity, provides a quality score or the percent identity, of the hit disclosed in column five. Comparisons were made between polypeptides encoded by polynucleotides of the invention and a non-redundant protein database (herein referred to as “NR”), or a database of protein families (herein referred to as “PFAM”), as described below.

[0117] The NR database, which comprises the NBRF PIR database, the NCBI GenPept database, and the SIB SwissProt and TrEMBL databases, was made non-redundant using the computer program nrdb2 (Warren Gish, Washington University in Saint Louis). Each of the polynucleotides shown in Table 1B, column 3 (e.g., SEQ ID NO:X or the ‘Query’ sequence) was used to search against the NR database. The computer program BLASTX was used to compare a 6-frame translation of the Query sequence to the NR database (for information about the BLASTX algorithm please see Altshul et al., J. Mol. Biol. 215:403-410 (1990), and Gish and States, Nat. Genet. 3:266-272 (1993). A description of the sequence that is most similar to the Query sequence (the highest scoring ‘Subject’) is shown in column five of Table 2 and the database accession number for that sequence is provided in column six. The highest scoring ‘Subject’ is reported in Table 2 if (a) the estimated probability that the match occurred by chance alone is less than 1.0e−07, and (b) the match was not to a known repetitive element. BLASTX returns alignments of short polypeptide segments of the Query and Subject sequences which share a high degree of similarity; these segments are known as High-Scoring Segment Pairs or HSPs. Table 2 reports the degree of similarity between the Query and the Subject for each HSP as a percent identity in Column 7. The percent identity is determined by dividing the number of exact matches between the two aligned sequences in the HSP, dividing by the number of Query amino acids in the HSP and multiplying by 100. The polynucleotides of SEQ ID NO:X which encode the polypeptide sequence that generates an HSP are delineated by columns 8 and 9 of Table 2.

[0118] The PFAM database, PFAM version 2.1, (Sonnhammer, Nucl. Acids Res., 26:320-322, 1998)) consists of a series of multiple sequence alignments; one alignment for each protein family. Each multiple sequence alignment is converted into a probability model called a Hidden Markov Model, or HMM, that represents the position-specific variation among the sequences that make up the multiple sequence alignment (see, e.g., Durbin, et al., Biological sequence analysis: probabilistic models of proteins and nucleic acids, Cambridge University Press, 1998 for the theory of HMMs). The program HMMER version 1.8 (Sean Eddy, Washington University in Saint Louis) was used to compare the predicted protein sequence for each Query sequence (SEQ ID NO:Y in Table 1B) to each of the HMMs derived from PFAM version 2.1. A HMM derived from PFAM version 2.1 was said to be a significant match to a polypeptide of the invention if the score returned by HMMER 1.8 was greater than 0.8 times the HMMER 1.8 score obtained with the most distantly related known member of that protein family. The description of the PFAM family which shares a significant match with a polypeptide of the invention is listed in column 5 of Table 2, and the database accession number of the PFAM hit is provided in column 6. Column 7 provides the score returned by HMMER version 1.8 for the alignment. Columns 8 and 9 delineate the polynucleotides of SEQ ID NO:X which encode the polypeptide sequence which show a significant match to a PFAM protein family.

[0119] As mentioned, columns 8 and 9 in Table 2, “NT From” and “NT To”, delineate the polynucleotides of “SEQ ID NO:X” that encode a polypeptide having a significant match to the PFAM/NR database as disclosed in the fifth column. In one embodiment, the invention provides a protein comprising, or alternatively consisting of, a polypeptide encoded by the polynucleotides of SEQ ID NO:X delineated in columns 8 and 9 of Table 2. Also provided are polynucleotides encoding such proteins, and the complementary strand thereto.

[0120] The nucleotide sequence SEQ ID NO:X and the translated SEQ ID NO:Y are sufficiently accurate and otherwise suitable for a variety of uses well known in the art and described further below. For instance, the nucleotide sequences of SEQ ID NO:X are useful for designing nucleic acid hybridization probes that will detect nucleic acid sequences contained in SEQ ID NO:X or the cDNA contained in ATCC Deposit No:Z. These probes will also hybridize to nucleic acid molecules in biological samples, thereby enabling immediate applications in chromosome mapping, linkage analysis, tissue identification and/or typing, and a variety of forensic and diagnostic methods of the invention. Similarly, polypeptides identified from SEQ ID NO:Y may be used to generate antibodies which bind specifically to these polypeptides, or fragments thereof, and/or to the polypeptides encoded by the cDNA clones identified in, for example, Table 1A and/or 1B.

[0121] Nevertheless, DNA sequences generated by sequencing reactions can contain sequencing errors. The errors exist as misidentified nucleotides, or as insertions or deletions of nucleotides in the generated DNA sequence. The erroneously inserted or deleted nucleotides cause frame shifts in the reading frames of the predicted amino acid sequence. In these cases, the predicted amino acid sequence diverges from the actual amino acid sequence, even though the generated DNA sequence may be greater than 99.9% identical to the actual DNA sequence (for example, one base insertion or deletion in an open reading frame of over 1000 bases).

[0122] Accordingly, for those applications requiring precision in the nucleotide sequence or the amino acid sequence, the present invention provides not only the generated nucleotide sequence identified as SEQ ID NO:X, and a predicted translated amino acid sequence identified as SEQ ID NO:Y, but also a sample of plasmid DNA containing cDNA ATCC Deposit No:Z (e.g., as set forth in columns 2 and 3 of Table 1A and/or as set forth, for example, in Table 1B, 6, and 7). The nucleotide sequence of each deposited clone can readily be determined by sequencing the deposited clone in accordance with known methods. Further, techniques known in the art can be used to verify the nucleotide sequences of SEQ ID NO:X. The predicted amino acid sequence can then be verified from such deposits. Moreover, the amino acid sequence of the protein encoded by a particular clone can also be directly determined by peptide sequencing or by expressing the protein in a suitable host cell containing the deposited human cDNA, collecting the protein, and determining its sequence.

TABLE 2

| | | SEQ | | | | Score/ | | |
|---|---|---|---|---|---|---|---|---|
| cDNA | Contig | ID | Analysis | | PFam/NR | Percent | NT | |
| Clone ID | ID: | NO: X | Method | PFam/NR Description | Accession Number | Identity | From | NT To |
| H6BSF56 | 762968 | 11 | HMMER | PFAM: Zinc-binding dehydrogenases | PF00107 | 35.6 | 176 | 415 |
| | | | 2.1.1 | | | | | |
| | | | WUblastx.64 | (Q9BV79) SIMILAR TO CGI-63 PROTEIN. | Q9BV79 | 100% | 25 | 42 |
| | | | | | | 92% | 53 | 427 |
| H6EEC72 | 889401 | 12 | WUblastx.64 | hypothetical protein DKFZp434L061.1 - human | pir\|T43456\|T43456 | 80% | 1484 | 1203 |
| | | | | | | 41% | 1277 | 1080 |
| | | | | | | 35% | 973 | 845 |
| | | | | | | 34% | 659 | 549 |
| | | | | | | 57% | 991 | 365 |
| HACBS22 | 847113 | 14 | WUblastx.64 | (O60266) ADENYLATE CYCLASE TYPE III | CYA3_HUMAN | 89% | 6 | 416 |
| | | | | (EC 4.6.1.1) (ADENYLATE | | 25% | 1547 | 2299 |
| | | | | | | 18% | 917 | 1111 |
| | | | | | | 93% | 416 | 2449 |
| HADMB15 | 847116 | 19 | WUblastx.64 | (Q9BVH1) SIMILAR TO DLXIN-1. | Q9BVH1 | 100% | 8 | 109 |
| HAGCC87 | 638587 | 21 | WUblastx.64 | (Q9BGW3) HYPOTHETICAL 13.5 KDA | Q9BGW3 | 65% | 992 | 1105 |
| | | | | PROTEIN. | | 36% | 54 | 116 |
| | | | | | | 57% | 801 | 980 |
| HAGEG10 | 823543 | 23 | WUblastx.64 | (Q9NWT5) CDNA FLJ20618 FIS, CLONE | Q9NWT5 | 100% | 1237 | 1377 |
| | | | | KAT05049. | | 96% | 1 | 156 |
| HAGFS57 | 847120 | 25 | WUblastx.64 | (Q9Y485) X-LIKE 1 PROTEIN. | Q9Y485 | 58% | 9 | 872 |
| HAGHN57 | 773286 | 26 | WUblastx.64 | (O60416) WUGSC: H_RG276O03.2 PROTEIN. | O60416 | 98% | 65 | 1444 |
| HAHEA15 | 847013 | 28 | WUblastx.64 | (Q9NWD5) HYPOTHETICAL 31.4 KDA | Q9NWD5 | 76% | 455 | 832 |
| | | | | PROTEIN. | | 99% | 30 | 560 |
| HAJAA47 | 534670 | 29 | WUblastx.64 | (Q9NZA3) CDA14. | Q9NZA3 | 100% | 17 | 157 |
| HAJAY92 | 845601 | 30 | WUblastx.64 | (O00549) ORF2-LIKE PROTEIN | O00549 | 53% | 2226 | 2318 |
| | | | | (FRAGMENT). | | 26% | 769 | 915 |
| | | | | | | 38% | 1653 | 1769 |
| | | | | | | 31% | 1721 | 2242 |
| HAOAG15 | 852204 | 31 | HMMER | PFAM: von Willebrand factor type A domain | PF00092 | 180.1 | 506 | 1057 |
| | | | 2.1.1 | | | | | |
| | | | WUblastx.64 | (O75578) INTEGRIN ALPHA-10 | ITAG_HUMAN | 90% | 8 | 3463 |
| | | | | PRECURSOR. | | | | |
| HAQCE11 | 633730 | 34 | WUblastx.64 | (Q24333) ELASTIN LIKE PROTEIN | Q24333 | 95% | 61 | 132 |
| | | | | (FRAGMENT). | | | | |
| HATCB45 | 631172 | 36 | WUblastx.64 | (Q9D0I6) 2610014F08RIK PROTEIN. | Q9D0I6 | 88% | 490 | 645 |
| HATCI03 | 580805 | 37 | WUblastx.64 | (Q9H743) CDNA: FLJ21394 FIS, CLONE | Q9H743 | 71% | 906 | 688 |
| | | | | COL03536. | | | | |
| HBAGD86 | 838799 | 39 | WUblastx.64 | (Q14287) HYPOTHETICAL PROTEIN | Q14287 | 37% | 801 | 559 |
| | | | | (FRAGMENT). | | | | |
| HBGBC29 | 691473 | 41 | WUblastx.64 | (O60513) BETA-1,4- | B4G4_HUMAN | 61% | 1 | 78 |
| | | | | GALACTOSYLTRANSFERASE 4 (EC 2.4.1.—) | | 98% | 65 | 1021 |
| | | | | (BET | | | | |
| HBHAA81 | 846465 | 43 | WUblastx.64 | (Q9D1G3) 1110011D13RIK PROTEIN. | Q9D1G3 | 89% | 1329 | 1502 |
| | | | | | | 79% | 28 | 1329 |
| HBIAC29 | 831751 | 44 | WUblastx.64 | (Q9D7J5) 2310005N01RIK PROTEIN. | Q9D7J5 | 78% | 25 | 492 |
| | | | | | | 93% | 883 | 927 |
| HBJAB02 | 837309 | 46 | WUblastx.64 | (Q9NXT6) CDNA FLJ20062 FIS, CLONE | Q9NXT6 | 70% | 2 | 1210 |
| | | | | COL01508. | | | | |
| HBJDS79 | 813588 | 49 | WUblastx.64 | (Q9CY11) 2510039O18RIK PROTEIN. | Q9CY11 | 92% | 1119 | 1325 |
| | | | | | | 89% | 1322 | 1519 |
| | | | | | | 93% | 1032 | 1127 |
| | | | | | | 100% | 1509 | 1532 |
| | | | | | | 66% | 2 | 1075 |
| HBJEL16 | 847030 | 50 | WUblastx.64 | (O95297) PROTEIN ZERO RELATED | O95297 | 98% | 285 | 491 |
| | | | | PROTEIN. | | | | |
| HBJKD16 | 853358 | 52 | WUblastx.64 | (Q9NXS4) CDNA FLJ20080 FIS, CLONE | Q9NXS4 | 91% | 8 | 1528 |
| | | | | COL03184. | | | | |
| HBMBM96 | 561935 | 53 | WUblastx.64 | (Q9H387) PRO2550. | Q9H387 | 69% | 661 | 494 |
| | | | | | | 67% | 794 | 639 |
| HBMTX26 | 695704 | 55 | WUblastx.64 | (Q14288) HYPOTHETICAL PROTEIN | Q14288 | 46% | 964 | 608 |
| | | | | (FRAGMENT). | | 61% | 272 | 156 |
| | | | | | | 66% | 136 | 101 |
| | | | | | | 54% | 611 | 507 |
| | | | | | | 58% | 546 | 292 |
| HBMUH74 | 866160 | 56 | WUblastx.64 | (Q9NVW8) CDNA FLJ10462 FIS, CLONE | Q9NVW8 | 100% | 11 | 427 |
| | | | | NT2RP1001494, WEAKLY SIMILAR TO | | | | |
| | | | | MAL | | | | |
| HBMWE61 | 778066 | 57 | WUblastx.64 | (Q9BX88) MAGPHININ DELTA. | Q9BX88 | 100% | 302 | 520 |
| | | | | | | 95% | 869 | 1009 |
| HBNAX40 | 834801 | 58 | WUblastx.64 | (Q9H2K2) TANKYRASE-LIKE PROTEIN | Q9H2K2 | 100% | 1 | 201 |
| | | | | (TANKYRASE 2). | | 100% | 221 | 481 |
| HBSAK32 | 856387 | 61 | WUblastx.64 | (Q9H1Q7) BA12M19.1.3 (NOVEL PROTEIN). | Q9H1Q7 | 100% | 239 | 412 |
| | | | | | | 100% | 95 | 172 |
| HBXCM66 | 639039 | 62 | WUblastx.64 | (Q9H728) CDNA: FLJ21463 FIS, CLONE | Q9H728 | 65% | 988 | 809 |
| | | | | COL04765. | | 77% | 836 | 690 |
| HBXCX15 | 637542 | 63 | WUblastx.64 | (Q9GMX5) HYPOTHETICAL 12.9 KDA | Q9GMX5 | 41% | 726 | 827 |
| | | | | PROTEIN. | | 52% | 578 | 730 |
| HCDBO32 | 831942 | 64 | WUblastx.64 | (AAH17472) Hypothetical 21.3 kDa protein. | AAH17472 | 69% | 643 | 801 |
| | | | | | | 100% | 239 | 583 |
| HCE2H52 | 847007 | 65 | WUblastx.64 | probable transposase - human transposon | pir\|S72481\|S72481 | 60% | 564 | 758 |
| | | | | MER37 | | 77% | 430 | 537 |
| | | | | | | 75% | 754 | 1251 |
| HCE3B04 | 831151 | 66 | WUblastx.64 | (O43466) HYPOTHETICAL 31.3 KDA | O43466 | 98% | 836 | 1003 |
| | | | | PROTEIN (FRAGMENT). | | 45% | 217 | 972 |
| HCEEQ25 | 531784 | 69 | WUblastx.64 | (P78349) SODIUM CHANNEL 2. | P78349 | 95% | 311 | 433 |
| | | | | | | 93% | 433 | 480 |
| | | | | | | 100% | 658 | 714 |
| HCEEU18 | 688041 | 70 | WUblastx.64 | (Q9N083) UNNAMED PORTEIN PRODUCT. | Q9N083 | 49% | 186 | 10 |
| | | | | | | 56% | 1223 | 933 |
| HCEFZ82 | 831745 | 71 | WUblastx.64 | (Q9BV23) SIMILAR TO LIPASE PROTEIN. | Q9BV23 | 95% | 594 | 782 |
| | | | | | | 100% | 17 | 604 |
| HCFLN88 | 610000 | 73 | WUblastx.64 | (Q9BQE9) SIMILAR TO B-CELL | Q9BQE9 | 87% | 278 | 475 |
| | | | | CLL/LYMPHOMA 7B (UNKNOWN) | | | | |
| | | | | (PROTEIN FOR MGC | | | | |
| HCFLT90 | 788578 | 74 | WUblastx.64 | (Q9CVC2) 2210013O21RIK PROTEIN | Q9CVC2 | 53% | 612 | 445 |
| | | | | (FRAGMENT). | | 70% | 850 | 671 |
| HCRAY10 | 695709 | 76 | WUblastx.64 | (AAH08671) Similar to RIKEN cDNA | AAH08671 | 77% | 72 | 440 |
| | | | | 5530601I19 gene. | | | | |
| HCRBF72 | 828945 | 77 | WUblastx.64 | (Q9UI95) MITOTIC SPINDLE ASSEMBLY | MD22_HUMAN | 94% | 191 | 823 |
| | | | | CHECKPOINT PROTEIN MAD2B | | | | |
| HCUCF89 | 637986 | 80 | WUblastx.64 | (Q9P147) PRO2822. | Q9P147 | 100% | 421 | 398 |
| | | | | | | 82% | 494 | 426 |
| HCUCK44 | 790277 | 81 | WUblastx.64 | hypothetical protein DKFZp564J157.1 - human | pir\|T34520\|T34520 | 100% | 29 | 157 |
| | | | | (fragment) | | 100% | 377 | 403 |
| HDPDI72 | 897277 | 89 | WUblastx.64 | adult-specific brush border protein - rabbit | pir\|C45665\|C45665 | 64% | 180 | 230 |
| | | | | | | 83% | 11 | 100 |
| HDPFF10 | 853513 | 91 | HMMER | PFAM: Leucine Rich Repeat | PF00560 | 65.1 | 729 | 800 |
| | | | 2.1.1 | | | | | |
| HDPFU43 | 790189 | 92 | WUblastx.64 | (AAH01057) Tyrosylprotein sulfotransferase 2. | AAH01057 | 100% | 360 | 1349 |
| | | | | | | 58% | 220 | 348 |
| HDPIE44 | 899328 | 94 | WUblastx.64 | (Q9D666) 4632417G13RIK PROTEIN. | Q9D666 | 62% | 102 | 2453 |
| HDPIU94 | 813352 | 95 | WUblastx.64 | (Q9BVF7) SIMILAR TO HYPOTHETICAL | Q9BVF7 | 99% | 63 | 1703 |
| | | | | PROTEIN FLJ10422. | | | | |
| HDPOL37 | 745377 | 96 | WUblastx.64 | (AAK40301) TRH4. | AAK40301 | 70% | 502 | 323 |
| | | | | | | 60% | 1325 | 483 |
| HDPPW82 | 778405 | 99 | WUblastx.64 | hypothetical protein UL126 - human | pir\|S09875\|S09875 | 94% | 6 | 116 |
| | | | | cytomegalovirus (strain AD169) | | | | |
| HDTAU35 | 838139 | 101 | WUblastx.64 | (Q9T9V8) NADH DEHYDROGENASE | Q9T9V8 | 87% | 56 | 175 |
| | | | | SUBUNIT 3. | | 83% | 305 | 340 |
| HDTAV54 | 801898 | 102 | WUblastx.64 | (AAH01231) Glutathione S-transferase subunit | AAH01231 | 100% | 13 | 303 |
| | | | | 13 hom | | | | |
| HDTGW48 | 827285 | 103 | WUblastx.64 | (Q9P1W8) SIRP-B2. | Q9P1W8 | 100% | 783 | 1100 |
| | | | | | | 79% | 1359 | 1757 |
| HE6CS65 | 762960 | 108 | WUblastx.64 | (Q9H7C6) CDNA: FLJ21047 FIS, CLONE | Q9H7C6 | 98% | 938 | 1378 |
| | | | | CAS00253. | | | | |
| HE6DO92 | 562767 | 109 | WUblastx.64 | gag polyprotein - human endogenous virus S71 | pir\|A46312\|A46312 | 63% | 623 | 895 |
| | | | | | | 80% | 19 | 633 |
| HE6EY13 | 847058 | 110 | WUblastx.64 | (O95476) HYPOTHETICAL 28.3 KDA | O95476 | 92% | 5 | 472 |
| | | | | PROTEIN. | | | | |
| HE8BQ49 | 589443 | 111 | WUblastx.64 | hypothetical protein - human transposon | pir\|S72482\|S72482 | 75% | 343 | 474 |
| | | | | MER37 | | 64% | 105 | 248 |
| HE8SG96 | 862016 | 112 | WUblastx.64 | (Q9P195) PRO1722. | Q9P195 | 58% | 1997 | 1845 |
| | | | | | | 63% | 1854 | 1687 |
| HE9CY05 | 834826 | 113 | WUblastx.64 | (Q9CX63) 6030468B19RIK PROTEIN. | Q9CX63 | 48% | 434 | 742 |
| | | | | | | 57% | 55 | 426 |
| HEAAW94 | 847340 | 115 | WUblastx.64 | (Q9UEV9) ACTIN-BINDING PROTEIN | Q9UEV9 | 94% | 285 | 890 |
| | | | | HOMOLOG ABP-278. | | 41% | 285 | 884 |
| HEBFR46 | 847064 | 119 | WUblastx.64 | (Q9NX85) CDNA FLJ20378 FIS, CLONE | Q9NX85 | 80% | 1111 | 1022 |
| | | | | KAIA0536. | | 84% | 1265 | 1110 |
| HEBGE07 | 798096 | 120 | WUblastx.64 | (Q9NX85) CDNA FLJ20378 FIS, CLONE | Q9NX85 | 79% | 1851 | 1720 |
| | | | | KAIA0536. | | | | |
| HELAT35 | 693175 | 121 | WUblastx.64 | (Q9H728) CDNA: FLJ21463 FIS, CLONE | Q9H728 | 72% | 2092 | 1802 |
| | | | | COL04765. | | | | |
| HELBU54 | 637624 | 122 | WUblastx.64 | (Q9H728) CDNA: FLJ21463 FIS, CLONE | Q9H728 | 59% | 1255 | 1031 |
| | | | | COL04765. | | | | |
| HEMEY47 | 834491 | 123 | WUblastx.64 | (Q9H387) PRO2550. | Q9H387 | 68% | 513 | 587 |
| | | | | | | 74% | 578 | 838 |
| HEPBA14 | 855935 | 125 | WUblastx.64 | (Q9BTY9) UNKNOWN (PROTEIN FOR | Q9BTY9 | 87% | 423 | 515 |
| | | | | IMAGE: 2823490) (FRAGMENT). | | 71% | 15 | 77 |
| | | | | | | 92% | 85 | 426 |
| HEQAH80 | 701984 | 126 | WUblastx.64 | (Q9GMX5) HYPOTHETICAL 12.9 KDA | Q9GMX5 | 60% | 818 | 1045 |
| | | | | PROTEIN. | | | | |
| HETDW58 | 790557 | 127 | WUblastx.64 | unidentified 27.6K protein, spliced form A - | pir\|JC7586\|JC7586 | 95% | 324 | 1058 |
| | | | | human | | | | |
| HFEAY59 | 658685 | 131 | WUblastx.64 | (Q9Z320) C29. | Q9Z320 | 67% | 50 | 1153 |
| HFEBO17 | 852218 | 132 | WUblastx.64 | (BAB55130) CDNA FLJ14559 fis, clone | BAB55130 | 100% | 523 | 624 |
| | | | | NT2RM2001998. | | 91% | 606 | 809 |
| HFGAJ16 | 580824 | 133 | WUblastx.64 | CDM protein - human | pir\|S44279\|S44279 | 97% | 263 | 403 |
| HFIJA29 | 839206 | 135 | WUblastx.64 | (Q9UHT1) PRO1902 PROTEIN. | Q9UHT1 | 46% | 889 | 806 |
| | | | | | | 59% | 1026 | 880 |
| HFIJA68 | 847074 | 136 | WUblastx.64 | (Q9UHE8) SIX TRANSMEMBRANE | STEA_HUMAN | 89% | 13 | 399 |
| | | | | EPITHELIAL ANTIGEN OF PROSTATE. | | | | |
| HFKES05 | 827572 | 137 | WUblastx.64 | (BAB55088) CDNA FLJ14496 fis, clone | BAB55088 | 85% | 84 | 314 |
| | | | | NT2RM1000035. | | 94% | 367 | 1722 |
| HFKEU12 | 634006 | 138 | WUblastx.64 | hypothetical protein 3 - rat | pir\|S21347\|S21347 | 52% | 695 | 745 |
| | | | | | | 50% | 757 | 933 |
| | | | | | | 40% | 774 | 1007 |
| | | | | | | 54% | 387 | 692 |
| HFPDS07 | 821646 | 140 | WUblastx.64 | (O94925) GLUTAMINASE, KIDNEY | GLSK_HUMAN | 78% | 343 | 513 |
| | | | | ISOFORM, MITOCHONDRIAL PRECURS | | 74% | 2 | 436 |
| HFVGK35 | 731868 | 143 | WUblastx.64 | (Q9GMX5) HYPOTHETICAL 12.9 KDA | Q9GMX5 | 65% | 832 | 608 |
| | | | | PROTEIN. | | | | |
| HFXBT66 | 580831 | 145 | WUblastx.64 | (Q9H387) PRO2550. | Q9H387 | 73% | 739 | 807 |
| | | | | | | 58% | 809 | 907 |
| | | | | | | 62% | 564 | 764 |
| HGBER72 | 826710 | 147 | WUblastx.64 | (Q9H387) PRO2550. | Q9H387 | 71% | 1061 | 969 |
| | | | | | | 78% | 1104 | 1063 |
| | | | | | | 77% | 1237 | 1103 |
| HHEOW19 | 886174 | 152 | WUblastx.64 | (O18973) RAB5 GDP/GTP EXCHANGE | O18973 | 77% | 417 | 623 |
| | | | | FACTOR, RABEX5. | | 91% | 611 | 715 |
| | | | | | | 56% | 166 | 378 |
| | | | | | | 92% | 129 | 167 |
| HHFFF87 | 778071 | 154 | WUblastx.64 | coatomer zeta chain - bovine | pir\|A49465\|A49465 | 100% | 50 | 145 |
| HHFFL34 | 753230 | 155 | WUblastx.64 | (BAB55306) CDNA FLJ14793 fis, clone | BAB55306 | 100% | 9 | 710 |
| | | | | NT2RP4001174, w | | | | |
| HHFFS40 | 824059 | 156 | WUblastx.64 | (Q9H4A6) GOLGI PROTEIN. | Q9H4A6 | 100% | 3 | 251 |
| HHGDT26 | 658692 | 158 | WUblastx.64 | (Q9H728) CDNA: FLJ21463 FIS, CLONE | Q9H728 | 69% | 1580 | 1290 |
| | | | | COL04765. | | | | |
| HHSBI65 | 801910 | 160 | WUblastx.64 | (Q9H5W9) CDNA: FLJ22888 FIS, CLONE | Q9H5W9 | 100% | 270 | 407 |
| | | | | KAT03934. | | 94% | 479 | 1300 |
| HHSDI53 | 862028 | 161 | WUblastx.64 | (Q9H387) PRO2550. | Q9H387 | 70% | 1108 | 935 |
| | | | | | | 71% | 1241 | 1107 |
| | | | | | | 75% | 1276 | 1241 |
| HSBA38 | 561711 | 164 | WUblastx.64 | (Q9H387) PRO2550. | Q9H387 | 53% | 919 | 836 |
| | | | | | | 53% | 996 | 907 |
| | | | | | | 51% | 842 | 687 |
| HJMAA03 | 824062 | 165 | WUblastx.64 | (Q9N032) UNNAMED PROTEIN PRODUCT. | Q9N032 | 71% | 415 | 528 |
| HJMAV41 | 862029 | 166 | WUblastx.64 | brain-specific membrane anchor protein - | pir\|JC7110\|JC7110 | 100% | 14 | 475 |
| | | | | human | | | | |
| HJMAY90 | 793678 | 167 | WUblastx.64 | (Q9DC16) 1200007D18RIK PROTEIN | Q9DC16 | 77% | 100 | 312 |
| | | | | (RIKEN CDNA 1200007D18 GENE). | | 98% | 315 | 968 |
| HJPBE39 | 801960 | 168 | WUblastx.64 | (Q9CUS4) 4833420K19RIK PROTEIN | Q9CUS4 | 33% | 1 | 621 |
| | | | | (FRAGMENT). | | 74% | 213 | 1007 |
| HJPCH08 | 840365 | 170 | WUblastx.64 | (O95235) RABKINESIN-6 (RAB6- | RB6K_HUMAN | 93% | 9 | 596 |
| | | | | INTERACTING KINESIN-LIKE PROTEI | | | | |
| HKABU43 | 838573 | 171 | WUblastx.64 | (AAH03633) Translocase of outer | AAH03633 | 100% | 33 | 62 |
| | | | | mitochondrial membr | | 92% | 26 | 1597 |
| HKAC179 | 853361 | 172 | WUblastx.64 | (Q9BGV8) HYPOTHETICAL 10.0 KDA | Q9BGV8 | 72% | 886 | 1104 |
| | | | | PROTEIN. | | | | |
| HKAFF50 | 790192 | 173 | WUblastx.64 | (Q9P1G7) PRO1777. | Q9P1G7 | 99% | 1753 | 1424 |
| HKGBF25 | 738797 | 174 | WUblastx.64 | (Q9HBS7) HYPOTHETICAL 14.2 KDA | Q9HBS7 | 71% | 1708 | 1688 |
| | | | | PROTEIN. | | 56% | 1956 | 1708 |
| HKMLK03 | 734213 | 175 | WUblastx.64 | (Q9N083) UNNAMED PORTEIN PRODUCT. | Q9N083 | 50% | 981 | 832 |
| | | | | | | 73% | 856 | 731 |
| HLDQU79 | 740755 | 179 | WUblastx.64 | (O75477) KE04P. | O75477 | 100% | 105 | 1142 |
| HLDQU79 | 837599 | 390 | blastx.2 | KE04P. | sp\|O75477\|O75477 | 99% | 81 | 1118 |
| HLDRT09 | 830544 | 180 | WUblastx.64 | (Q9HAQ7) ATP-BINDING CASSETTE | Q9HAQ7 | 86% | 2 | 469 |
| | | | | HALF-TRANSPORTER. | | | | |
| HLHAP05 | 638476 | 181 | WUblastx.64 | (Q9HA67) CDNA FLJ12155 FIS, CLONE | Q9HA67 | 55% | 1553 | 1500 |
| | | | | MAMMA1000472. | | 72% | 1650 | 1585 |
| | | | | | | 77% | 1807 | 1646 |
| HLIBO72 | 883431 | 183 | WUblastx.64 | (AAH07829) Similar to hypothetical protein | AAH07829 | 100% | 65 | 547 |
| | | | | AF140225 | | | | |
| HLICE88 | 840321 | 184 | WUblastx.64 | fibrinogen gamma-A chain precursor [validated] - | pir\|A90470\|FGHUG | 89% | 3 | 584 |
| | | | | human | | | | |
| HLMBW89 | 701996 | 187 | WUblastx.64 | (AAH07983) Unknown (protein for | AAH07983 | 85% | 390 | 247 |
| | | | | MGC: 16279). | | | | |
| HLMGP50 | 647603 | 188 | WUblastx.64 | (Q9GMI7) HYPOTHETICAL 9.0 KDA | Q9GMI7 | 61% | 765 | 709 |
| | | | | PROTEIN. | | 72% | 935 | 807 |
| HLQAS12 | 886180 | 190 | WUblastx.64 | (Q9XTA8) LECTIN-LIKE OXIDIZED LDL | Q9XTA8 | 71% | 690 | 842 |
| | | | | RECEPTOR. | | 52% | 364 | 711 |
| HLQCL64 | 864966 | 191 | HMMER | PFAM: Major intrinsic protein | PF00230 | 87.3 | 87 | 449 |
| | | | 2.1.1 | | | | | |
| | | | WUblastx.64 | aquaporin 9 - human | pir\|JC5973\|JC5973 | 98% | 18 | 548 |
| HLYGB19 | 838083 | 196 | WUblastx.64 | (Q9H0Q1) HYPOTHETICAL 12.3 KDA | Q9H0Q1 | 97% | 204 | 518 |
| | | | | PROTEIN. | | | | |
| HLYGY91 | 658703 | 198 | WUblastx.64 | (Q9H8N0) CDNA FLJ13386 FIS, CLONE | Q9H8N0 | 94% | 221 | 391 |
| | | | | PLACE1001104, WEAKLY SIMILAR TO | | | | |
| | | | | MYO | | | | |
| HMDAB29 | 584789 | 200 | WUblastx.64 | (Q9NX17) CDNA FLJ20489 FIS, CLONE | Q9NX17 | 72% | 1186 | 890 |
| | | | | KAT08285. | | | | |
| HMEBB82 | 783077 | 202 | WUblastx.64 | (Q9NSE4) MITOCHONDRIAL ISOLEUCINE | Q9NSE4 | 99% | 2 | 2206 |
| | | | | TRNA SYNTHETASE (FRAGMENT). | | | | |
| HMEDE24 | 837027 | 203 | WUblastx.64 | (Q9BVH9) SIMILAR TO GLUCOSE | Q9BVH9 | 94% | 188 | 1159 |
| | | | | REGULATED PROTEIN, 58 KDA. | | 42% | 101 | 742 |
| HMELM75 | 587307 | 204 | WUblastx.64 | (Q9NVW5) HYPOTHETICAL 31.3 KDA | Q9NVW5 | 100% | 137 | 391 |
| | | | | PROTEIN. | | | | |
| HMICP65 | 847403 | 208 | WUblastx.64 | (Q9HAU9) GUANINE NUCLEOTIDE | Q9HAU9 | 99% | 8 | 892 |
| | | | | BINDING PROTEIN BETA SUBUNIT 5L. | | 22% | 269 | 943 |
| HMSBE04 | 709672 | 210 | WUblastx.64 | (Q9H5V8) CDNA: FLJ22969 FIS, CLONE | Q9H5V8 | 85% | 182 | 3 |
| | | | | KAT10759. | | | | |
| HMSCL38 | 801919 | 211 | WUblastx.64 | (Q9P195) PRO1722. | Q9P195 | 64% | 1272 | 1460 |
| | | | | | | 72% | 2918 | 2844 |
| | | | | | | 64% | 2851 | 2759 |
| | | | | | | 76% | 2769 | 2653 |
| HMSCR69 | 843059 | 212 | HMMER | PFAM: Zinc finger present in dystrophin, | PF00569 | 48.2 | 113 | 250 |
| | | | 2.1.1 | CBP/p300 | | | | |
| | | | WUblastx.64 | (Q9BWK2) POTASSIUM CHANNEL | Q9BWK2 | 78% | 107 | 1231 |
| | | | | MODULATORY FACTOR. | | | | |
| HMSHU20 | 847410 | 213 | WUblastx.64 | (Q9H728) CDNA: FLJ21463 FIS, CLONE | Q9H728 | 47% | 1722 | 1453 |
| | | | | COL04765. | | | | |
| HMTAB77 | 847411 | 215 | WUblastx.64 | (P43243) MATRIN 3. | MAT3_HUMAN | 95% | 630 | 1385 |
| | | | | | | 64% | 287 | 628 |
| | | | | | | 22% | 2002 | 2175 |
| | | | | | | 98% | 3255 | 3428 |
| | | | | | | 31% | 2041 | 2190 |
| | | | | | | 22% | 2047 | 2181 |
| | | | | | | 23% | 2584 | 2763 |
| | | | | | | 75% | 2440 | 2760 |
| | | | | | | 27% | 2596 | 2709 |
| | | | | | | 35% | 1705 | 1797 |
| | | | | | | 35% | 3312 | 3404 |
| | | | | | | 91% | 1384 | 2328 |
| HMUAE26 | 747403 | 216 | WUblastx.64 | (Q9P2R4) SEVEN TRANSMEMBRANE | Q9P2R4 | 89% | 153 | 575 |
| | | | | DOMAIN ORPHAN RECEPTOR. | | 86% | 577 | 1272 |
| HMVDU15 | 801969 | 217 | WUblastx.64 | (Q9BTJ2) SIMILAR TO CGI-30 PROTEIN. | Q9BTJ2 | 100% | 75 | 917 |
| HMWJF53 | 758158 | 218 | WUblastx.64 | (Q9GZU7) NUCLEAR LIM INTERACTOR- | Q9GZU7 | 91% | 3 | 170 |
| | | | | INTERACTING FACTOR. | | 100% | 154 | 720 |
| HNEAK81 | 722235 | 219 | WUblastx.64 | (Q9N083) UNNAMED PORTEIN PRODUCT. | Q9N083 | 56% | 770 | 1087 |
| HNECL22 | 799541 | 220 | WUblastx.64 | (Q9P0J2) MITOCHONDRIAL SOLUTE | Q9P0J2 | 94% | 1771 | 2331 |
| | | | | CARRIER. | | | | |
| HNEDH88 | 815675 | 222 | WUblastx.64 | (Q9GML5) HYPOTHETICAL 8.0 KDA | Q9GML5 | 56% | 1706 | 1849 |
| | | | | PROTEIN. | | | | |
| HNFAC50 | 815676 | 223 | WUblastx.64 | (Q9H286) SEROLOGICALLY DEFINED | Q9H286 | 100% | 425 | 282 |
| | | | | BREAST CANCER ANTIGEN NY-BR-20 | | | | |
| | | | | (FRAGME | | | | |
| HNFHF34 | 722237 | 224 | WUblastx.64 | (Q9NZX0) HSPC068. | Q9NZX0 | 100% | 9 | 431 |
| | | | | | | 34% | 9 | 404 |
| | | | | | | 35% | 3 | 407 |
| | | | | | | 33% | 9 | 407 |
| | | | | | | 32% | 129 | 422 |
| HNGAM58 | 688114 | 225 | WUblastx.64 | (Q9H728) CDNA: FLJ21463 FIS, CLONE | Q9H728 | 71% | 1020 | 1061 |
| | | | | COL04765. | | 85% | 1081 | 1143 |
| | | | | | | 53% | 818 | 1003 |
| HNGJB41 | 852178 | 233 | WUblastx.64 | probable oxysterol-binding protein DJ430N08.1 - | pir\|T02435\|T02435 | 100% | 128 | 9 |
| | | | | human (fragment) | | | | |
| HNHCT47 | 634691 | 238 | WUblastx.64 | (Q9H728) CDNA: FLJ21463 FIS, CLONE | Q9H728 | 46% | 434 | 396 |
| | | | | COL04765. | | 56% | 621 | 448 |
| HNHFE71 | 834487 | 239 | WUblastx.64 | hypothetical protein DKFZp761L0812.1 - | pir\|T47135\|T47135 | 67% | 822 | 583 |
| | | | | human (fragment) | | | | |
| HNHGK22 | 597451 | 240 | WUblastx.64 | hypothetical protein (L1H 3′ region) - human | pir\|B34087\|B34087 | 41% | 483 | 37 |
| | | | | | | 41% | 333 | 10 |
| | | | | | | 50% | 733 | 485 |
| HNHHB10 | 634589 | 241 | WUblastx.64 | (Q9BVD9) UNKNOWN (PROTEIN FOR | Q9BVD9 | 70% | 658 | 608 |
| | | | | MGC: 5149). | | 73% | 845 | 711 |
| | | | | | | 73% | 717 | 661 |
| HNHKI74 | 777856 | 242 | WUblastx.64 | (Q9BGX7) HYPOTHETICAL 13.0 KDA | Q9BGX7 | 64% | 350 | 541 |
| | | | | PROTEIN. | | | | |
| HNTBT17 | 855957 | 243 | WUblastx.64 | (Q9NZF3) BM-001. | Q9NZF3 | 45% | 818 | 1342 |
| | | | | | | 61% | 729 | 947 |
| | | | | | | 84% | 556 | 774 |
| HODBV05 | 825283 | 247 | WUblastx.64 | (Q13878) 94 KDA B-RAF PROTEIN | Q13878 | 100% | 566 | 661 |
| | | | | (FRAGMENT). | | | | |
| HODCZ32 | 836069 | 248 | WUblastx.64 | (Q9NS16) WD-REPEAT PROTEIN 9 | WDR9_HUMAN | 86% | 8 | 331 |
| | | | | (FRAGMENT). | | | | |
| HORBV76 | 839270 | 252 | WUblastx.64 | (Q9Y2B2) PHOSPHATIDYLINOSITOL | Q9Y2B2 | 91% | 30 | 761 |
| | | | | GLYCAN, CLASS L (EC 3.5.—.—) PIG-L PRO | | | | |
| HOSEC25 | 688055 | 253 | WUblastx.64 | (Q9BGW3) HYPOTHETICAL 13.5 KDA | Q9BGW3 | 73% | 530 | 631 |
| | | | | PROTEIN. | | 65% | 627 | 809 |
| | | | | | | 64% | 1501 | 1451 |
| | | | | | | 56% | 1440 | 1222 |
| HOSEJ94 | 795132 | 255 | WUblastx.64 | (Q9GZY3) HT032 (PRK1-ASSOCIATED | Q9GZY3 | 92% | 363 | 986 |
| | | | | PROTEIN AWP1) (PROTEIN ASSOCIATED | | | | |
| | | | | WIT | | | | |
| HOUCA21 | 655359 | 256 | WUblastx.64 | (Q9HBS7) HYPOTHETICAL 14.2 KDA | Q9HBS7 | 78% | 988 | 1110 |
| | | | | PROTEIN. | | | | |
| HOUDE92 | 580866 | 257 | WUblastx.64 | (Q9HBT2) HYPOTHETICAL 17.2 KDA | Q9HBT2 | 96% | 21 | 245 |
| | | | | PROTEIN. | | | | |
| HOUED72 | 858547 | 258 | WUblastx.64 | (Q9CRP8) RIBOSOMAL PROTEIN L15 | Q9CRP8 | 84% | 676 | 774 |
| | | | | (FRAGMENT). | | 85% | 110 | 682 |
| HOUFS04 | 771564 | 259 | WUblastx.64 | (Q9VN45) CG12001 PROTEIN. | Q9VN45 | 32% | 1362 | 1982 |
| | | | | | | 39% | 915 | 1106 |
| | | | | | | 26% | 141 | 380 |
| HOUHI25 | 888279 | 260 | WUblastx.64 | (O95003) WUGSC: H_DJ0593H12.2 | O95003 | 94% | 73 | 783 |
| | | | | PROTEIN. | | | | |
| HPCAL26 | 762822 | 262 | WUblastx.64 | (O95084) SERINE PROTEASE | O95084 | 98% | 398 | 640 |
| | | | | (HYPOTHETICAL 43.0 KDA PROTEIN) | | 76% | 135 | 497 |
| | | | | (PROTEASE, S | | | | |
| HPFBA54 | 635539 | 264 | WUblastx.64 | (Q9HBW6) NAG13. | Q9HBW6 | 76% | 795 | 733 |
| | | | | | | 73% | 766 | 602 |
| | | | | | | 84% | 602 | 393 |
| | | | | | | 86% | 135 | 91 |
| | | | | | | 79% | 394 | 128 |
| HPFCI36 | 855966 | 265 | WUblastx.64 | (Q9NX47) CDNA FLJ20445 FIS, CLONE | Q9NX47 | 100% | 9 | 320 |
| | | | | KAT05170. | | | | |
| HPJBU43 | 862058 | 266 | WUblastx.64 | (Q9P1E1) PRO2221. | Q9P1E1 | 54% | 187 | 44 |
| HPMCJ84 | 562779 | 268 | WUblastx.64 | (Q9NX85) CDNA FLJ20378 FIS, CLONE | Q9NX85 | 74% | 619 | 479 |
| | | | | KAIA0536. | | 69% | 759 | 613 |
| HPMCV30 | 612870 | 269 | WUblastx.64 | (Q9BVD9) UNKNOWN (PROTEIN FOR | Q9BVD9 | 76% | 384 | 334 |
| | | | | MGC: 5149.) | | 68% | 590 | 399 |
| HPTRM02 | 812879 | 272 | WUblastx.64 | (Q9UJU6) SRC HOMOLOGY 3 DOMAIN- | Q9UJU6 | 92% | 332 | 940 |
| | | | | CONTAINING PROTEIN HIP-55 (DREBRIN | | 97% | 2 | 106 |
| | | | | F). | | 96% | 98 | 190 |
| HRADA42 | 827302 | 275 | WUblastx.64 | hypothetical protein C11D2.4 - Caenorhabditis | pir\|T32961\|T32961 | 48% | 387 | 668 |
| | | | | elegans | | 74% | 668 | 931 |
| HRADF49 | 866481 | 276 | WUblastx.64 | (Q9H6L1) CDNA: FLJ22169 FIS, CLONE | Q9H6L1 | 90% | 13 | 825 |
| | | | | HRC00632. | | 84% | 813 | 1379 |
| | | | | | | 75% | 1291 | 1593 |
| | | | | | | 34% | 1590 | 1685 |
| HRADN25 | 800628 | 277 | WUblastx.64 | (Q9HB07) MYG1 PROTEIN. | MYG1_HUMAN | 96% | 47 | 1174 |
| HRDAI17 | 560720 | 279 | WUblastx.64 | (Q9NUM6) CDNA FLJ11267 FIS, CLONE | Q9NUM6 | 59% | 1305 | 1475 |
| | | | | PLACE1009174. | | | | |
| HRDDQ39 | 840405 | 280 | WUblastx.64 | (Q9NX85) CDNA FLJ20378 FIS, CLONE | Q9NX85 | 53% | 582 | 436 |
| | | | | KAIA0536. | | 65% | 775 | 578 |
| HRDER22 | 688056 | 281 | WUblastx.64 | (Q9NW07) CDNA FLJ10390 FIS, CLONE | Q9NW07 | 80% | 9 | 248 |
| | | | | NT2RM4000104, MODERATELY SIMILAR | | 100% | 357 | 431 |
| | | | | TO | | 39% | 120 | 227 |
| | | | | | | 28% | 15 | 203 |
| | | | | | | 38% | 254 | 316 |
| HRDFK37 | 840381 | 282 | WUblastx.64 | (Q9P195) PRO1722. | Q9P195 | 69% | 536 | 652 |
| | | | | | | 40% | 50 | 115 |
| HRGBD54 | 828436 | 283 | WUblastx.64 | (O95819) HPK/GCK-LIKE KINASE HGK. | O95819 | 51% | 32 | 253 |
| | | | | | | 74% | 253 | 645 |
| | | | | | | 27% | 6 | 149 |
| | | | | | | 92% | 781 | 2019 |
| HSAVA08 | 580870 | 284 | WUblastx.64 | (Q9BGW3) HYPOTHETICAL 13.5 KDA | Q9BGW3 | 57% | 949 | 896 |
| | | | | PROTEIN. | | 42% | 926 | 792 |
| | | | | | | 63% | 796 | 764 |
| | | | | | | 66% | 1059 | 934 |
| HSAWZ40 | 634000 | 286 | WUblastx.64 | (O00549) ORF2-LIKE PROTEIN | O00549 | 64% | 951 | 610 |
| | | | | (FRAGMENT). | | 60% | 613 | 8 |
| HSDZM54 | 637870 | 287 | WUblastx.64 | NADH dehydrogenase (ubiquinone) (EC | pir\|A00422\|DNHUN3 | 88% | 226 | 360 |
| | | | | 1.6.5.3) chain 3 - human mitochondrion | | | | |
| HSHAX04 | 812178 | 288 | WUblastx.64 | peptidylprolyl isomerase (EC 5.2.1.8) A - | pir\|S66681\|S66681 | 96% | 14 | 916 |
| | | | | human | | | | |
| HSHBF76 | 715838 | 289 | WUblastx.64 | (AAH08335) Unknown (protein for | AAH08335 | 86% | 762 | 457 |
| | | | | IMAGE: 3506202) (Fra | | 73% | 882 | 748 |
| | | | | | | 100% | 1267 | 836 |
| HSLHX15 | 777861 | 292 | WUblastx.64 | catalase (EC 1.11.1.6) - Campylobacter jejuni | pir\|I40767\|I40767 | 86% | 162 | 76 |
| HSOAH16 | 827058 | 295 | WUblastx.64 | (Q9NX85) CDNA FLJ20378 FIS, CLONE | Q9NX85 | 57% | 682 | 623 |
| | | | | KAIA0536. | | 81% | 624 | 544 |
| | | | | | | 68% | 524 | 384 |
| HSQES57 | 831222 | 297 | WUblastx.64 | (Q96EW4) Unknown (protein for MGC: 19936). | Q96EW4 | 94% | 195 | 980 |
| HSRBE06 | 871264 | 298 | WUblastx.64 | (Q9H387) PRO2550. | Q9H387 | 70% | 1608 | 1327 |
| HSRFD18 | 840771 | 299 | WUblastx.64 | (Q9H941) CDNA FLJ13033 FIS, CLONE | Q9H941 | 100% | 437 | 559 |
| | | | | NT2RP3001126. | | | | |
| HSSDI26 | 560722 | 300 | WUblastx.64 | (Q9BVD9) UNKNOWN (PROTEIN FOR | Q9BVD9 | 68% | 1398 | 1264 |
| | | | | MGC: 5149). | | | | |
| HSSEA64 | 853395 | 301 | WUblastx.64 | (Q9HBT2) HYPOTHETICAL 17.2 KDA | Q9HBT2 | 98% | 7 | 243 |
| | | | | PROTEIN. | | | | |
| HSSEF77 | 658725 | 302 | WUblastx.64 | (O95637) WW DOMAIN BINDING | O95637 | 42% | 10 | 246 |
| | | | | PROTEIN-1. | | 83% | 296 | 829 |
| HSSFE38 | 742512 | 303 | HMMER | PFAM: Ribonuclease HII | PF01351 | 76.3 | 184 | −142 |
| | | | 2.1.1 | | | | | |
| | | | WUblastx.64 | (O75792) RIBONUCLEASE HI LARGE | RNHL_HUMAN | 91% | 156 | 635 |
| | | | | SUBUNIT (EC 3.1.26.—) (RNASE | | 99% | 587 | 1051 |
| HSWBE76 | 751308 | 305 | WUblastx.64 | (Q9NW15) CDNA FLJ10375 FIS, CLONE | Q9NW15 | 100% | 126 | 266 |
| | | | | NT2RM2001950. | | | | |
| HSXCP38 | 895392 | 306 | WUblastx.64 | hydroxymethylglutaryl-CoA lyase (EC 4.1.3.4) - | pir\|B45470\|B45470 | 70% | 17 | 895 |
| | | | | chicken | | | | |
| HSYBI06 | 740766 | 307 | WUblastx.64 | (Q9BGV8) HYPOTHETICAL 10.0 KDA | Q9BGV8 | 69% | 916 | 954 |
| | | | | PROTEIN. | | 78% | 821 | 913 |
| HT5GR59 | 801930 | 309 | WUblastx.64 | (O60496) DOCKING PROTEIN. | O60496 | 72% | 70 | 1284 |
| HTAEI78 | 637684 | 310 | WUblastx.64 | (Q9UKQ2) ADAM 28 PRECURSOR (EC | AD28_HUMAN | 90% | 85 | 174 |
| | | | | 3.4.24.—) (A DISINTEGRIN AND | | | | |
| HTDAA78 | 566861 | 311 | WUblastx.64 | (Q9D8E7) 5830443F10RIK PROTEIN. | Q9D8E7 | 58% | 84 | 302 |
| HTECB02 | 806305 | 312 | WUblastx.64 | (AAK39520) BTB domain protein (Fragment). | AAK39520 | 95% | 33 | 1211 |
| HTEEW69 | 764835 | 315 | WUblastx.64 | (Q9Z1H7) GSG1. | Q9Z1H7 | 65% | 850 | 927 |
| | | | | | | 85% | 707 | 769 |
| | | | | | | 50% | 519 | 662 |
| | | | | | | 66% | 908 | 943 |
| | | | | | | 65% | 182 | 544 |
| HTEGS07 | 827700 | 316 | WUblastx.64 | (Q9D143) 1110030K22RIK PROTEIN. | Q9D143 | 96% | 183 | 593 |
| HTEMQ17 | 840387 | 320 | WUblastx.64 | (Q9D4P8) 4930579G24RIK PROTEIN. | Q9D4P8 | 90% | 120 | 359 |
| HTGBK95 | 834490 | 321 | WUblastx.64 | (Q9GMX5) HYPOTHETICAL 12.9 KDA | Q9GMX5 | 66% | 126 | 55 |
| | | | | PROTEIN. | | 70% | 235 | 116 |
| HTLBT80 | 840045 | 323 | WUblastx.64 | (Q9NQQ7) BA394O2.1 (CGI-15 PROTEIN). | Q9NQQ7 | 76% | 1214 | 1405 |
| | | | | | | 74% | 804 | 1223 |
| | | | | | | 47% | 780 | 845 |
| | | | | | | 78% | 313 | 825 |
| HTLDA84 | 686397 | 324 | WUblastx.64 | (Q9H387) PRO2550. | Q9H387 | 79% | 1265 | 1134 |
| | | | | | | 60% | 1442 | 1398 |
| | | | | | | 65% | 1398 | 1243 |
| HTLDN29 | 790195 | 325 | WUblastx.64 | (Q9CWL8) 5730471K09RIK PROTEIN. | Q9CWL8 | 96% | 15 | 1226 |
| HTLEC82 | 811992 | 327 | WUblastx.64 | (Q99M10) CELL GROWTH REGULATOR | Q99MI0 | 98% | 111 | 455 |
| | | | | FALKOR. | | | | |
| HTLEM16 | 779133 | 328 | WUblastx.64 | (O95638) WW DOMAIN BINDING | O95638 | 92% | 50 | 541 |
| | | | | PROTEIN-2. | | 28% | 987 | 1142 |
| | | | | | | 48% | 617 | 841 |
| HTLEV48 | 723799 | 329 | WUblastx.64 | (BAB55550) Bk125H2.1 protein. | BAB55550 | 94% | 10 | 825 |
| HTNBK13 | 831967 | 332 | WUblastx.64 | (Q9Y3M2) HYPOTHETICAL 14.5 KDA | Q9Y3M2 | 81% | 123 | 500 |
| | | | | PROTEIN. | | | | |
| HTOAM11 | 664508 | 334 | WUblastx.64 | (Q9H5R3) CDNA: FLJ23147 FIS, CLONE | Q9H5R3 | 77% | 428 | 363 |
| | | | | LNG09295. | | 75% | 586 | 425 |
| HTOEV16 | 853616 | 338 | WUblastx.64 | (Q9NRZ5) 1-ACYL-SN-GLYCEROL-3- | PLCD_HUMAN | 98% | 201 | 383 |
| | | | | PHOSPHATE ACYLTRANSFERASE DEL | | 95% | 379 | 1164 |
| HTOHQ05 | 853621 | 340 | WUblastx.64 | (Q9UII4) CYCLIN-E BINDING PROTEIN 1. | Q9UII4 | 100% | 669 | 791 |
| HTPDU17 | 840596 | 341 | WUblastx.64 | (Q9NW00) CDNA FLJ10404 FIS, CLONE | Q9NW00 | 80% | 553 | 1308 |
| | | | | NT2RM4000486. | | 64% | 1143 | 1664 |
| HTSFJ32 | 637720 | 342 | WUblastx.64 | (Q9WUW2) VESICLE ASSOCIATED | Q9WUW2 | 64% | 747 | 788 |
| | | | | MEMBRANE PROTEIN 2B. | | 94% | 448 | 609 |
| HTTDN24 | 766485 | 343 | WUblastx.64 | (Q9BVN5) HYPOTHETICAL 120.6 KDA | Q9BVN5 | 95% | 628 | 1725 |
| | | | | PROTEIN. | | 32% | 937 | 1593 |
| | | | | | | 95% | 3 | 629 |
| | | | | | | 32% | 1114 | 1596 |
| HTTEE41 | 840950 | 344 | WUblastx.64 | (P78371) T-COMPLEX PROTEIN 1, BETA | TCPB_HUMAN | 98% | 92 | 1696 |
| | | | | SUBUNIT (TCP-1-BETA) (CC | | | | |
| HTXDC38 | 801935 | 347 | WUblastx.64 | (Q9BTX3) SIMILAR TO HSPC171 PROTEIN. | Q9BTX3 | 99% | 100 | 573 |
| HTXDC77 | 844258 | 348 | HMMER | PFAM: Class I Histocompatibility antigen, | PF00129 | 103.3 | 137 | 259 |
| | | | 2.1.1 | domains alpha 1 and 2 | | | | |
| | | | WUblastx.64 | (P03989) HLA CLASS I | 1B14_HUMAN | 63% | 880 | 945 |
| | | | | HISTOCOMPATIBILITY ANTIGEN, B-27 | | 71% | 65 | 256 |
| | | | | ALPHA | | 80% | 282 | 863 |
| HTXJD85 | 840391 | 352 | WUblastx.64 | (Q9HAD8) CDNA FLJ11786 FIS, CLONE | Q9HAD8 | 52% | 1093 | 818 |
| | | | | HEMBA1006036. | | | | |
| HTXMZ07 | 834881 | 354 | WUblastx.64 | (Q9BRF3) SIMILAR TO RIKEN CDNA | Q9BRF3 | 90% | 3 | 1469 |
| | | | | 2810468K17 GENE. | | | | |
| HUFCL31 | 801938 | 355 | WUblastx.64 | (Q9D311) 9030623N16RIK PROTEIN. | Q9D311 | 60% | 280 | 1224 |
| HUKDY82 | 570896 | 357 | WUblastx.64 | (Q9HA67) CDNA FLJ12155 FIS, CLONE | Q9HA67 | 59% | 1405 | 1145 |
| | | | | MAMMA1000472. | | | | |
| HUSCJ14 | 894699 | 358 | WUblastx.64 | tex261 protein - mouse | pir\|S47481\|S47481 | 99% | 74 | 661 |
| HUSGL67 | 792637 | 359 | WUblastx.64 | (Q9Y2G2) CARD DOMAIN PROTEIN 8 | CRD8_HUMAN | 100% | 347 | 421 |
| | | | | (APOPTOTIC PROTEIN NDPP1) (D | | 65% | 947 | 1006 |
| | | | | | | 97% | 469 | 954 |
| HUSGU40 | 684975 | 360 | WUblastx.64 | (Q9BX98) UBIQUITIN A-52 RESIDUE | Q9BX98 | 75% | 840 | 433 |
| | | | | RIBOSOMAL PROTEIN FUSION PRODUCT | | | | |
| | | | | 1 (F | | | | |
| HUVDJ48 | 564853 | 362 | WUblastx.64 | SHORT ISOFORM OF Q9P2N4 | sp_vs\|Q9P2N4- | 92% | 1510 | 1668 |
| | | | | | 01\|Q9P2N4 | | | |
| HWAAI12 | 830432 | 363 | WUblastx.64 | (Q9BWW4) SINGLE STRANDED DNA | Q9BWW4 | 82% | 512 | 829 |
| | | | | BINDING PROTEIN-1. | | 87% | 92 | 394 |
| | | | | | | 69% | 941 | 1252 |
| | | | | | | 36% | 521 | 685 |
| | | | | | | 37% | 752 | 826 |
| HWBBU75 | 780360 | 365 | WUblastx.64 | (Q9R189) MUNC13-4 PROTEIN. | Q9R189 | 82% | 1454 | 2362 |
| | | | | | | 73% | 913 | 1434 |
| | | | | | | 80% | 194 | 952 |
| | | | | | | 62% | 2229 | 2729 |
| | | | | | | 31% | 1586 | 1711 |
| | | | | | | 34% | 401 | 532 |
| HWBCN36 | 722259 | 366 | WUblastx.64 | (Q9BGW3) HYPOTHETICAL 13.5 KDA | Q9BGW3 | 69% | 1007 | 900 |
| | | | | PROTEIN. | | 57% | 887 | 846 |
| HWBDJ08 | 762860 | 367 | WUblastx.64 | probable pol polyprotein-related protein 4 - rat | pir\|S21348\|S21348 | 47% | 901 | 833 |
| | | | | | | 43% | 1262 | 1131 |
| | | | | | | 53% | 1134 | 904 |
| HWDAG96 | 796743 | 369 | WUblastx.64 | (AAH01119) Integrin beta 4 binding protein. | AAH01119 | 100% | 108 | 842 |
| HWHPB78 | 740778 | 371 | WUblastx.64 | (Q9BUK4) SIMILAR TO HYPOTHETICAL | Q9BUK4 | 61% | 360 | 614 |
| | | | | PROTEIN FLJ10709. | | 100% | 677 | 817 |
| HWLGP26 | 834770 | 373 | WUblastx.64 | (Q9NP87) DNA POLYMERASE MU. | Q9NP87 | 93% | 674 | 760 |
| | | | | | | 100% | 269 | 298 |
| | | | | | | 94% | 295 | 465 |
| | | | | | | 87% | 432 | 623 |
| | | | | | | 100% | 3 | 254 |
| HILCA24 | 869856 | 374 | WUblastx.64 | (Q9NUU6) CDNA FLJ11127 FIS, CLONE | Q9NUU6 | 95% | 104 | 1171 |
| | | | | PLACE1006225. | | | | |
| HILCA24 | 782450 | 393 | WUblastx.64 | (Q9NUU6) CDNA FLJ11127 FIS, CLONE | Q9NUU6 | 73% | 103 | 159 |
| | | | | PLACE1006225. | | 100% | 168 | 1169 |
| HE2CA60 | 888705 | 375 | WUblastx.64 | (O95232) OKADAIC ACID-INDUCIBLE | OA48_HUMAN | 98% | 1098 | 1265 |
| | | | | PHOSPHOPROTEIN OA48-18. | | | | |
| HPWTF23 | 844775 | 376 | HMMER | PFAM: TSC-22/dip/bun family | PF01166 | 146.4 | 442 | 621 |
| | | | 2.1.1 | | | | | |
| | | | WUblastx.64 | (Q99576) GLUCOCORTICOID-INDUCED | GILZ_HUMAN | 94% | 271 | 672 |
| | | | | LEUCINE ZIPPER PROTEIN (DEL | | | | |
| HPWTF23 | 843700 | 395 | HMMER | PFAM: TSC-22/dip/bun family | PF01166 | 146.4 | 442 | 621 |
| | | | | 2.1.1 | | | | |
| | | | WUblastx.64 | (Q99576) GLUCOCORTICOID-INDUCED | GILZ_HUMAN | 94% | 271 | 672 |
| | | | | LEUCINE ZIPPER PROTEIN (DEL | | | | |
| HPQAX38 | 845752 | 379 | WUblastx.64 | (Q9BGV8) HYPOTHETICAL 10.0 KDA | Q9BGV8 | 74% | 664 | 768 |
| | | | | PROTEIN. | | 68% | 543 | 674 |
| HPQAX38 | 843592 | 399 | WUblastx.64 | (Q9BGV8) HYPOTHETICAL 10.0 KDA | Q9BGV8 | 74% | 664 | 768 |
| | | | | PROTEIN. | | 68% | 543 | 674 |
| HEQBJ01 | 876546 | 380 | WUblastx.64 | (Q9LVQ7) ZINC FINGER PROTEIN. | Q9LVQ7 | 34% | 424 | 849 |
| HEQBJ01 | 861786 | 400 | WUblastx.64 | (Q9LVQ7) ZINC FINGER PROTEIN. | Q9LVQ7 | 34% | 424 | 849 |
| HTOJL95 | 762851 | 381 | WUblastx.64 | (Q15401) LINE-1 REPEAT MRNA WITH 2 | Q15401 | 36% | 683 | 609 |
| | | | | OPEN READING FRAMES. | | 59% | 966 | 820 |
| | | | | | | 71% | 607 | 248 |
| HTOJL95 | 806212 | 402 | WUblastx.64 | (Q15605) ORF1 CODES FOR A 40 KDA | Q15605 | 86% | 192 | 61 |
| | | | | PRODUCT. | | 57% | 876 | 730 |
| | | | | | | 57% | 751 | 161 |
| HTEEF26 | 879704 | 383 | WUblastx.64 | (Q9H7X7) CDNA FLJ14117 FIS, CLONE | Q9H7X7 | 81% | 80 | 634 |
| | | | | MAMMA1001785. | | | | |
| HTEEF26 | 789606 | 408 | WUblastx.64 | (Q9H7X7) CDNA FLJ14117 FIS, CLONE | Q9H7X7 | 81% | 80 | 634 |
| | | | | MAMMA1001785. | | | | |
| HE8FC45 | 845672 | 388 | WUblastx.64 | (Q9NX85) CDNA FLJ20378 FIS, CLONE | Q9NX85 | 50% | 1285 | 1172 |
| | | | | KAIA0536. | | 57% | 1824 | 1663 |
| | | | | | | 75% | 1672 | 1553 |
| HE8FC45 | 843781 | 413 | WUblastx.64 | (Q9NX85) CDNA FLJ20378 FIS, CLONE | Q9NX85 | 50% | 1285 | 1172 |
| | | | | KAIA0536. | | 57% | 1824 | 1663 |
| | | | | | | 75% | 1672 | 1553 |

RACE Protocol For Recovery of Full-Length Genes

[0123] Partial cDNA clones can be made full-length by utilizing the rapid amplification of cDNA ends (RACE) procedure described in Frohman, M. A., et al., Proc. Nat'l. Acad. Sci. USA, 85:8998-9002 (1988). A cDNA clone missing either the 5′ or 3′ end can be reconstructed to include the absent base pairs extending to the translational start or stop codon, respectively. In some cases, cDNAs are missing the start codon of translation, therefor. The following briefly describes a modification of this original 5′ RACE procedure. Poly A+ or total RNA is reverse transcribed with Superscript II (Gibco/BRL) and an antisense or complementary primer specific to the cDNA sequence. The primer is removed from the reaction with a Microcon Concentrator (Amicon). The first-strand cDNA is then tailed with dATP and terminal deoxynucleotide transferase (Gibco/BRL). Thus, an anchor sequence is produced which is needed for PCR amplification. The second strand is synthesized from the dA-tail in PCR buffer, Taq DNA polymerase (Perkin-Elmer Cetus), an oligo-dT primer containing three adjacent restriction sites (XhoI, SalI and ClaI) at the 5′ end and a primer containing just these restriction sites. This double-stranded cDNA is PCR amplified for 40 cycles with the same primers as well as a nested cDNA-specific antisense primer. The PCR products are size-separated on an ethidium bromide-agarose gel and the region of gel containing cDNA products the predicted size of missing protein-coding DNA is removed. cDNA is purified from the agarose with the Magic PCR Prep kit (Promega), restriction digested with XhoI or SalI, and ligated to a plasmid such as pBluescript SKII (Stratagene) at XhoI and EcoRV sites. This DNA is transformed into bacteria and the plasmid clones sequenced to identify the correct protein-coding inserts. Correct 5′ ends are confirmed by comparing this sequence with the putatively identified homologue and overlap with the partial cDNA clone. Similar methods known in the art and/or commercial kits are used to amplify and recover 3′ ends.

[0124] Several quality-controlled kits are commercially available for purchase. Similar reagents and methods to those above are supplied in kit form from Gibco/BRL for both 5′ and 3′ RACE for recovery of full length genes. A second kit is available from Clontech which is a modification of a related technique, SLIC (single-stranded ligation to single-stranded cDNA), developed by Dumas et al., Nucleic Acids Res., 19:5227-32 (1991). The major differences in procedure are that the RNA is alkaline hydrolyzed after reverse transcription and RNA ligase is used to join a restriction site-containing anchor primer to the first-strand cDNA. This obviates the necessity for the dA-tailing reaction which results in a polyT stretch that is difficult to sequence past.

[0125] An alternative to generating 5′ or 3′ cDNA from RNA is to use cDNA library double-stranded DNA. An asymmetric PCR-amplified antisense cDNA strand is synthesized with an antisense cDNA-specific primer and a plasmid-anchored primer. These primers are removed and a symmetric PCR reaction is performed with a nested cDNA-specific antisense primer and the plasmid-anchored primer.

RNA Ligase Protocol For Generating the 5′ or 3′ End Sequences to Obtain Full Length Genes

[0126] Once a gene of interest is identified, several methods are available for the identification of the 5′ or 3′ portions of the gene which may not be present in the original cDNA plasmid. These methods include, but are not limited to, filter probing, clone enrichment using specific probes and protocols similar and identical to 5′ and 3′ RACE. While the full length gene may be present in the library and can be identified by probing, a useful method for generating the 5′ or 3′ end is to use the existing sequence information from the original cDNA to generate the missing information. A method similar to 5′ RACE is available for generating the missing 5′ end of a desired full-length gene. (This method was published by Fromont-Racine et al., Nucleic Acids Res., 21(7):1683-1684 (1993)). Briefly, a specific RNA oligonucleotide is ligated to the 5′ ends of a population of RNA presumably containing full-length gene RNA transcript and a primer set containing a primer specific to the ligated RNA oligonucleotide and a primer specific to a known sequence of the gene of interest, is used to PCR amplify the 5′ portion of the desired full length gene which may then be sequenced and used to generate the full length gene. This method starts with total RNA isolated from the desired source, poly A RNA may be used but is not a prerequisite for this procedure. The RNA preparation may then be treated with phosphatase if necessary to eliminate 5′ phosphate groups on degraded or damaged RNA which may interfere with the later RNA ligase step. The phosphatase if used is then inactivated and the RNA is treated with tobacco acid pyrophosphatase in order to remove the cap structure present at the 5′ ends of messenger RNAs. This reaction leaves a 5′ phosphate group at the 5′ end of the cap cleaved RNA which can then be ligated to an RNA oligonucleotide using T4 RNA ligase. This modified RNA preparation can then be used as a template for first strand cDNA synthesis using a gene specific oligonucleotide. The first strand synthesis reaction can then be used as a template for PCR amplification of the desired 5′ end using a primer specific to the ligated RNA oligonucleotide and a primer specific to the known sequence of the gene of interest. The resultant product is then sequenced and analyzed to confirm that the 5′ end sequence belongs to the relevant gene.

[0127] The present invention also relates to vectors or plasmids which include such DNA sequences, as well as the use of the DNA sequences. The material deposited with the ATCC (e.g., as described in columns 2 and 3 of Table 1A, and/or as set forth in Table 1B, Table 6, or Table 7) is a mixture of cDNA clones derived from a variety of human tissue and cloned in either a plasmid vector or a phage vector, as described, for example, in Table 1A and Table 7. These deposits are referred to as “the deposits” herein. The tissues from which some of the clones were derived are listed in Table 7, and the vector in which the corresponding cDNA is contained is also indicated in Table 7. The deposited material includes cDNA clones corresponding to SEQ ID NO:X described, for example, in Table 1A and/or Table 1B (ATCC Deposit No:Z). A clone which is isolatable from the ATCC Deposits by use of a sequence listed as SEQ ID NO:X, may include the entire coding region of a human gene or in other cases such clone may include a substantial portion of the coding region of a human gene. Furthermore, although the sequence listing may in some instances list only a portion of the DNA sequence in a clone included in the ATCC Deposits, it is well within the ability of one skilled in the art to sequence the DNA included in a clone contained in the ATCC Deposits by use of a sequence (or portion thereof) described in, for example Tables 1A and/or Table 1B or Table 2, by procedures hereinafter further described, and others apparent to those skilled in the art.

[0128] Also provided in Table 1A and Table 7 is the name of the vector which contains the cDNA clone. Each vector is routinely used in the art. The following additional information is provided for convenience.

[0129] Vectors Lambda Zap (U.S. Pat. Nos. 5,128,256 and 5,286,636), Uni-Zap XR (U.S. Pat. Nos. 5,128,256 and 5,286,636), Zap Express (U.S. Pat. Nos. 5,128,256 and 5,286,636), pBluescript (pBS) (Short, J. M. et al., Nucleic Acids Res. 16:7583-7600 (1988); Alting-Mees, M. A. and Short, J. M., Nucleic Acids Res. 17:9494 (1989)) and pBK (Alting-Mees, M. A. et al., Strategies 5:58-61 (1992)) are commercially available from Stratagene Cloning Systems, Inc., 11011 N. Torrey Pines Road, La Jolla, Calif., 92037. pBS contains an ampicillin resistance gene and pBK contains a neomycin resistance gene. Phagemid pBS may be excised from the Lambda Zap and Uni-Zap XR vectors, and phagemid pBK may be excised from the Zap Express vector. Both phagemids may be transformed into E. coli strain XL-1 Blue, also available from Stratagene.

[0130] Vectors pSport1, pCMVSport 1.0, pCMVSport 2.0 and pCMVSport 3.0, were obtained from Life Technologies, Inc., P.O. Box 6009, Gaithersburg, Md. 20897. All Sport vectors contain an ampicillin resistance gene and may be transformed into E. coli strain DH10B, also available from Life Technologies. See, for instance, Gruber, C. E., et al., Focus 15:59-(1993). Vector lafmid BA (Bento Soares, Columbia University, New York, N.Y.) contains an ampicillin resistance gene and can be transformed into E. coli strain XL-1 Blue. Vector pCR®2.1, which is available from Invitrogen, 1600 Faraday Avenue, Carlsbad, Calif. 92008, contains an ampicillin resistance gene and may be transformed into E. coli strain DH10B, available from Life Technologies. See, for instance, Clark, J. M., Nuc. Acids Res. 16:9677-9686 (1988) and Mead, D. et al., Bio/Technology 9: (1991).

[0131] The present invention also relates to the genes corresponding to SEQ ID NO:X, SEQ ID NO:Y, and/or the deposited clone (ATCC Deposit No:Z). The corresponding gene can be isolated in accordance with known methods using the sequence information disclosed herein. Such methods include preparing probes or primers from the disclosed sequence and identifying or amplifying the corresponding gene from appropriate sources of genomic material.

[0132] Also provided in the present invention are allelic variants, orthologs, and/or species homologs. Procedures known in the art can be used to obtain full-length genes, allelic variants, splice variants, full-length coding portions, orthologs, and/or species homologs of genes corresponding to SEQ ID NO:X or the complement thereof, polypeptides encoded by genes corresponding to SEQ ID NO:X or the complement thereof, and/or the cDNA contained in ATCC Deposit No:Z, using information from the sequences disclosed herein or the clones deposited with the ATCC. For example, allelic variants and/or species homologs may be isolated and identified by making suitable probes or primers from the sequences provided herein and screening a suitable nucleic acid source for allelic variants and/or the desired homologue.

[0133] The polypeptides of the invention can be prepared in any suitable manner. Such polypeptides include isolated naturally occurring polypeptides, recombinantly produced polypeptides, synthetically produced polypeptides, or polypeptides produced by a combination of these methods. Means for preparing such polypeptides are well understood in the art., The polypeptides may be in the form of the secreted protein, including the mature form, or may be a part of a larger protein, such as a fusion protein (see below). It is often advantageous to include an additional amino acid sequence which contains secretory or leader sequences, pro-sequences, sequences which aid in purification, such as multiple histidine residues, or an additional sequence for stability during recombinant production.

[0134] The polypeptides of the present invention are preferably provided in an isolated form, and preferably are substantially purified. A recombinantly produced version of a polypeptide, including the secreted polypeptide, can be substantially purified using techniques described herein or otherwise known in the art, such as, for example, by the one-step method described in Smith and Johnson, Gene 67:31-40 (1988). Polypeptides of the invention also can be purified from natural, synthetic or recombinant sources using techniques described herein or otherwise known in the art, such as, for example, antibodies of the invention raised against the polypeptides of the present invention in methods which are well known in the art.

[0135] The present invention provides a polynucleotide comprising, or alternatively consisting of, the nucleic acid sequence of SEQ ID NO:X, and/or the cDNA sequence contained in ATCC Deposit No:Z. The present invention also provides a polypeptide comprising, or alternatively, consisting of, the polypeptide sequence of SEQ ID NO:Y, a polypeptide encoded by SEQ ID NO:X or a complement thereof, a polypeptide encoded by the cDNA contained in ATCC Deposit No:Z, and/or the polypeptide sequence encoded by a nucleotide sequence in SEQ ID NO:B as defined in column 6 of Table 1C. Polynucleotides encoding a polypeptide comprising, or alternatively consisting of the polypeptide sequence of SEQ ID NO:Y, a polypeptide encoded by SEQ ID NO:X, a polypeptide encoded by the cDNA contained in ATCC Deposit No:Z, and/or a polypeptide sequence encoded by a nucleotide sequence in SEQ ID NO:B as defined in column 6 of Table 1C are also encompassed by the invention. The present invention further encompasses a polynucleotide comprising, or alternatively consisting of, the complement of the nucleic acid sequence of SEQ ID NO:X, a nucleic acid sequence encoding a polypeptide encoded by the complement of the nucleic acid sequence of SEQ ID NO:X, and/or the cDNA contained in ATCC Deposit No:Z.

[0136] Moreover, representative examples of polynucleotides of the invention comprise, or alternatively consist of, one, two, three, four, five, six, seven, eight, nine, ten, or more of the sequences delineated in Table 1C column 6, or any combination thereof. Additional, representative examples of polynucleotides of the invention comprise, or alternatively consist of, one, two, three, four, five, six, seven, eight, nine, ten, or more of the complementary strand(s) of the sequences delineated in Table 1C column 6, or any combination thereof. In further embodiments, the above-described polynucleotides of the invention comprise, or alternatively consist of, sequences delineated in Table 1C, column 6, and have a nucleic acid sequence which is different from that of the BAC fragment having the sequence disclosed in SEQ ID NO:B (see Table 1C, column 5). In additional embodiments, the above-described polynucleotides of the invention comprise, or alternatively consist of, sequences delineated in Table 1C, column 6, and have a nucleic acid sequence which is different from that published for the BAC clone identified as BAC ID NO:A (see Table 1C, column 4). In additional embodiments, the above-described polynucleotides of the invention comprise, or alternatively consist of, sequences delineated in Table 1C, column 6, and have a nucleic acid sequence which is different from that contained in the BAC clone identified as BAC ID NO:A (see Table 1C, column 4). Polypeptides encoded by these polynucleotides, other polynucleotides that encode these polypeptides, and antibodies that bind these polypeptides are also encompassed by the invention. Additionally, fragments and variants of the above-described polynucleotides and polypeptides are also encompassed by the invention.

[0137] Further, representative examples of polynucleotides of the invention comprise, or alternatively consist of, one, two, three, four, five, six, seven, eight, nine, ten, or more of the sequences delineated in column 6 of Table 1C which correspond to the same Clone ID (see Table 1C, column 1), or any combination thereof. Additional, representative examples of polynucleotides of the invention comprise, or alternatively consist of, one, two, three, four, five, six, seven, eight, nine, ten, or more of the complementary strand(s) of the sequences delineated in column 6 of Table 1C which correspond to the same Clone ID (see Table 1C, column 1), or any combination thereof. In further embodiments, the above-described polynucleotides of the invention comprise, or alternatively consist of, sequences delineated in column 6 of Table 1C which correspond to the same Clone ID (see Table 1C, column 1) and have a nucleic acid sequence which is different from that of the BAC fragment having the sequence disclosed in SEQ ID NO:B (see Table 1C, column 5). In additional embodiments, the above-described polynucleotides of the invention comprise, or alternatively consist of, sequences delineated in column 6 of Table 1C which correspond to the same Clone ID (see Table 1C, column 1) and have a nucleic acid sequence which is different from that published for the BAC clone identified as BAC ID NO:A (see Table 1C, column 4). In additional embodiments, the above-described polynucleotides of the invention comprise, or alternatively consist of, sequences delineated in column 6 of Table 1C which correspond to the same Clone ID (see Table 1C, column 1) and have a nucleic acid sequence which is different from that contained in the BAC clone identified as BAC ID NO:A (see Table 1C, column 4). Polypeptides encoded by these polynucleotides, other polynucleotides that encode these polypeptides, and antibodies that bind these polypeptides are also encompassed by the invention. Additionally, fragments and variants of the above-described polynucleotides and polypeptides are also encompassed by the invention.

[0138] Further, representative examples of polynucleotides of the invention comprise, or alternatively consist of, one, two, three, four, five, six, seven, eight, nine, ten, or more of the sequences delineated in column 6 of Table 1C which correspond to the same contig sequence identifier SEQ ID NO:X (see Table 1C, column 2), or any combination thereof. Additional, representative examples of polynucleotides of the invention comprise, or alternatively consist of, one, two, three, four, five, six, seven, eight, nine, ten, or more of the complementary strand(s) of the sequences delineated in column 6 of Table 1C which correspond to the same contig sequence identifier SEQ ID NO:X (see Table 1C, column 2), or any combination thereof. In further embodiments, the above-described polynucleotides of the invention comprise, or alternatively consist of, sequences delineated in column 6 of Table 1C which correspond to the same contig sequence identifier SEQ ID NO:X (see Table 1C, column 2) and have a nucleic acid sequence which is different from that of the BAC fragment having the sequence disclosed in SEQ ID NO:B (see Table 1C, column 5). In additional embodiments, the above-described polynucleotides of the invention comprise, or alternatively consist of, sequences delineated in column 6 of Table 1C which correspond to the same contig sequence identifier SEQ ID NO:X (see Table 1C, column 2) and have a nucleic acid sequence which is different from that published for the BAC clone identified as BAC ID NO:A (see Table 1C, column 4). In additional embodiments, the above-described polynucleotides of the invention comprise, or alternatively consist of, sequences delineated in column 6 of Table 1C which correspond to the same contig sequence identifier SEQ ID NO:X (see Table 1C, column 2) and have a nucleic acid sequence which is different from that contained in the BAC clone identified as BAC ID NO:A (See Table 1C, column 4). Polypeptides encoded by these polynucleotides, other polynucleotides that encode these polypeptides, and antibodies that bind these polypeptides are also encompassed by the invention. Additionally, fragments and variants of the above-described polynucleotides and polypeptides are also encompassed by the invention.

[0139] Moreover, representative examples of polynucleotides of the invention comprise, or alternatively consist of, one, two, three, four, five, six, seven, eight, nine, ten, or more of the sequences delineated in the same row of Table 1C column 6, or any combination thereof. Additional, representative examples of polynucleotides of the invention comprise, or alternatively consist of, one, two, three, four, five, six, seven, eight, nine, ten, or more of the complementary strand(s) of the sequences delineated in the same row of Table 1C column 6, or any combination thereof. In preferred embodiments, the polynucleotides of the invention comprise, or alternatively consist of, one, two, three, four, five, six, seven, eight, nine, ten, or more of the complementary strand(s) of the sequences delineated in the same row of Table 1C column 6, wherein sequentially delineated sequences in the table (i.e. corresponding to those exons located closest to each other) are directly contiguous in a 5′ to 3′ orientation. In further embodiments, above-described polynucleotides of the invention comprise, or alternatively consist of, sequences delineated in the same row of Table 1C, column 6, and have a nucleic acid sequence which is different from that of the BAC fragment having the sequence disclosed in SEQ ID NO:B (see Table 1C, column 5). In additional embodiments, the above-described polynucleotides of the invention comprise, or alternatively consist of, sequences delineated in the same row of Table 1C, column 6, and have a nucleic acid sequence which is different from that published for the BAC clone identified as BAC ID NO:A (see Table 1C, column 4). In additional embodiments, the above-described polynucleotides of the invention comprise, or alternatively consist of, sequences delineated in the same row of Table 1C, column 6, and have a nucleic acid sequence which is different from that contained in the BAC clone identified as BAC ID NO:A (see Table 1C, column 4). Polypeptides encoded by these polynucleotides, other polynucleotides that encode these polypeptides, and antibodies that bind these polypeptides are also encompassed by the invention.

[0140] In additional specific embodiments, polynucleotides of the invention comprise, or alternatively consist of, one, two, three, four, five, six, seven, eight, nine, ten, or more of the sequences delineated in column 6 of Table 1C, and the polynucleotide sequence of SEQ ID NO:X (e.g., as defined in Table 1C, column 2) or fragments or variants thereof. Polypeptides encoded by these polynucleotides, other polynucleotides that encode these polypeptides, and antibodies that bind these polypeptides are also encompassed by the invention.

[0141] In additional specific embodiments, polynucleotides of the invention comprise, or alternatively consist of, one, two, three, four, five, six, seven, eight, nine, ten, or more of the sequences delineated in column 6 of Table 1C which correspond to the same Clone ID (see Table 1C, column 1), and the polynucleotide sequence of SEQ ID NO:X (e.g., as defined in Table 1A, Table 1B, or Table 1C) or fragments or variants thereof. In preferred embodiments, the delineated sequence(s) and polynucleotide sequence of SEQ ID NO:X correspond to the same Clone ID. Polypeptides encoded by these polynucleotides, other polynucleotides that encode these polypeptides, and antibodies that bind these polypeptides are also encompassed by the invention.

[0142] In further specific embodiments, polynucleotides of the invention comprise, or alternatively consist of, one, two, three, four, five, six, seven, eight, nine, ten, or more of the sequences delineated in the same row of column 6 of Table 1C, and the polynucleotide sequence of SEQ ID NO:X (e.g., as defined in Table 1A, Table 1B, or Table 1C) or fragments or variants thereof. In preferred embodiments, the delineated sequence(s) and polynucleotide sequence of SEQ ID NO:X correspond to the same row of column 6 of Table 1C. Polypeptides encoded by these polynucleotides, other polynucleotides that encode these polypeptides, and antibodies that bind these polypeptides are also encompassed by the invention.

[0143] In additional specific embodiments, polynucleotides of the invention comprise, or alternatively consist of a polynucleotide sequence in which the 3′ 10 polynucleotides of one of the sequences delineated in column 6 of Table 1C and the 5′ 10 polynucleotides of the sequence of SEQ ID NO:X are directly contiguous. Nucleic acids which hybridize to the complement of these 20 contiguous polynucleotides under stringent hybridization conditions or alternatively, under lower stringency conditions, are also encompassed by the invention. Polypeptides encoded by these polynucleotides and/or nucleic acids, other polynucleotides and/or nucleic acids that encode these polypeptides, and antibodies that bind these polypeptides are also encompassed by the invention. Additionally, fragments and variants of the above-described polynucleotides, nucleic acids, and polypeptides are also encompassed by the invention.

[0144] In additional specific embodiments, polynucleotides of the invention comprise, or alternatively consist of, a polynucleotide sequence in which the 3′ 10 polynucleotides of one of the sequences delineated in column 6 of Table 1C and the 5′ 10 polynucleotides of a fragment or variant of the sequence of SEQ ID NO:X are directly contiguous Nucleic acids which hybridize to the complement of these 20 contiguous polynucleotides under stringent hybridization conditions or alternatively, under lower stringency conditions, are also encompassed by the invention. Polypeptides encoded by these polynucleotides and/or nucleic acids, other polynucleotides and/or nucleic acids encoding these polypeptides, and antibodies that bind these polypeptides are also encompassed by the invention. Additionally, fragments and variants of the above-described polynucleotides, nucleic acids, and polypeptides are also encompassed by the invention.

[0145] In specific embodiments, polynucleotides of the invention comprise, or alternatively consist of, a polynucleotide sequence in which the 3′ 10 polynucleotides of the sequence of SEQ ID NO:X and the 5′ 10 polynucleotides of the sequence of one of the sequences delineated in column 6 of Table 1C are directly contiguous. Nucleic acids which hybridize to the complement of these 20 contiguous polynucleotides under stringent hybridization conditions or alternatively, under lower stringency conditions, are also encompassed by the invention. Polypeptides encoded by these polynucleotides and/or nucleic acids, other polynucleotides and/or nucleic acids encoding these polypeptides, and antibodies that bind these polypeptides are also encompassed by the invention. Additionally, fragments and variants of the above-described polynucleotides, nucleic acids, and polypeptides are also encompassed by the invention.

[0146] In specific embodiments, polynucleotides of the invention comprise, or alternatively consist of, a polynucleotide sequence in which the 3′ 10 polynucleotides of a fragment or variant of the sequence of SEQ ID NO:X and the 5′ 10 polynucleotides of the sequence of one of the sequences delineated in column 6 of Table 1C are directly contiguous. Nucleic acids which hybridize to the complement of these 20 contiguous polynucleotides under stringent hybridization conditions or alternatively, under lower stringency conditions, are also encompassed by the invention. Polypeptides encoded by these polynucleotides and/or nucleic acids, other polynucleotides and/or nucleic acids encoding these polypeptides, and antibodies that bind these polypeptides are also encompassed by the invention. Additionally, fragments and variants of the above-described polynucleotides, nucleic acids, and polypeptides, are also encompassed by the invention.

[0147] In further specific embodiments, polynucleotides of the invention comprise, or alternatively consist of, a polynucleotide sequence in which the 3′ 10 polynucleotides of one of the sequences delineated in column 6 of Table 1C and the 5′ 10 polynucleotides of another sequence in column 6 are directly contiguous. Nucleic acids which hybridize to the complement of these 20 contiguous polynucleotides under stringent hybridization conditions or alternatively, under lower stringency conditions, are also encompassed by the invention. Polypeptides encoded by these polynucleotides and/or nucleic acids, other polynucleotides and/or nucleic acids encoding these polypeptides, and antibodies that bind these polypeptides are also encompassed by the invention. Additionally, fragments and variants of the above-described polynucleotides, nucleic acids, and polypeptides are also encompassed by the invention.

[0148] In specific embodiments, polynucleotides of the invention comprise, or alternatively consist of, a polynucleotide sequence in which the 3′ 10 polynucleotides of one of the sequences delineated in column 6 of Table 1C and the 5′ 10 polynucleotides of another sequence in column 6 corresponding to the same Clone ID (see Table 1C, column 1) are directly contiguous. Nucleic acids which hybridize to the complement of these 20 lower stringency conditions, are also encompassed by the invention. Polypeptides encoded by these polynucleotides and/or nucleic acids, other polynucleotides and/or nucleic acids encoding these polypeptides, and antibodies that bind these polypeptides are also encompassed by the invention. Additionally, fragments and variants of the above-described polynucleotides, nucleic acids, and polypeptides are also encompassed by the invention.

[0149] In specific embodiments, polynucleotides of the invention comprise, or alternatively consist of, a polynucleotide sequence in which the 3′ 10 polynucleotides of one sequence in column 6 corresponding to the same contig sequence identifer SEQ ID NO:X (see Table 1C, column 2) are directly contiguous. Nucleic acids which hybridize to the complement of these 20 contiguous polynucleotides under stringent hybridization conditions or alternatively, under lower stringency conditions, are also encompassed by the invention. Polypeptides encoded by these polynucleotides and/or nucleic acids, other polynucleotides and/or nucleic acids encoding these polypeptides, and antibodies that bind these polypeptides are also encompassed by the invention. Additionally, fragments and variants of the above-described polynucleotides, nucleic acids, and polypeptides are also encompassed by the invention.

[0150] In specific embodiments, polynucleotides of the invention comprise, or alternatively consist of a polynucleotide sequence in which the 3′ 10 polynucleotides of one of the sequences delineated in column 6 of Table 1C and the 5′ 10 polynucleotides of another sequence in column 6 corresponding to the same row are directly contiguous. In preferred embodiments, the 3′ 10 polynucleotides of one of the sequences delineated in column 6 of Table 1C is directly contiguous with the 5′ 10 polynucleotides of the next sequential exon delineated in Table 1C, column 6. Nucleic acids which hybridize to the complement of these 20 contiguous polynucleotides under stringent hybridization conditions or alternatively, under lower stringency conditions, are also encompassed by the invention. Polypeptides encoded by these polynucleotides and/or nucleic acids, other polynucleotides and/or nucleic acids encoding these polypeptides, and antibodies that bind these polypeptides are also encompassed by the invention. Additionally, fragments and variants of the above-described polynucleotides, nucleic acids, and polypeptides are also encompassed by the invention.

Table 3

[0151] Many polynucleotide sequences, such as EST sequences, are publicly available and accessible through sequence databases and may have been publicly available prior to conception of the present invention. Preferably, such related polynucleotides are specifically excluded from the scope of the present invention. Accordingly, for each contig sequence (SEQ ID NO:X) listed in the fifth column of Table 1A and/or the fourth column of Table 1B, preferably excluded are one or more polynucleotides comprising a nucleotide sequence described by the general formula of a−b, where a is any integer between 1 and the final nucleotide minus 15 of SEQ ID NO:X, b is an integer of 15 to the final nucleotide of SEQ ID NO:X, where both a and b correspond to the positions of nucleotide residues shown in SEQ ID NO:X, and where b is greater than or equal to a+14. More specifically, preferably excluded are one or more polynucleotides comprising a nucleotide sequence described by the general formula of a−b, where a and b are integers as defined in columns 4 and 5, respectively, of Table 3. In specific embodiments, the polynucleotides of the invention do not consist of at least one, two, three, four, five, ten, or more of the specific polynucleotide sequences referenced by the Genbank Accession No. as disclosed in column 6 of Table 3 (including for example, published sequence in connection with a particular BAC clone). In further embodiments, preferably excluded from the invention are the specific polynucleotide sequence(s) contained in the clones corresponding to at least one, two, three, four, five, ten, or more of the available material having the accession numbers identified in the sixth column of this Table (including for example, the actual sequence contained in an identified BAC clone). In no way is this listing meant to encompass all of the sequences which may be excluded by the general formula, it is just a representative example. All references available through these accessions are hereby incorporated by reference in their entirety.

LENGTHY TABLE REFERENCED HERE
US20070031842A1-20070208-T00004
Please refer to the end of the specification for access instructions.

[0152] Description of Table 4 Table 4 provides a key to the tissue/cell source identifier code disclosed in Table 1B.2, column 5. Column 1 provides the tissue/cell source identifier code disclosed in Table 1B.2, Column 5. Columns 2-5 provide a description of the tissue or cell source. Note that “Description” and “Tissue” sources (i.e. columns 2 and 3) having the prefix “a_” indicates organs, tissues, or cells derived from “adult” sources. Codes corresponding to diseased tissues are indicated in column 6 with the word “disease.” The use of the word “disease” in column 6 is non-limiting. The tissue or cell source may be specific (e.g. a neoplasm), or may be disease-associated (e.g., a tissue sample from a normal portion of a diseased organ). Furthermore, tissues and/or cells lacking the “disease” designation may still be derived from sources directly or indirectly involved in a disease state or disorder, and therefore may have a further utility in that disease state or disorder. In numerous cases where the tissue/cell source is a library, column 7 identifies the vector used to generate the library.

TABLE 4

| Code | Description | Tissue | Organ | Cell Line | Disease | Vector |
|---|---|---|---|---|---|---|
| AR022 | a_Heart | a_Heart | | | | |
| AR023 | a_Liver | a_Liver | | | | |
| AR024 | a_mammary gland | a_mammary gland | | | | |
| AR025 | a_Prostate | a_Prostate | | | | |
| AR026 | a_small intestine | a_small intestine | | | | |
| AR027 | a_Stomach | a_Stomach | | | | |
| AR028 | Blood B cells | Blood B cells | | | | |
| AR029 | Blood B cells activated | Blood B cells activated | | | | |
| AR030 | Blood B cells resting | Blood B cells resting | | | | |
| AR031 | Blood T cells activated | Blood T cells activated | | | | |
| AR032 | Blood T cells resting | Blood T cells resting | | | | |
| AR033 | brain | brain | | | | |
| AR034 | breast | breast | | | | |
| AR035 | breast cancer | breast cancer | | | | |
| AR036 | Cell Line CAOV3 | Cell Line CAOV3 | | | | |
| AR037 | cell line PA-1 | cell line PA-1 | | | | |
| AR038 | cell line transformed | cell line transformed | | | | |
| AR039 | colon | colon | | | | |
| AR040 | colon (9808co65R) | colon (9808co65R) | | | | |
| AR041 | colon (9809co15) | colon (9809co15) | | | | |
| AR042 | colon cancer | colon cancer | | | | |
| AR043 | colon cancer (9808co64R) | colon cancer (9808co64R) | | | | |
| AR044 | colon cancer 9809co14 | colon cancer 9809co14 | | | | |
| AR050 | Donor II B Cells 24 hrs | Donor II B Cells 24 hrs | | | | |
| AR051 | Donor II B Cells 72 hrs | Donor II B Cells 72 hrs | | | | |
| AR052 | Donor II B-Cells 24 hrs. | Donor II B-Cells 24 hrs. | | | | |
| AR053 | Donor II B-Cells 72 hrs | Donor II B-Cells 72 hrs | | | | |
| AR054 | Donor II Resting B Cells | Donor II Resting B Cells | | | | |
| AR055 | Heart | Heart | | | | |
| AR056 | Human Lung (clonetech) | Human Lung (clonetech) | | | | |
| AR057 | Human Mammary | Human Mammary (clontech) | | | | |
| | (clontech) | | | | | |
| AR058 | Human Thymus (clonetech) | Human Thymus (clonetech) | | | | |
| AR059 | Jurkat (unstimulated) | Jurkat (unstimulated) | | | | |
| AR060 | Kidney | Kidney | | | | |
| AR061 | Liver | Liver | | | | |
| AR062 | Liver (Clontech) | Liver (Clontech) | | | | |
| AR063 | Lymphocytes chronic | Lymphocytes chronic | | | | |
| | lymphocytic leukaemia | lymphocytic leukaemia | | | | |
| AR064 | Lymphocytes diffuse large | Lymphocytes diffuse large B | | | | |
| | B cell lymphoma | cell lymphoma | | | | |
| AR065 | Lymphocytes follicular | Lymphocytes follicular | | | | |
| | lymphoma | lymphoma | | | | |
| AR066 | normal breast | normal breast | | | | |
| AR067 | Normal Ovarian (4004901) | Normal Ovarian (4004901) | | | | |
| AR068 | Normal Ovary 9508G045 | Normal Ovary 9508G045 | | | | |
| AR069 | Normal Ovary 9701G208 | Normal Ovary 9701G208 | | | | |
| AR070 | Normal Ovary 9806G005 | Normal Ovary 9806G005 | | | | |
| AR071 | Ovarian Cancer | Ovarian Cancer | | | | |
| AR072 | Ovarian Cancer (9702G001) | Ovarian Cancer (9702G001) | | | | |
| AR073 | Ovarian Cancer (9707G029) | Ovarian Cancer (9707G029) | | | | |
| AR074 | Ovarian Cancer (9804G011) | Ovarian Cancer (9804G011) | | | | |
| AR075 | Ovarian Cancer (9806G019) | Ovarian Cancer (9806G019) | | | | |
| AR076 | Ovarian Cancer (9807G017) | Ovarian Cancer (9807G017) | | | | |
| AR077 | Ovarian Cancer (9809G001) | Ovarian Cancer (9809G001) | | | | |
| AR078 | ovarian cancer 15799 | ovarian cancer 15799 | | | | |
| AR079 | Ovarian Cancer 17717AID | Ovarian Cancer 17717AID | | | | |
| AR080 | Ovarian Cancer 4004664B1 | Ovarian Cancer 4004664B1 | | | | |
| AR081 | Ovarian Cancer 4005315A1 | Ovarian Cancer 4005315A1 | | | | |
| AR082 | ovarian cancer 94127303 | ovarian cancer 94127303 | | | | |
| AR083 | Ovarian Cancer 96069304 | Ovarian Cancer 96069304 | | | | |
| AR084 | Ovarian Cancer 9707G029 | Ovarian Cancer 9707G029 | | | | |
| AR085 | Ovarian Cancer 9807G045 | Ovarian Cancer 9807G045 | | | | |
| AR086 | ovarian cancer 9809G001 | ovarian cancer 9809G001 | | | | |
| AR087 | Ovarian Cancer | Ovarian Cancer 9905C032RC | | | | |
| | 9905C032RC | | | | | |
| AR088 | Ovarian cancer 9907 C00 | Ovarian cancer 9907 C00 3rd | | | | |
| | 3rd | | | | | |
| AR089 | Prostate | Prostate | | | | |
| AR090 | Prostate (clonetech) | Prostate (clonetech) | | | | |
| AR091 | prostate cancer | prostate cancer | | | | |
| AR092 | prostate cancer #15176 | prostate cancer #15176 | | | | |
| AR093 | prostate cancer #15509 | prostate cancer #15509 | | | | |
| AR094 | prostate cancer #15673 | prostate cancer #15673 | | | | |
| AR095 | Small Intestine (Clontech) | Small Intestine (Clontech) | | | | |
| AR096 | Spleen | Spleen | | | | |
| AR097 | Thymus T cells activated | Thymus T cells activated | | | | |
| AR098 | Thymus T cells resting | Thymus T cells resting | | | | |
| AR099 | Tonsil | Tonsil | | | | |
| AR100 | Tonsil geminal center | Tonsil geminal center | | | | |
| | centroblast | centroblast | | | | |
| AR101 | Tonsil germinal center B | Tonsil germinal center B cell | | | | |
| | cell | | | | | |
| AR102 | Tonsil lymph node | Tonsil lymph node | | | | |
| AR103 | Tonsil memory B cell | Tonsil memory B cell | | | | |
| AR104 | Whole Brain | Whole Brain | | | | |
| AR105 | Xenograft ES-2 | Xenograft ES-2 | | | | |
| AR106 | Xenograft SW626 | Xenograft SW626 | | | | |
| AR119 | 001: IL-2 | 001: IL-2 | | | | |
| AR120 | 001: IL-2.1 | 001: IL-2.1 | | | | |
| AR121 | 001: IL-2_b | 001: IL-2_b | | | | |
| AR124 | 002: Monocytes untreated | 002: Monocytes untreated | | | | |
| | (1 hr) | (1 hr) | | | | |
| AR125 | 002: Monocytes untreated | 002: Monocytes untreated | | | | |
| | (5 hrs) | (5 hrs) | | | | |
| AR126 | 002: Control.1C | 002: Control.1C | | | | |
| AR127 | 002: IL2.1C | 002: IL2.1C | | | | |
| AR130 | 003: Placebo-treated Rat | 003: Placebo-treated Rat | | | | |
| | Lacrimal Gland | Lacrimal Gland | | | | |
| AR131 | 003: Placebo-treated Rat | 003: Placebo-treated Rat | | | | |
| | Submandibular Gland | Submandibular Gland | | | | |
| AR135 | 004: Monocytes untreated | 004: Monocytes untreated | | | | |
| | (5 hrs) | (5 hrs) | | | | |
| AR136 | 004: Monocytes untreated | 004: Monocytes untreated | | | | |
| | 1 hr | 1 hr | | | | |
| AR139 | 005: Placebo (48 hrs) | 005: Placebo (48 hrs) | | | | |
| AR140 | 006: pC4 (24 hrs) | 006: pC4 (24 hrs) | | | | |
| AR141 | 006: pC4 (48 hrs) | 006: pC4 (48 hrs) | | | | |
| AR152 | 007: PHA(1 hr) | 007: PHA(1 hr) | | | | |
| AR153 | 007: PHA(6 HRS) | 007: PHA(6 HRS) | | | | |
| AR154 | 007: PMA(6 hrs) | 007: PMA(6 hrs) | | | | |
| AR155 | 008: 1449_#2 | 008: 1449_#2 | | | | |
| AR161 | 01: A - max 24 | 01: A - max 24 | | | | |
| AR162 | 01: A - max 26 | 01: A - max 26 | | | | |
| AR163 | 01: A - max 30 | 01: A - max 30 | | | | |
| AR164 | 01: B - max 24 | 01: B - max 24 | | | | |
| AR165 | 01: B - max 26 | 01: B - max 26 | | | | |
| AR166 | 01: B - max 30 | 01: B - max 30 | | | | |
| AR167 | 1449 Sample | 1449 Sample | | | | |
| AR168 | 3T3P10 1.0 uM insulin | 3T3P10 1.0 uM insulin | | | | |
| AR169 | 3T3P10 10 nM Insulin | 3T3P10 10 nM Insulin | | | | |
| AR170 | 3T3P10 10 uM insulin | 3T3P10 10 uM insulin | | | | |
| AR171 | 3T3P10 No Insulin | 3T3P10 No Insulin | | | | |
| AR172 | 3T3P4 | 3T3P4 | | | | |
| AR173 | Adipose (41892) | Adipose (41892) | | | | |
| AR174 | Adipose Diabetic (41611) | Adipose Diabetic (41611) | | | | |
| AR175 | Adipose Diabetic (41661) | Adipose Diabetic (41661) | | | | |
| AR176 | Adipose Diabetic (41689) | Adipose Diabetic (41689) | | | | |
| AR177 | Adipose Diabetic (41706) | Adipose Diabetic (41706) | | | | |
| AR178 | Adipose Diabetic (42352) | Adipose Diabetic (42352) | | | | |
| AR179 | Adipose Diabetic (42366) | Adipose Diabetic (42366) | | | | |
| AR180 | Adipose Diabetic (42452) | Adipose Diabetic (42452) | | | | |
| AR181 | Adipose Diabetic (42491) | Adipose Diabetic (42491) | | | | |
| AR182 | Adipose Normal (41843) | Adipose Normal (41843) | | | | |
| AR183 | Adipose Normal (41893) | Adipose Normal (41893) | | | | |
| AR184 | Adipose Normal (42452) | Adipose Normal (42452) | | | | |
| AR185 | Adrenal Gland | Adrenal Gland | | | | |
| AR186 | Adrenal Gland + Whole | Adrenal Gland + Whole | | | | |
| | Brain | Brain | | | | |
| AR187 | B7(1 hr)+ (inverted) | B7(1 hr)+ (inverted) | | | | |
| AR188 | Breast (18275A2B) | Breast (18275A2B) | | | | |
| AR189 | Breast (4004199) | Breast (4004199) | | | | |
| AR190 | Breast (4004399) | Breast (4004399) | | | | |
| AR191 | Breast (4004943B7) | Breast (4004943B7) | | | | |
| AR192 | Breast (4005570B1) | Breast (4005570B1) | | | | |
| AR193 | Breast Cancer | Breast Cancer (4004127A30) | | | | |
| | (4004127A30) | | | | | |
| AR194 | Breast Cancer (400443A21) | Breast Cancer (400443A21) | | | | |
| AR195 | Breast Cancer (4004643A2) | Breast Cancer (4004643A2) | | | | |
| AR196 | Breast Cancer (4004710A7) | Breast Cancer (4004710A7) | | | | |
| AR197 | Breast Cancer | Breast Cancer (4004943A21) | | | | |
| | (4004943A21) | | | | | |
| AR198 | Breast Cancer (400553A2) | Breast Cancer (400553A2) | | | | |
| AR199 | Breast Cancer (9805C046R) | Breast Cancer (9805C046R) | | | | |
| AR200 | Breast Cancer (9806C012R) | Breast Cancer (9806C012R) | | | | |
| AR201 | Breast Cancer (ODQ 45913) | Breast Cancer (ODQ 45913) | | | | |
| AR202 | Breast Cancer (ODQ45913) | Breast Cancer (ODQ45913) | | | | |
| AR203 | Breast Cancer (ODQ4591B) | Breast Cancer (ODQ4591B) | | | | |
| AR204 | Colon Cancer (15663) | Colon Cancer (15663) | | | | |
| AR205 | Colon Cancer (4005144A4) | Colon Cancer (4005144A4) | | | | |
| AR206 | Colon Cancer (4005413A4) | Colon Cancer (4005413A4) | | | | |
| AR207 | Colon Cancer (4005570B1) | Colon Cancer (4005570B1) | | | | |
| AR208 | Control RNA #1 | Control RNA #1 | | | | |
| AR209 | Control RNA #2 | Control RNA #2 | | | | |
| AR210 | Cultured Preadipocyte | Cultured Preadipocyte (blue) | | | | |
| | (blue) | | | | | |
| AR211 | Cultured Preadipocyte (Red) | Cultured Preadipocyte (Red) | | | | |
| AR212 | Donor II B-Cells 24 hrs | Donor II B-Cells 24 hrs | | | | |
| AR213 | Donor II Resting B-Cells | Donor II Resting B-Cells | | | | |
| AR214 | H114EP12 10 nM Insulin | H114EP12 10 nM Insulin | | | | |
| AR215 | H114EP12 (10 nM insulin) | H114EP12 (10 nM insulin) | | | | |
| AR216 | H114EP12 (2.6 ug/ul) | H114EP12 (2.6 ug/ul) | | | | |
| AR217 | H114EP12 (3.6 ug/ul) | H114EP12 (3.6 ug/ul) | | | | |
| AR218 | HUVEC #1 | HUVEC #1 | | | | |
| AR219 | HUVEC #2 | HUVEC #2 | | | | |
| AR221 | L6 undiff. | L6 undiff. | | | | |
| AR222 | L6 Undifferentiated | L6 Undifferentiated | | | | |
| AR223 | L6P8 + 10 nM Insulin | L6P8 + 10 nM Insulin | | | | |
| AR224 | L6P8 + HS | L6P8 + HS | | | | |
| AR225 | L6P8 10 nM Insulin | L6P8 10 nM Insulin | | | | |
| AR226 | Liver (00-06-A007B) | Liver (00-06-A007B) | | | | |
| AR227 | Liver (96-02-A075) | Liver (96-02-A075) | | | | |
| AR228 | Liver (96-03-A144) | Liver (96-03-A144) | | | | |
| AR229 | Liver (96-04-A138) | Liver (96-04-A138) | | | | |
| AR230 | Liver (97-10-A074B) | Liver (97-10-A074B) | | | | |
| AR231 | Liver (98-09-A242A) | Liver (98-09-A242A) | | | | |
| AR232 | Liver Diabetic (1042) | Liver Diabetic (1042) | | | | |
| AR233 | Liver Diabetic (41616) | Liver Diabetic (41616) | | | | |
| AR234 | Liver Diabetic (41955) | Liver Diabetic (41955) | | | | |
| AR235 | Liver Diabetic (42352R) | Liver Diabetic (42352R) | | | | |
| AR236 | Liver Diabetic (42366) | Liver Diabetic (42366) | | | | |
| AR237 | Liver Diabetic (42483) | Liver Diabetic (42483) | | | | |
| AR238 | Liver Diabetic (42491) | Liver Diabetic (42491) | | | | |
| AR239 | Liver Diabetic (99-09- | Liver Diabetic (99-09- | | | | |
| | A281A) | A281A) | | | | |
| AR240 | Lung | Lung | | | | |
| AR241 | Lung (27270) | Lung (27270) | | | | |
| AR242 | Lung (2727Q) | Lung (2727Q) | | | | |
| AR243 | Lung Cancer (4005116A1) | Lung Cancer (4005116A1) | | | | |
| AR244 | Lung Cancer (4005121A5) | Lung Cancer (4005121A5) | | | | |
| AR245 | Lung Cancer (4005121A5)) | Lung Cancer (4005121A5)) | | | | |
| AR246 | Lung Cancer (4005340A4) | Lung Cancer (4005340A4) | | | | |
| AR247 | Mammary Gland | Mammary Gland | | | | |
| AR248 | Monocyte (CT) | Monocyte (CT) | | | | |
| AR249 | Monocyte (OCT) | Monocyte (OCT) | | | | |
| AR250 | Monocytes (CT) | Monocytes (CT) | | | | |
| AR251 | Monocytes (INFG 18 hr) | Monocytes (INFG 18 hr) | | | | |
| AR252 | Monocytes (INFG 18 hr) | Monocytes (INFG 18 hr) | | | | |
| AR253 | Monocytes (INFG 8-11) | Monocytes (INFG 8-11) | | | | |
| AR254 | Monocytes (O CT) | Monocytes (O CT) | | | | |
| AR255 | Muscle (91-01-A105) | Muscle (91-01-A105) | | | | |
| AR256 | Muscle (92-04-A059) | Muscle (92-04-A059) | | | | |
| AR257 | Muscle (97-11-A056d) | Muscle (97-11-A056d) | | | | |
| AR258 | Muscle (99-06-A210A) | Muscle (99-06-A210A) | | | | |
| AR259 | Muscle (99-07-A203B) | Muscle (99-07-A203B) | | | | |
| AR260 | Muscle (99-7-A203B) | Muscle (99-7-A203B) | | | | |
| AR261 | Muscle Diabetic (42352R) | Muscle Diabetic (42352R) | | | | |
| AR262 | Muscle Diabetic (42366) | Muscle Diabetic (42366) | | | | |
| AR263 | NK-19 Control | NK-19 Control | | | | |
| AR264 | NK-19 IL Treated 72 hrs | NK-19 IL Treated 72 hrs | | | | |
| AR265 | NK-19 UK Treated 72 hrs. | NK-19 UK Treated 72 hrs. | | | | |
| AR266 | Omentum Normal (94-08- | Omentum Normal (94-08- | | | | |
| | B009) | B009) | | | | |
| AR267 | Omentum Normal (97-01- | Omentum Normal (97-01- | | | | |
| | A039A) | A039A) | | | | |
| AR268 | Omentum Normal (97-04- | Omentum Normal (97-04- | | | | |
| | A114C) | A114C) | | | | |
| AR269 | Omentum Normal (97-06- | Omentum Normal (97-06- | | | | |
| | A117C) | A117C) | | | | |
| AR270 | Omentum Normal (97-09- | Omentum Normal (97-09- | | | | |
| | B004C) | B004C) | | | | |
| AR271 | Ovarian Cancer (17717AID) | Ovarian Cancer (17717AID) | | | | |
| AR272 | Ovarian Cancer | Ovarian Cancer | | | | |
| | (9905C023RC) | (9905C023RC) | | | | |
| AR273 | Ovarian Cancer | Ovarian Cancer | | | | |
| | (9905C032RC) | (9905C032RC) | | | | |
| AR274 | Ovary (9508G045) | Ovary (9508G045) | | | | |
| AR275 | Ovary (9701G208) | Ovary (9701G208) | | | | |
| AR276 | Ovary 9806G005 | Ovary 9806G005 | | | | |
| AR277 | Pancreas | Pancreas | | | | |
| AR278 | Placebo | Placebo | | | | |
| AR279 | rIL2 Control | rIL2 Control | | | | |
| AR280 | RSS288L | RSS288L | | | | |
| AR281 | RSS288LC | RSS288LC | | | | |
| AR282 | Salivary Gland | Salivary Gland | | | | |
| AR283 | Skeletal Muscle | Skeletal Muscle | | | | |
| AR284 | Skeletal Muscle (91-01- | Skeletal Muscle (91-01- | | | | |
| | A105) | A105) | | | | |
| AR285 | Skeletal Muscle (42180) | Skeletal Muscle (42180) | | | | |
| AR286 | Skeletal Muscle (42386) | Skeletal Muscle (42386) | | | | |
| AR287 | Skeletal Muscle (42461) | Skeletal Muscle (42461) | | | | |
| AR288 | Skeletal Muscle (91-01- | Skeletal Muscle (91-01- | | | | |
| | A105) | A105) | | | | |
| AR289 | Skeletal Muscle (92-04- | Skeletal Muscle (92-04- | | | | |
| | A059) | A059) | | | | |
| AR290 | Skeletal Muscle (96-08- | Skeletal Muscle (96-08- | | | | |
| | A171) | A171) | | | | |
| AR291 | Skeletal Muscle (97-07- | Skeletal Muscle (97-07- | | | | |
| | A190A) | A190A) | | | | |
| AR292 | Skeletal Muscle Diabetic | Skeletal Muscle Diabetic | | | | |
| | (42352) | (42352) | | | | |
| AR293 | Skeletal Muscle Diabetic | Skeletal Muscle Diabetic | | | | |
| | (42366) | (42366) | | | | |
| AR294 | Skeletal Muscle Diabetic | Skeletal Muscle Diabetic | | | | |
| | (42395) | (42395) | | | | |
| AR295 | Skeletal Muscle Diabetic | Skeletal Muscle Diabetic | | | | |
| | (42483) | (42483) | | | | |
| AR296 | Skeletal Muscle Diabetic | Skeletal Muscle Diabetic | | | | |
| | (42491) | (42491) | | | | |
| AR297 | Skeletal Muscle Diabetic | Skeletal Muscle Diabetic | | | | |
| | 42352 | 42352 | | | | |
| AR298 | Skeletal Musle (42461) | Skeletal Musle (42461) | | | | |
| AR299 | Small Intestine | Small Intestine | | | | |
| AR300 | Stomach | Stomach | | | | |
| AR301 | T-Cell + HDPBQ71.fc 1449 | T-Cell + HDPBQ71.fc 1449 | | | | |
| | 16 hrs | 16 hrs | | | | |
| AR302 | T-Cell + HDPBQ71.fc 1449 | T-Cell + HDPBQ71.fc 1449 | | | | |
| | 6 hrs | 6 hrs | | | | |
| AR303 | T-Cell + IL2 16 hrs | T-Cell + IL2 16 hrs | | | | |
| AR304 | T-Cell + IL2 6 hrs | T-Cell + IL2 6 hrs | | | | |
| AR306 | T-Cell Untreated 16 hrs | T-Cell Untreated 16 hrs | | | | |
| AR307 | T-Cell Untreated 6 hrs | T-Cell Untreated 6 hrs | | | | |
| AR308 | T-Cells 24 hours | T-Cells 24 hours | | | | |
| AR309 | T-Cells 24 hrs | T-Cells 24 hrs | | | | |
| AR310 | T-Cells 24 hrs. | T-Cells 24 hrs. | | | | |
| AR311 | T-Cells 24 hrs | T-Cells 24 hrs | | | | |
| AR312 | T-Cells 4 days | T-Cells 4 days | | | | |
| AR313 | Thymus | Thymus | | | | |
| AR314 | TRE | TRE | | | | |
| AR315 | TREC | TREC | | | | |
| AR316 | Virtual Mixture | Virtual Mixture | | | | |
| AR317 | B lymphocyte, | B lymphocyte, | | | | |
| AR318 | (non-T; non-B) | (non-T; non-B) | | | | |
| AR326 | 001 —293 RNA (Vector | 001 —293 RNA (Vector | | | | |
| | Control) | Control) | | | | |
| AR327 | 001: Control | 001: Control | | | | |
| AR328 | 001: Control.1 | 001: Control.1 | | | | |
| AR355 | Acute Lymphocyte | Acute Lymphocyte Leukemia | | | | |
| | Leukemia | | | | | |
| AR356 | AML Patient #11 | AML Patient #11 | | | | |
| AR357 | AML Patient #2 | AML Patient #2 | | | | |
| AR358 | AML Patient #2 SGAH | AML Patient #2 SGAH | | | | |
| AR359 | AML Patient#2 | AML Patient#2 | | | | |
| AR360 | Aorta | Aorta | | | | |
| AR361 | B Cell | B Cell | | | | |
| AR362 | B lymphoblast | B lymphoblast | | | | |
| AR363 | B lymphocyte | B lymphocyte | | | | |
| AR364 | B lymphocytes | B lymphocytes | | | | |
| AR365 | B-cell | B-cell | | | | |
| AR366 | B-Cells | B-Cells | | | | |
| AR367 | B-Lymphoblast | B-Lymphoblast | | | | |
| AR368 | B-Lymphocytes | B-Lymphocytes | | | | |
| AR369 | Bladder | Bladder | | | | |
| AR370 | Bone Marrow | Bone Marrow | | | | |
| AR371 | Bronchial Epithelial Cell | Bronchial Epithelial Cell | | | | |
| AR372 | Bronchial Epithelial Cells | Bronchial Epithelial Cells | | | | |
| AR373 | Caco-2A | Caco-2A | | | | |
| AR374 | Caco-2B | Caco-2B | | | | |
| AR375 | Caco-2C | Caco-2C | | | | |
| AR376 | Cardiac #1 | Cardiac #1 | | | | |
| AR377 | Cardiac #2 | Cardiac #2 | | | | |
| AR378 | Chest Muscle | Chest Muscle | | | | |
| AR381 | Dendritic Cell | Dendritic Cell | | | | |
| AR382 | Dendritic cells | Dendritic cells | | | | |
| AR383 | E. coli | E. coli | | | | |
| AR384 | Epithelial Cells | Epithelial Cells | | | | |
| AR385 | Esophagus | Esophagus | | | | |
| AR386 | FPPS | FPPS | | | | |
| AR387 | FPPSC | FPPSC | | | | |
| AR388 | HepG2 Cell Line | HepG2 Cell Line | | | | |
| AR389 | HepG2 Cell line Buffer 1 hr. | HepG2 Cell line Buffer 1 hr. | | | | |
| AR390 | HepG2 Cell line Buffer 06 hr | HepG2 Cell line Buffer 06 hr | | | | |
| AR391 | HepG2 Cell line Buffer 24 hr. | HepG2 Cell line Buffer 24 hr. | | | | |
| AR392 | HepG2 Cell line Insulin 01 hr. | HepG2 Cell line Insulin 01 hr. | | | | |
| AR393 | HepG2 Cell line Insulin 06 hr. | HepG2 Cell line Insulin 06 hr. | | | | |
| AR394 | HepG2 Cell line Insulin 24 hr. | HepG2 Cell line Insulin 24 hr. | | | | |
| AR398 | HMC-1 | HMC-1 | | | | |
| AR399 | HMCS | HMCS | | | | |
| AR400 | HMSC | HMSC | | | | |
| AR401 | HUVEC #3 | HUVEC #3 | | | | |
| AR402 | HUVEC #4 | HUVEC #4 | | | | |
| AR404 | KIDNEY NORMAL | KIDNEY NORMAL | | | | |
| AR405 | KIDNEY TUMOR | KIDNEY TUMOR | | | | |
| AR406 | KIDNEY TUMOR | | | | | |
| AR407 | Lymph Node | Lymph Node | | | | |
| AR408 | Macrophage | Macrophage | | | | |
| AR409 | Megakarioblast | Megakarioblast | | | | |
| AR410 | Monocyte | Monocyte | | | | |
| AR411 | Monocytes | Monocytes | | | | |
| AR412 | Myocardium | Myocardium | | | | |
| AR413 | Myocardium #3 | Myocardium #3 | | | | |
| AR414 | Myocardium #4 | Myocardium #4 | | | | |
| AR415 | Myocardium #5 | Myocardium #5 | | | | |
| AR416 | NK | NK | | | | |
| AR417 | NK cell | NK cell | | | | |
| AR418 | NK cells | NK cells | | | | |
| AR419 | NKYa | NKYa | | | | |
| AR420 | NKYa019 | NKYa019 | | | | |
| AR421 | Ovary | Ovary | | | | |
| AR422 | Patient #11 | Patient #11 | | | | |
| AR423 | Peripheral blood | Peripheral blood | | | | |
| AR424 | Primary Adipocytes | Primary Adipocytes | | | | |
| AR425 | Promyeloblast | Promyeloblast | | | | |
| AR427 | RSSWT | RSSWT | | | | |
| AR428 | RSSWTC | RSSWTC | | | | |
| AR429 | SW 480(G1) | SW 480(G1) | | | | |
| AR430 | SW 480(G2) | SW 480(G2) | | | | |
| AR431 | SW 480(G3) | SW 480(G3) | | | | |
| AR432 | SW 480(G4) | SW 480(G4) | | | | |
| AR433 | SW 480(G5) | SW 480(G5) | | | | |
| AR434 | T Lymphoblast | T Lymphoblast | | | | |
| AR435 | T Lymphocyte | T Lymphocyte | | | | |
| AR436 | T-Cell | T-Cell | | | | |
| AR438 | T-Cell, | T-Cell, | | | | |
| AR439 | T-Cells | T-Cells | | | | |
| AR440 | T-lymphoblast | T-lymphoblast | | | | |
| AR441 | Th 1 | Th 1 | | | | |
| AR442 | Th 2 | Th 2 | | | | |
| AR443 | Th1 | Th1 | | | | |
| AR444 | Th2 | Th2 | | | | |
| H0002 | Human Adult Heart | Human Adult Heart | Heart | | | Uni-ZAP XR |
| H0003 | Human Adult Liver | Human Adult Liver | Liver | | | Uni-ZAP XR |
| H0004 | Human Adult Spleen | Human Adult Spleen | Spleen | | | Uni-ZAP XR |
| H0008 | Whole 6 Week Old Embryo | | | | | Uni-ZAP XR |
| H0009 | Human Fetal Brain | | | | | Uni-ZAP XR |
| H0011 | Human Fetal Kidney | Human Fetal Kidney | Kidney | | | Uni-ZAP XR |
| H0012 | Human Fetal Kidney | Human Fetal Kidney | Kidney | | | Uni-ZAP XR |
| H0013 | Human 8 Week Whole | Human 8 Week Old Embryo | Embryo | | | Uni-ZAP XR |
| | Embryo | | | | | |
| H0014 | Human Gall Bladder | Human Gall Bladder | Gall Bladder | | | Uni-ZAP XR |
| H0015 | Human Gall Bladder, | Human Gall Bladder | Gall Bladder | | | Uni-ZAP XR |
| | fraction II | | | | | |
| H0022 | Jurkat Cells | Jurkat T-Cell Line | | | | Lambda ZAP II |
| H0023 | Human Fetal Lung | | | | | Uni-ZAP XR |
| H0024 | Human Fetal Lung III | Human Fetal Lung | Lung | | | Uni-ZAP XR |
| H0025 | Human Adult Lymph Node | Human Adult Lymph Node | Lymph Node | | | Lambda ZAP II |
| H0026 | Namalwa Cells | Namalwa B-Cell Line, EBV | | | | Lambda ZAP II |
| | | immortalized | | | | |
| H0028 | Human Old Ovary | Human Old Ovary | Ovary | | | pBluescript |
| H0029 | Human Pancreas | Human Pancreas | Pancreas | | | Uni-ZAP XR |
| H0030 | Human Placenta | | | | | Uni-ZAP XR |
| H0031 | Human Placenta | Human Placenta | Placenta | | | Uni-ZAP XR |
| H0032 | Human Prostate | Human Prostate | Prostate | | | Uni-ZAP XR |
| H0033 | Human Pituitary | Human Pituitary | | | | Uni-ZAP XR |
| H0035 | Human Salivary Gland | Human Salivary Gland | Salivary gland | | | Uni-ZAP XR |
| H0036 | Human Adult Small | Human Adult Small Intestine | Small Int. | | | Uni-ZAP XR |
| | Intestine | | | | | |
| H0037 | Human Adult Small | Human Adult Small Intestine | Small Int. | | | pBluescript |
| | Intestine | | | | | |
| H0038 | Human Testes | Human Testes | Testis | | | Uni-ZAP XR |
| H0039 | Human Pancreas Tumor | Human Pancreas Tumor | Pancreas | | disease | Uni-ZAP XR |
| H0040 | Human Testes Tumor | Human Testes Tumor | Testis | | disease | Uni-ZAP XR |
| H0041 | Human Fetal Bone | Human Fetal Bone | Bone | | | Uni-ZAP XR |
| H0042 | Human Adult Pulmonary | Human Adult Pulmonary | Lung | | | Uni-ZAP XR |
| H0044 | Human Cornea | Human Cornea | eye | | | Uni-ZAP XR |
| H0046 | Human Endometrial Tumor | Human Endometrial Tumor | Uterus | | disease | Uni-ZAP XR |
| H0047 | Human Fetal Liver | Human Fetal Liver | Liver | | | Uni-ZAP XR |
| H0049 | Human Fetal Kidney | Human Fetal Kidney | Kidney | | | Uni-ZAP XR |
| H0050 | Human Fetal Heart | Human Fetal Heart | Heart | | | Uni-ZAP XR |
| H0051 | Human Hippocampus | Human Hippocampus | Brain | | | Uni-ZAP XR |
| H0052 | Human Cerebellum | Human Cerebellum | Brain | | | Uni-ZAP XR |
| H0053 | Human Adult Kidney | Human Adult Kidney | Kidney | | | Uni-ZAP XR |
| H0056 | Human Umbilical Vein, | Human Umbilical Vein | Umbilical vein | | | Uni-ZAP XR |
| | Endo. remake | Endothelial Cells | | | | |
| H0057 | Human Fetal Spleen | | | | | Uni-ZAP XR |
| H0058 | Human Thymus Tumor | Human Thymus Tumor | Thymus | | disease | Lambda ZAP II |
| H0059 | Human Uterine Cancer | Human Uterine Cancer | Uterus | | disease | Lambda ZAP II |
| H0060 | Human Macrophage | Human Macrophage | Blood | Cell Line | | pBluescript |
| H0061 | Human Macrophage | Human Macrophage | Blood | Cell Line | | pBluescript |
| H0063 | Human Thymus | Human Thymus | Thymus | | | Uni-ZAP XR |
| H0068 | Human Skin Tumor | Human Skin Tumor | Skin | | disease | Uni-ZAP XR |
| H0069 | Human Activated T-Cells | Activated T-Cells | Blood | Cell Line | | Uni-ZAP XR |
| H0071 | Human Infant Adrenal | Human Infant Adrenal Gland | Adrenal gland | | | Uni-ZAP XR |
| | Gland | | | | | |
| H0075 | Human Activated T-Cells | Activated T-Cells | Blood | Cell Line | | Uni-ZAP XR |
| | (II) | | | | | |
| H0081 | Human Fetal Epithelium | Human Fetal Skin | Skin | | | Uni-ZAP XR |
| | (Skin) | | | | | |
| H0082 | Human Fetal Muscle | Human Fetal Muscle | Sk Muscle | | | Uni-ZAP XR |
| H0083 | HUMAN JURKAT | Jurkat Cells | | | | Uni-ZAP XR |
| | MEMBRANE BOUND | | | | | |
| | POLYSOMES | | | | | |
| H0085 | Human Colon | Human Colon | | | | Lambda ZAP II |
| H0086 | Human epithelioid sarcoma | Epithelioid Sarcoma, muscle | Sk Muscle | | disease | Uni-ZAP XR |
| H0087 | Human Thymus | Human Thymus | | | | pBluescript |
| H0090 | Human T-Cell Lymphoma | T-Cell Lymphoma | T-Cell | | disease | Uni-ZAP XR |
| H0093 | Human Greater Omentum | Human Greater Omentum | peritoneum | | disease | Uni-ZAP XR |
| | Tumor | | | | | |
| H0095 | Human Greater Omentum, | Human Greater Omentum | peritoneum | | | Uni-ZAP XR |
| | RNA Remake | | | | | |
| H0097 | Human Adult Heart, | Human Adult Heart | Heart | | | pBluescript |
| | subtracted | | | | | |
| H0098 | Human Adult Liver, | Human Adult Liver | Liver | | | Uni-ZAP XR |
| | subtracted | | | | | |
| H0099 | Human Lung Cancer, | Human Lung Cancer | Lung | | | pBluescript |
| | subtracted | | | | | |
| H0100 | Human Whole Six Week | Human Whole Six Week Old | Embryo | | | Uni-ZAP XR |
| | Old Embryo | Embryo | | | | |
| H0101 | Human 7 Weeks Old | Human Whole 7 Week Old | Embryo | | | Lambda ZAP II |
| | Embryo, subtracted | Embryo | | | | |
| H0102 | Human Whole 6 Week Old | Human Whole Six Week Old | Embryo | | | pBluescript |
| | Embryo (II), subt | Embryo | | | | |
| H0107 | Human Infant Adrenal | Human Infant Adrenal Gland | Adrenal gland | | | pBluescript |
| | Gland, subtracted | | | | | |
| H0108 | Human Adult Lymph Node, | Human Adult Lymph Node | Lymph Node | | | Uni-ZAP XR |
| | subtracted | | | | | |
| H0109 | Human Macrophage, | Macrophage | Blood | Cell Line | | pBluescript |
| | subtracted | | | | | |
| H0111 | Human Placenta, subtracted | Human Placenta | Placenta | | | pBluescript |
| H0119 | Human Pediatric Kidney | Human Pediatric Kidney | Kidney | | | Uni-ZAP XR |
| H0122 | Human Adult Skeletal | Human Skeletal Muscle | Sk Muscle | | | Uni-ZAP XR |
| | Muscle | | | | | |
| H0123 | Human Fetal Dura Mater | Human Fetal Dura Mater | Brain | | | Uni-ZAP XR |
| H0124 | Human Rhabdomyosarcoma | Human Rhabdomyosarcoma | Sk Muscle | | disease | Uni-ZAP XR |
| H0125 | Cem cells cyclohexamide | Cyclohexamide Treated Cem, | Blood | Cell Line | | Uni-ZAP XR |
| | treated | Jurkat, Raji, and Supt | | | | |
| H0130 | LNCAP untreated | LNCAP Cell Line | Prostate | Cell Line | | Uni-ZAP XR |
| H0131 | LNCAP + o.3 nM R1881 | LNCAP Cell Line | Prostate | Cell Line | | Uni-ZAP XR |
| H0132 | LNCAP + 30 nM R1881 | LNCAP Cell Line | Prostate | Cell Line | | Uni-ZAP XR |
| H0134 | Raji Cells, cyclohexamide | Cyclohexamide Treated Cem, | Blood | Cell Line | | Uni-ZAP XR |
| | treated | Jurkat, Raji, and Supt | | | | |
| H0135 | Human Synovial Sarcoma | Human Synovial Sarcoma | Synovium | | | Uni-ZAP XR |
| H0136 | Supt Cells, cyclohexamide | Cyclohexamide Treated Cem, | Blood | Cell Line | | Uni-ZAP XR |
| | treated | Jurkat, Raji, and Supt | | | | |
| H0140 | Activated T-Cells, 8 hrs. | Activated T-Cells | Blood | Cell Line | | Uni-ZAP XR |
| H0141 | Activated T-Cells, 12 hrs. | Activated T-Cells | Blood | Cell Line | | Uni-ZAP XR |
| H0142 | MCF7 Cell Line | MCF7 Cell line | Breast | Cell Line | | Uni-ZAP XR |
| H0144 | Nine Week Old Early Stage | 9 Wk Old Early Stage Human | Embryo | | | Uni-ZAP XR |
| | Human | | | | | |
| H0147 | Human Adult Liver | Human Adult Liver | Liver | | | Uni-ZAP XR |
| H0149 | 7 Week Old Early Stage | Human Whole 7 Week Old | Embryo | | | Uni-ZAP XR |
| | Human, subtracted | Embryo | | | | |
| H0150 | Human Epididymus | Epididymis | Testis | | | Uni-ZAP XR |
| H0151 | Early Stage Human Liver | Human Fetal Liver | Liver | | | Uni-ZAP XR |
| H0156 | Human Adrenal Gland | Human Adrenal Gland Tumor | Adrenal Gland | | disease | Uni-ZAP XR |
| | Tumor | | | | | |
| H0159 | Activated T-Cells, 8 hrs., | Activated T-Cells | Blood | Cell Line | | Uni-ZAP XR |
| | ligation 2 | | | | | |
| H0163 | Human Synovium | Human Synovium | Synovium | | | Uni-ZAP XR |
| H0165 | Human Prostate Cancer, | Human Prostate Cancer, stage | Prostate | | disease | Uni-ZAP XR |
| | Stage B2 | B2 | | | | |
| H0166 | Human Prostate Cancer, | Human Prostate Cancer, stage | Prostate | | disease | Uni-ZAP XR |
| | Stage B2 fraction | B2 | | | | |
| H0167 | Activated T-Cells, 24 hrs. | Activated T-Cells | Blood | Cell Line | | Uni-ZAP XR |
| H0168 | Human Prostate Cancer, | Human Prostate Cancer, | Prostate | | disease | Uni-ZAP XR |
| | Stage C | stage C | | | | |
| H0169 | Human Prostate Cancer, | Human Prostate | Prostate | | disease | Uni-ZAP XR |
| | Stage C fraction | Cancer, stage C | | | | |
| H0170 | 12 Week Old Early Stage | Twelve Week Old Early | Embryo | | | Uni-ZAP XR |
| | Human | Stage Human | | | | |
| H0171 | 12 Week Old Early Stage | Twelve Week Old Early | Embryo | | | Uni-ZAP XR |
| | Human, II | Stage Human | | | | |
| H0172 | Human Fetal Brain, random | Human Fetal Brain | Brain | | | Lambda ZAP II |
| | primed | | | | | |
| H0175 | H. Adult Spleen, ziplox | | | | | pSport1 |
| H0177 | CAMA1Ee Cell Line | CAMA1Ee Cell Line | Breast | Cell Line | | Uni-ZAP XR |
| H0178 | Human Fetal Brain | Human Fetal Brain | Brain | | | Uni-ZAP XR |
| H0179 | Human Neutrophil | Human Neutrophil | Blood | Cell Line | | Uni-ZAP XR |
| H0181 | Human Primary Breast | Human Primary Breast | Breast | | disease | Uni-ZAP XR |
| | Cancer | Cancer | | | | |
| H0182 | Human Primary Breast | Human Primary Breast | Breast | | disease | Uni-ZAP XR |
| | Cancer | Cancer | | | | |
| H0184 | Human Colon Cancer, | Human Colon Cancer, | Liver | | disease | Lambda ZAP II |
| | metasticized to live | metasticized to liver | | | | |
| H0188 | Human Normal Breast | Human Normal Breast | Breast | | | Uni-ZAP XR |
| H0190 | Human Activated | Human | Blood | Cell Line | | Uni-ZAP XR |
| | Macrophage (LPS) | Macrophage/Monocytes | | | | |
| H0191 | Human Activated | Human | Blood | Cell Line | | Uni-ZAP XR |
| | Macrophage (LPS), thiour | Macrophage/Monocytes | | | | |
| H0194 | Human Cerebellum, | Human Cerebellum | Brain | | | pBluescript |
| | subtracted | | | | | |
| H0196 | Human Cardiomyopathy, | Human Cardiomyopathy | Heart | | | Uni-ZAP XR |
| | subtracted | | | | | |
| H0197 | Human Fetal Liver, | Human Fetal Liver | Liver | | | Uni-ZAP XR |
| | subtracted | | | | | |
| H0199 | Human Fetal Liver, | Human Fetal Liver | Liver | | | Uni-ZAP XR |
| | subtracted, neg clone | | | | | |
| H0200 | Human Greater Omentum, | Human Greater Omentum | peritoneum | | | Uni-ZAP XR |
| | fract II remake, | | | | | |
| H0201 | Human Hippocampus, | Human Hippocampus | Brain | | | pBluescript |
| | subtracted | | | | | |
| H0204 | Human Colon Cancer, | Human Colon Cancer | Colon | | | pBluescript |
| | subtracted | | | | | |
| H0208 | Early Stage Human Lung, | Human Fetal Lung | Lung | | | pBluescript |
| | subtracted | | | | | |
| H0209 | Human Cerebellum, | Human Cerebellum | Brain | | | Uni-ZAP XR |
| | differentially expressed | | | | | |
| H0211 | Human Prostate, differential | Human Prostate | Prostate | | | pBluescript |
| | expression | | | | | |
| H0212 | Human Prostate, subtracted | Human Prostate | Prostate | | | pBluescript |
| H0213 | Human Pituitary, subtracted | Human Pituitary | | | | Uni-ZAP XR |
| H0215 | Raji cells, cyclohexamide | Cyclohexamide Treated Cem, | Blood | Cell Line | | pBluescript |
| | treated, differentially | Jurkat, Raji, and Supt | | | | |
| | expressed | | | | | |
| H0216 | Supt cells, cyclohexamide | Cyclohexamide Treated Cem, | Blood | Cell Line | | pBluescript |
| | treated, subtracted | Jurkat, Raji, and Supt | | | | |
| H0217 | Supt cells, cyclohexamide | Cyclohexamide Treated Cem, | Blood | Cell Line | | pBluescript |
| | treated, differentially | Jurkat, Raji, and Supt | | | | |
| | expressed | | | | | |
| H0218 | Activated T-Cells, 0 hrs, | Activated T-Cells | Blood | Cell Line | | Uni-ZAP XR |
| | subtracted | | | | | |
| H0219 | Activated T-Cells, 0 hrs, | Activated T-Cells | Blood | Cell Line | | Uni-ZAP XR |
| | differentially expressed | | | | | |
| H0220 | Activated T-Cells, 4 hrs, | Activated T-Cells | Blood | Cell Line | | Uni-ZAP XR |
| | subtracted | | | | | |
| H0222 | Activated T-Cells, 8 hrs, | Activated T-Cells | Blood | Cell Line | | Uni-ZAP XR |
| | subtracted | | | | | |
| H0224 | Activated T-Cells, 12 hrs, | Activated T-Cells | Blood | Cell Line | | Uni-ZAP XR |
| | subtracted | | | | | |
| H0225 | Activated T-Cells, 12 hrs, | Activated T-Cells | Blood | Cell Line | | Uni-ZAP XR |
| | differentially expressed | | | | | |
| H0229 | Early Stage Human Brain, | Early Stage Human Brain | Brain | | | Lambda ZAP II |
| | random primed | | | | | |
| H0230 | Human Cardiomyopathy, | Human Cardiomyopathy | Heart | | disease | Uni-ZAP XR |
| | diff exp | | | | | |
| H0231 | Human Colon, subtraction | Human Colon | | | | pBluescript |
| H0232 | Human Colon, differential | Human Colon | | | | pBluescript |
| | expression | | | | | |
| H0234 | human colon cancer, | Human Colon Cancer, | Liver | | | pBluescript |
| | metastatic to liver, | metasticized to liver | | | | |
| | differentially expressed | | | | | |
| H0235 | Human colon cancer, | Human Colon Cancer, | Liver | | | pBluescript |
| | metaticized to liver, | metasticized to liver | | | | |
| | subtraction | | | | | |
| H0239 | Human Kidney Tumor | Human Kidney Tumor | Kidney | | disease | Uni-ZAP XR |
| H0241 | C7MCF7 cell line, estrogen | C7MCF7 Cell Line, estrogen | Breast | Cell Line | | Uni-ZAP XR |
| | treated, subtraction | treated | | | | |
| H0242 | Human Fetal Heart, | Human Fetal Heart | Heart | | | pBluescript |
| | Differential (Fetal-Specific) | | | | | |
| H0244 | Human 8 Week Whole | Human 8 Week Old Embryo | Embryo | | | Uni-ZAP XR |
| | Embryo, subtracted | | | | | |
| H0247 | Human Membrane Bound | Human Membrane Bound | Blood | Cell Line | | Uni-ZAP XR |
| | Polysomes - Enzyme | Polysomes | | | | |
| | Subtraction | | | | | |
| H0249 | HE7, subtracted by | Human Whole 7 Week Old | Embryo | | | Uni-ZAP XR |
| | hybridization with E7 cDNA | Embryo | | | | |
| H0250 | Human Activated | Human Monocytes | | | | Uni-ZAP XR |
| | Monocytes | | | | | |
| H0251 | Human Chondrosarcoma | Human Chondrosarcoma | Cartilage | | disease | Uni-ZAP XR |
| H0252 | Human Osteosarcoma | Human Osteosarcoma | Bone | | disease | Uni-ZAP XR |
| H0253 | Human adult testis, large | Human Adult Testis | Testis | | | Uni-ZAP XR |
| | inserts | | | | | |
| H0254 | Breast Lymph node cDNA | Breast Lymph Node | Lymph Node | | | Uni-ZAP XR |
| | library | | | | | |
| H0255 | breast lymph node CDNA | Breast Lymph Node | Lymph Node | | | Lambda ZAP II |
| | library | | | | | |
| H0256 | HL-60, unstimulated | Human HL-60 Cells, | Blood | Cell Line | | Uni-ZAP XR |
| | | unstimulated | | | | |
| H0257 | HL-60, PMA 4H | HL-60 Cells, PMA stimulated | Blood | Cell Line | | Uni-ZAP XR |
| | | 4H | | | | |
| H0261 | H. cerebellum, Enzyme | Human Cerebellum | Brain | | | Uni-ZAP XR |
| | subtracted | | | | | |
| H0263 | human colon cancer | Human Colon Cancer | Colon | | disease | Lambda ZAP II |
| H0264 | human tonsils | Human Tonsil | Tonsil | | | Uni-ZAP XR |
| H0265 | Activated T-Cell | T-Cells | Blood | Cell Line | | Uni-ZAP XR |
| | (12hs)/Thiouridine | | | | | |
| | labelledEco | | | | | |
| H0266 | Human Microvascular | HMEC | Vein | Cell Line | | Lambda ZAP II |
| | Endothelial Cells, fract. A | | | | | |
| H0267 | Human Microvascular | HMEC | Vein | Cell Line | | Lambda ZAP II |
| | Endothelial Cells, fract. B | | | | | |
| H0268 | Human Umbilical Vein | HUVE Cells | Umbilical vein | Cell Line | | Lambda ZAP II |
| | Endothelial Cells, fract. A | | | | | |
| H0269 | Human Umbilical Vein | HUVE Cells | Umbilical vein | Cell Line | | Lambda ZAP II |
| | Endothelial Cells, fract. B | | | | | |
| H0270 | HPAS (human pancreas, | Human Pancreas | Pancreas | | | Uni-ZAP XR |
| | subtracted) | | | | | |
| H0271 | Human Neutrophil, | Human Neutrophil - | Blood | Cell Line | | Uni-ZAP XR |
| | Activated | Activated | | | | |
| H0272 | HUMAN TONSILS, | Human Tonsil | Tonsil | | | Uni-ZAP XR |
| | FRACTION 2 | | | | | |
| H0274 | Human Adult Spleen, | Human Adult Spleen | Spleen | | | Uni-ZAP XR |
| | fractionII | | | | | |
| H0275 | Human Infant Adrenal | Human Infant Adrenal Gland | Adrenal gland | | | pBluescript |
| | Gland, Subtracted | | | | | |
| H0279 | K562 cells | K562 Cell line | cell line | Cell Line | | ZAP Express |
| H0280 | K562 + PMA (36 hrs) | K562 Cell line | cell line | Cell Line | | ZAP Express |
| H0281 | Lymph node, abnorm. cell | Lymph Node, abnormal cell | Lymph Node | Cell Line | | ZAP Express |
| | line (ATCC #7225) | line | | | | |
| H0284 | Human OB MG63 control | Human Osteoblastoma MG63 | Bone | Cell Line | | Uni-ZAP XR |
| | fraction I | cell line | | | | |
| H0286 | Human OB MG63 treated | Human Osteoblastoma MG63 | Bone | Cell Line | | Uni-ZAP XR |
| | (10 nM E2) fraction I | cell line | | | | |
| H0288 | Human OB HOS control | Human Osteoblastoma HOS | Bone | Cell Line | | Uni-ZAP XR |
| | fraction I | cell line | | | | |
| H0290 | Human OB HOS treated (1 nM | Human Osteoblastoma HOS | Bone | Cell Line | | Uni-ZAP XR |
| | E2) fraction I | cell line | | | | |
| H0292 | Human OB HOS treated (10 nM | Human Osteoblastoma HOS | Bone | Cell Line | | Uni-ZAP XR |
| | E2) fraction I | cell line | | | | |
| H0293 | WI 38 cells | | | | | Uni-ZAP XR |
| H0294 | Amniotic Cells - TNF | Amniotic Cells - TNF | Placenta | Cell Line | | Uni-ZAP XR |
| | induced | induced | | | | |
| H0295 | Amniotic Cells - Primary | Amniotic Cells - Primary | Placenta | Cell Line | | Uni-ZAP XR |
| | Culture | Culture | | | | |
| H0300 | CD34 positive cells (Cord | CD34 Positive Cells | Cord Blood | | | ZAP Express |
| | Blood) | | | | | |
| H0305 | CD34 positive cells (Cord | CD34 Positive Cells | Cord Blood | | | ZAP Express |
| | Blood) | | | | | |
| H0306 | CD34 depleted Buffy Coat | CD34 Depleted Buffy Coat | Cord Blood | | | ZAP Express |
| | (Cord Blood) | (Cord Blood) | | | | |
| H0309 | Human Chronic Synovitis | Synovium, Chronic | Synovium | | disease | Uni-ZAP XR |
| | | Synovitis/Osteoarthritis | | | | |
| H0310 | human caudate nucleus | Brain | Brain | | | Uni-ZAP XR |
| H0316 | HUMAN STOMACH | Human Stomach | Stomach | | | Uni-ZAP XR |
| H0318 | HUMAN B CELL | Human B Cell Lymphoma | Lymph Node | | disease | Uni-ZAP XR |
| | LYMPHOMA | | | | | |
| H0320 | Human frontal cortex | Human Frontal Cortex | Brain | | | Uni-ZAP XR |
| H0327 | human corpus colosum | Human Corpus Callosum | Brain | | | Uni-ZAP XR |
| H0328 | human ovarian cancer | Ovarian Cancer | Ovary | | disease | Uni-ZAP XR |
| H0329 | Dermatofibrosarcoma | Dermatofibrosarcoma | Skin | | disease | Uni-ZAP XR |
| | Protuberance | Protuberans | | | | |
| H0331 | Hepatocellular Tumor | Hepatocellular Tumor | Liver | | disease | Lambda ZAP II |
| H0333 | Hemangiopericytoma | Hemangiopericytoma | Blood vessel | | disease | Lambda ZAP II |
| H0334 | Kidney cancer | Kidney Cancer | Kidney | | disease | Uni-ZAP XR |
| H0339 | Duodenum | Duodenum | | | | Uni-ZAP XR |
| H0340 | Corpus Callosum | Corpus Collosum-93052 | | | | Uni-ZAP XR |
| H0341 | Bone Marrow Cell Line | Bone Marrow Cell Line | Bone Marrow | Cell Line | | Uni-ZAP XR |
| | (RS4; 11) | RS4; 11 | | | | |
| H0343 | stomach cancer (human) | Stomach Cancer - 5383A | | | disease | Uni-ZAP XR |
| | | (human) | | | | |
| H0344 | Adipose tissue (human) | Adipose - 6825A (human) | | | | Uni-ZAP XR |
| H0345 | SKIN | Skin —4000868H | Skin | | | Uni-ZAP XR |
| H0346 | Brain-medulloblastoma | Brain (Medulloblastoma) - | Brain | | disease | Uni-ZAP XR |
| | | 9405C006R | | | | |
| H0349 | human adult liver cDNA | Human Adult Liver | Liver | | | pCMVSport 1 |
| | library | | | | | |
| H0350 | Human Fetal Liver, mixed | Human Fetal Liver, mixed | Liver | | | Uni-ZAP XR |
| | 10 & 14 week | 10&14 Week | | | | |
| H0351 | Glioblastoma | Glioblastoma | Brain | | disease | Uni-ZAP XR |
| H0352 | wilm''s tumor | Wilm''s Tumor | | | disease | Uni-ZAP XR |
| H0354 | Human Leukocytes | Human Leukocytes | Blood | Cell Line | | pCMVSport 1 |
| H0355 | Human Liver | Human Liver, normal Adult | | | | pCMVSport 1 |
| H0356 | Human Kidney | Human Kidney | Kidney | | | pCMVSport 1 |
| H0357 | H. Normalized Fetal Liver, | Human Fetal Liver | Liver | | | Uni-ZAP XR |
| | II | | | | | |
| H0362 | HeLa cell line | HELA CELL LINE | | | | pSport1 |
| H0363 | Human Brain Medulla, | Human Brain Medulla | | | | pBluescript |
| | subtracted | | | | | |
| H0365 | Osteoclastoma-normalized B | Human Osteoclastoma | | | disease | Uni-ZAP XR |
| H0366 | L428 cell line | L428 | | | | ZAP Express |
| H0369 | H. Atrophic Endometrium | Atrophic Endometrium and | | | | Uni-ZAP XR |
| | | myometrium | | | | |
| H0370 | H. Lymph node breast | Lymph node with Met. Breast | | | disease | Uni-ZAP XR |
| | Cancer | Cancer | | | | |
| H0371 | Eosinophils- | Eosinophils- | | | disease | Uni-ZAP XR |
| | Hypereosinophilia patient | Hypereosinophilia patient | | | | |
| H0373 | Human Heart | Human Adult Heart | Heart | | | pCMVSport 1 |
| H0374 | Human Brain | Human Brain | | | | pCMVSport 1 |
| H0375 | Human Lung | Human Lung | | | | pCMVSport 1 |
| H0376 | Human Spleen | Human Adult Spleen | Spleen | | | pCMVSport 1 |
| H0379 | Human Tongue, frac 1 | Human Tongue | | | | pSport 1 |
| H0380 | Human Tongue, frac 2 | Human Tongue | | | | pSport 1 |
| H0381 | Bone Cancer | Bone Cancer | | | disease | Uni-ZAP XR |
| H0383 | Human Prostate BPH, re- | Human Prostate BPH | | | | Uni-ZAP XR |
| | excision | | | | | |
| H0385 | H. Leukocytes, Kozak | Human Leukocytes | Blood | Cell Line | | pCMVSport 1 |
| H0388 | Human Rejected Kidney, | Human Rejected Kidney | | | disease | pBluescript |
| | 704 re-excision | | | | | |
| H0390 | Human Amygdala | Human Amygdala | | | disease | pBluescript |
| | Depression, re-excision | Depression | | | | |
| H0391 | H. Meniingima, M6 | Human Meningima | brain | | | pSport1 |
| H0392 | H. Meningima, M1 | Human Meningima | brain | | | pSport1 |
| H0393 | Fetal Liver, subtraction II | Human Fetal Liver | Liver | | | pBluescript |
| H0394 | A-14 cell line | Redd-Sternberg cell | | | | ZAP Express |
| H0395 | A1-CELL LINE | Redd-Sternberg cell | | | | ZAP Express |
| H0396 | L1 Cell line | Redd-Sternberg cell | | | | ZAP Express |
| H0399 | Human Kidney Cortex, re- | Human Kidney Cortex | | | | Lambda ZAP II |
| | rescue | | | | | |
| H0400 | Human Striatum | Human Brain, Striatum | Brain | | | Lambda ZAP II |
| | Depression, re-rescue | Depression | | | | |
| H0402 | CD34 depleted Buffy Coat | CD34 Depleted Buffy Coat | Cord Blood | | | ZAP Express |
| | (Cord Blood), re-excision | (Cord Blood) | | | | |
| H0403 | H. Umbilical Vein | HUVE Cells | Umbilical vein | Cell Line | | Uni-ZAP XR |
| | Endothelial Cells, IL4 | | | | | |
| | induced | | | | | |
| H0405 | Human Pituitary, subtracted | Human Pituitary | | | | pBluescript |
| | VI | | | | | |
| H0406 | H Amygdala Depression, | Human Amygdala | | | | Uni-ZAP XR |
| | subtracted | Depression | | | | |
| H0409 | H. Striatum Depression, | Human Brain, Striatum | Brain | | | pBluescript |
| | subtracted | Depression | | | | |
| H0411 | H Female Bladder, Adult | Human Female Adult Bladder | Bladder | | | pSport1 |
| H0412 | Human umbilical vein | HUVE Cells | Umbilical vein | Cell Line | | pSport1 |
| | endothelial cells, IL-4 | | | | | |
| | induced | | | | | |
| H0413 | Human Umbilical Vein | HUVE Cells | Umbilical vein | Cell Line | | pSport1 |
| | Endothelial Cells, uninduced | | | | | |
| H0414 | Ovarian Tumor I, OV5232 | Ovarian Tumor, OV5232 | Ovary | | disease | pSport1 |
| H0415 | H. Ovarian Tumor, II, | Ovarian Tumor, OV5232 | Ovary | | disease | pCMVSport |
| | OV5232 | | | | | 2.0 |
| H0416 | Human Neutrophils, | Human Neutrophil - | Blood | Cell Line | | pBluescript |
| | Activated, re-excision | Activated | | | | |
| H0417 | Human Pituitary, subtracted | Human Pituitary | | | | pBluescript |
| | VIII | | | | | |
| H0419 | Bone Cancer, re-excision | Bone Cancer | | | | Uni-ZAP XR |
| H0421 | Human Bone Marrow, re- | Bone Marrow | | | | pBluescript |
| | excision | | | | | |
| H0422 | T-Cell PHA 16 hrs | T-Cells | Blood | Cell Line | | pSport1 |
| H0423 | T-Cell PHA 24 hrs | T-Cells | Blood | Cell Line | | pSport1 |
| H0424 | Human Pituitary, subt IX | Human Pituitary | | | | pBluescript |
| H0427 | Human Adipose | Human Adipose, left | | | | pSport1 |
| | | hiplipoma | | | | |
| H0428 | Human Ovary | Human Ovary Tumor | Ovary | | | pSport1 |
| H0429 | K562 + PMA (36 hrs), re- | K562 Cell line | cell line | Cell Line | | ZAP Express |
| | excision | | | | | |
| H0431 | H. Kidney Medulla, re- | Kidney medulla | Kidney | | | pBluescript |
| | excision | | | | | |
| H0433 | Human Umbilical Vein | HUVE Cells | Umbilical vein | Cell Line | | pBluescript |
| | Endothelial cells, frac B, re- | | | | | |
| | excision | | | | | |
| H0435 | Ovarian Tumor 10-3-95 | Ovarian Tumor, OV350721 | Ovary | | | pCMVSport |
| | | | | | | 2.0 |
| H0436 | Resting T-Cell Library, II | T-Cells | Blood | Cell Line | | pSport1 |
| H0437 | H Umbilical Vein | HUVE Cells | Umbilical vein | Cell Line | | Lambda ZAP II |
| | Endothelial Cells, frac A, re- | | | | | |
| | excision | | | | | |
| H0438 | H. Whole Brain #2, re- | Human Whole Brain #2 | | | | ZAP Express |
| | excision | | | | | |
| H0439 | Human Eosinophils | Eosinophils | | | | pBluescript |
| H0441 | H. Kidney Cortex, | Kidney cortex | Kidney | | | pBluescript |
| | subtracted | | | | | |
| H0443 | H. Adipose, subtracted | Human Adipose, left | | | | pSport1 |
| | | hiplipoma | | | | |
| H0444 | Spleen metastic melanoma | Spleen, Metastic malignant | Spleen | | disease | pSport1 |
| | | melanoma | | | | |
| H0445 | Spleen, Chronic | Human Spleen, CLL | Spleen | | disease | pSport1 |
| | lymphocytic leukemia | | | | | |
| H0450 | CD34+ cells, II | CD34 positive cells | | | | pCMVSport |
| | | | | | | 2.0 |
| H0453 | H. Kidney Pyramid, | Kidney pyramids | Kidney | | | pBluescript |
| | subtracted | | | | | |
| H0455 | H. Striatum Depression, subt | Human Brain, Striatum | Brain | | | pBluescript |
| | | Depression | | | | |
| H0457 | Human Eosinophils | Human Eosinophils | | | | pSport1 |
| H0458 | CD34+ cell, I, frac II | CD34 positive cells | | | | pSport1 |
| H0459 | CD34+ cells, II, FRACTION 2 | CD34 positive cells | | | | pCMVSport |
| | | | | | | 2.0 |
| H0461 | H. Kidney Medulla, | Kidney medulla | Kidney | | | pBluescript |
| | subtracted | | | | | |
| H0477 | Human Tonsil, Lib 3 | Human Tonsil | Tonsil | | | pSport1 |
| H0478 | Salivary Gland, Lib 2 | Human Salivary Gland | Salivary gland | | | pSport1 |
| H0479 | Salivary Gland, Lib 3 | Human Salivary Gland | Salivary gland | | | pSport1 |
| H0483 | Breast Cancer cell line, | Breast Cancer Cell line, | | | | pSport1 |
| | MDA 36 | MDA 36 | | | | |
| H0484 | Breast Cancer Cell line, | Breast Cancer Cell line, | | | | pSport1 |
| | angiogenic | Angiogenic, 36T3 | | | | |
| H0485 | Hodgkin''s Lymphoma I | Hodgkin''s Lymphoma I | | | disease | pCMVSport |
| | | | | | | 2.0 |
| H0486 | Hodgkin''s Lymphoma II | Hodgkin''s Lymphoma II | | | disease | pCMVSport |
| | | | | | | 2.0 |
| H0487 | Human Tonsils, lib I | Human Tonsils | | | | pCMVSport |
| | | | | | | 2.0 |
| H0488 | Human Tonsils, Lib 2 | Human Tonsils | | | | pCMVSport |
| | | | | | | 2.0 |
| H0489 | Crohn''s Disease | Ileum | Intestine | | disease | pSport1 |
| H0492 | HL-60, RA 4 h, Subtracted | HL-60 Cells, RA stimulated | Blood | Cell Line | | Uni-ZAP XR |
| | | for 4 H | | | | |
| H0493 | HL-60, PMA 1 d, subtracted | HL-60 Cells, PMA stimulated | Blood | Cell Line | | Uni-ZAP XR |
| | | for 1 day | | | | |
| H0494 | Keratinocyte | Keratinocyte | | | | pCMVSport |
| | | | | | | 2.0 |
| H0497 | HEL cell line | HEL cell line | | HEL92.1.7 | | pSport1 |
| H0505 | Human Astrocyte | Human Astrocyte | | | | pSport1 |
| H0506 | Ulcerative Colitis | Colon | Colon | | | pSport1 |
| H0509 | Liver, Hepatoma | Human Liver, Hepatoma, | Liver | | disease | pCMVSport |
| | | | | | | 3.0 |
| | | patient 8 | | | | |
| H0510 | Human Liver, normal | Human Liver, normal, Patient | Liver | | | pCMVSport |
| | | | | | | 3.0 |
| | | # 8 | | | | |
| H0517 | Nasal polyps | Nasal polyps | | | | pCMVSport |
| | | | | | | 2.0 |
| H0518 | pBMC stimulated w/ poly | pBMC stimulated with poly | | | | pCMVSport |
| | | | | | | 3.0 |
| | I/C | I/C | | | | |
| H0519 | NTERA2, control | NTERA2, Teratocarcinoma | | | | pCMVSport |
| | | | | | | 3.0 |
| | | cell line | | | | |
| H0520 | NTERA2 + retinoic acid, 14 | NTERA2, Teratocarcinoma | | | | pSport1 |
| | days | cell line | | | | |
| H0521 | Primary Dendritic Cells, lib 1 | Primary Dendritic cells | | | | pCMVSport |
| | | | | | | 3.0 |
| H0522 | Primary Dendritic cells, frac 2 | Primary Dendritic cells | | | | pCMVSport |
| | | | | | | 3.0 |
| H0525 | PCR, pBMC I/C treated | pBMC stimulated with poly | | | | PCRII |
| | | I/C | | | | |
| H0528 | Poly[I]/Poly[C] Normal | Poly[I]/Poly[C] Normal Lung | | | | pCMVSport |
| | | | | | | 3.0 |
| | Lung Fibroblasts | Fibroblasts | | | | |
| H0529 | Myoloid Progenitor Cell | TF-1 Cell Line; Myoloid | | | | pCMVSport |
| | | | | | | 3.0 |
| | Line | progenitor cell line | | | | |
| H0530 | Human Dermal Endothelial | Human Dermal Endothelial | | | | pSport1 |
| | Cells, untreated | Cells; untreated | | | | |
| H0538 | Merkel Cells | Merkel cells | Lymph node | | | pSport1 |
| H0539 | Pancreas Islet Cell Tumor | Pancreas Islet Cell Tumour | Pancreas | | disease | pSport1 |
| H0540 | Skin, burned | Skin, leg burned | Skin | | | pSport1 |
| H0542 | T Cell helper I | Helper T cell | | | | pCMVSport |
| | | | | | | 3.0 |
| H0543 | T cell helper II | Helper T cell | | | | pCMVSport |
| | | | | | | 3.0 |
| H0544 | Human endometrial stromal | Human endometrial stromal | | | | pCMVSport |
| | | | | | | 3.0 |
| | cells | cells | | | | |
| H0545 | Human endometrial stromal | Human endometrial stromal | | | | pCMVSport |
| | | | | | | 3.0 |
| | cells-treated with | cells-treated with proge | | | | |
| | progesterone | | | | | |
| H0546 | Human endometrial stromal | Human endometrial stromal | | | | pCMVSport |
| | | | | | | 3.0 |
| | cells-treated with estradiol | cells-treated with estra | | | | |
| H0547 | NTERA2 teratocarcinoma | NTERA2, Teratocarcinoma | | | | pSport1 |
| | cell line + retinoic acid (14 | cell line | | | | |
| | days) | | | | | |
| H0549 | H. Epididiymus, caput & | Human Epididiymus, caput | | | | Uni-ZAP XR |
| | corpus | and corpus | | | | |
| H0550 | H. Epididiymus, cauda | Human Epididiymus, cauda | | | | Uni-ZAP XR |
| H0551 | Human Thymus Stromal | Human Thymus Stromal | | | | pCMVSport |
| | | | | | | 3.0 |
| | Cells | Cells | | | | |
| H0553 | Human Placenta | Human Placenta | | | | pCMVSport |
| | | | | | | 3.0 |
| H0555 | Rejected Kidney, lib 4 | Human Rejected Kidney | Kidney | | disease | pCMVSport |
| | | | | | | 3.0 |
| H0556 | Activated T- | T-Cells | Blood | Cell Line | | Uni-ZAP XR |
| | cell(12 h)/Thiouridine-re- | | | | | |
| | excision | | | | | |
| H0559 | HL-60, PMA 4 H, re- | HL-60 Cells, PMA stimulated | Blood | Cell Line | | Uni-ZAP XR |
| | excision | 4 H | | | | |
| H0560 | KMH2 | KMH2 | | | | pCMVSport |
| | | | | | | 3.0 |
| H0561 | L428 | L428 | | | | pCMVSport |
| | | | | | | 3.0 |
| H0562 | Human Fetal Brain, | Human Fetal Brain | | | | pCMVSport |
| | normalized c5-11-26 | | | | | 2.0 |
| H0563 | Human Fetal Brain, | Human Fetal Brain | | | | pCMVSport |
| | normalized 50021F | | | | | 2.0 |
| H0564 | Human Fetal Brain, | Human Fetal Brain | | | | pCMVSport |
| | normalized C5001F | | | | | 2.0 |
| H0565 | HUman Fetal Brain, | Human Fetal Brain | | | | pCMVSport |
| | normalized 100024F | | | | | 2.0 |
| H0566 | Human Fetal | Human Fetal Brain | | | | pCMVSport |
| | Brain, normalized c50F | | | | | 2.0 |
| H0567 | Human Fetal Brain, | Human Fetal Brain | | | | pCMVSport |
| | normalized A5002F | | | | | 2.0 |
| H0569 | Human Fetal Brain, | Human Fetal Brain | | | | pCMVSport |
| | normalized CO | | | | | 2.0 |
| H0570 | Human Fetal Brain, | Human Fetal Brain | | | | pCMVSport |
| | normalized C500H | | | | | 2.0 |
| H0571 | Human Fetal Brain, | Human Fetal Brain | | | | pCMVSport |
| | normalized C500HE | | | | | 2.0 |
| H0572 | Human Fetal Brain, | Human Fetal Brain | | | | pCMVSport |
| | normalized AC5002 | | | | | 2.0 |
| H0574 | Hepatocellular Tumor; re- | Hepatocellular Tumor | Liver | | disease | Lambda ZAP II |
| | excision | | | | | |
| H0575 | Human Adult Pulmonary; re- | Human Adult Pulmonary | Lung | | | Uni-ZAP XR |
| | excision | | | | | |
| H0576 | Resting T-Cell; re-excision | T-Cells | Blood | Cell Line | | Lambda ZAP II |
| H0580 | Dendritic cells, pooled | Pooled dendritic cells | | | | pCMVSport |
| | | | | | | 3.0 |
| H0581 | Human Bone Marrow, | Human Bone Marrow | Bone Marrow | | | pCMVSport |
| | treated | | | | | 3.0 |
| H0583 | B Cell lymphoma | B Cell Lymphoma | B Cell | | disease | pCMVSport |
| | | | | | | 3.0 |
| H0584 | Activated T-cells, 24 hrs, re- | Activated T-Cells | Blood | Cell Line | | Uni-ZAP XR |
| | excision | | | | | |
| H0585 | Activated T-Cells, 12 hrs, re- | Activated T-Cells | Blood | Cell Line | | Uni-ZAP XR |
| | excision | | | | | |
| H0586 | Healing groin wound, 6.5 | healing groin wound, 6.5 | groin | | disease | pCMVSport |
| | | | | | | 3.0 |
| | hours post incision | hours post incision - 2/ | | | | |
| H0587 | Healing groin wound; 7.5 | Groin-2/19/97 | groin | | disease | pCMVSport |
| | hours post incision | | | | | 3.0 |
| H0589 | CD34 positive cells (cord | CD34 Positive Cells | Cord Blood | | | ZAP Express |
| | blood), re-ex | | | | | |
| H0590 | Human adult small | Human Adult Small Intestine | Small Int. | | | Uni-ZAP XR |
| | intestine, re-excision | | | | | |
| H0591 | Human T-cell lymphoma; re- | T-Cell Lymphoma | T-Cell | | disease | Uni-ZAP XR |
| | excision | | | | | |
| H0592 | Healing groin wound - zero | HGS wound healing project; | | | disease | pCMVSport |
| | hr post-incision (control) | abdomen | | | | 3.0 |
| H0593 | Olfactory | Olfactory epithelium from | | | | pCMVSport |
| | epithelium; nasalcavity | roof of left nasal cacit | | | | 3.0 |
| H0594 | Human Lung Cancer; re- | Human Lung Cancer | Lung | | disease | Lambda ZAP II |
| | excision | | | | | |
| H0595 | Stomach cancer (human); re- | Stomach Cancer - 5383A | | | disease | Uni-ZAP XR |
| | excision | (human) | | | | |
| H0596 | Human Colon Cancer; re- | Human Colon Cancer | Colon | | | Lambda ZAP II |
| | excision | | | | | |
| H0597 | Human Colon; re-excision | Human Colon | | | | Lambda ZAP II |
| H0598 | Human Stomach; re-excision | Human Stomach | Stomach | | | Uni-ZAP XR |
| H0599 | Human Adult Heart; re- | Human Adult Heart | Heart | | | Uni-ZAP XR |
| | excision | | | | | |
| H0600 | Healing Abdomen | Abdomen | | | disease | pCMVSport |
| | wound; 70&90 min post | | | | | 3.0 |
| | incision | | | | | |
| H0602 | Healing Abdomen | Abdomen | | | disease | pCMVSport |
| | Wound; 21&29 days post | | | | | 3.0 |
| | incision | | | | | |
| H0604 | Human Pituitary, re-excision | Human Pituitary | | | | pBluescript |
| H0606 | Human Primary Breast | Human Primary Breast | Breast | | disease | Uni-ZAP XR |
| | Cancer; re-excision | Cancer | | | | |
| H0607 | H. Leukocytes, normalized | H. Leukocytes | | | | pCMVSport 1 |
| | cot 50A3 | | | | | |
| H0609 | H. Leukocytes, normalized | H. Leukocytes | | | | pCMVSport 1 |
| | cot >500A | | | | | |
| H0610 | H. Leukocytes, normalized | H. Leukocytes | | | | pCMVSport 1 |
| | cot 5A | | | | | |
| H0612 | H. Leukocytes, normalized | H. Leukocytes | | | | pCMVSport 1 |
| | cot 50 B | | | | | |
| H0613 | H. Leukocytes, normalized | H. Leukocytes | | | | pCMVSport 1 |
| | cot 5B | | | | | |
| H0614 | H. Leukocytes, normalized | H. Leukocytes | | | | pCMVSport 1 |
| | cot 500 A | | | | | |
| H0615 | Human Ovarian Cancer | Ovarian Cancer | Ovary | | disease | Uni-ZAP XR |
| | Reexcision | | | | | |
| H0616 | Human Testes, Reexcision | Human Testes | Testis | | | Uni-ZAP XR |
| H0617 | Human Primary Breast | Human Primary Breast | Breast | | disease | Uni-ZAP XR |
| | Cancer Reexcision | Cancer | | | | |
| H0618 | Human Adult Testes, Large | Human Adult Testis | Testis | | | Uni-ZAP XR |
| | Inserts, Reexcision | | | | | |
| H0619 | Fetal Heart | Human Fetal Heart | Heart | | | Uni-ZAP XR |
| H0620 | Human Fetal Kidney; | Human Fetal Kidney | Kidney | | | Uni-ZAP XR |
| | Reexcision | | | | | |
| H0622 | Human Pancreas Tumor; | Human Pancreas Tumor | Pancreas | | disease | Uni-ZAP XR |
| | Reexcision | | | | | |
| H0623 | Human Umbilical Vein; | Human Umbilical Vein | Umbilical vein | | | Uni-ZAP XR |
| | Reexcision | Endothelial Cells | | | | |
| H0624 | 12 Week Early Stage | Twelve Week Old Early | Embryo | | | Uni-ZAP XR |
| | Human II; Reexcision | Stage Human | | | | |
| H0625 | Ku 812F Basophils Line | Ku 812F Basophils | | | | pSport1 |
| H0626 | Saos2 Cells; Untreated | Saos2 Cell Line; Untreated | | | | pSport1 |
| H0627 | Saos2 Cells; Vitamin D3 | Saos2 Cell Line; Vitamin D3 | | | | pSport1 |
| | Treated | Treated | | | | |
| H0628 | Human Pre-Differentiated | Human Pre-Differentiated | | | | Uni-ZAP XR |
| | Adipocytes | Adipocytes | | | | |
| H0629 | Human Leukocyte, control | Human Normalized leukocyte | | | | pCMVSport 1 |
| | #2 | | | | | |
| H0630 | Human | Human Normalized leukocyte | | | | pCMVSport 1 |
| | Leukocytes, normalized | | | | | |
| | control #4 | | | | | |
| H0631 | Saos2, Dexamethosome | Saos2 Cell Line; | | | | pSport1 |
| | Treated | Dexamethosome Treated | | | | |
| H0632 | Hepatocellular Tumor; re- | Hepatocellular Tumor | Liver | | | Lambda ZAP II |
| | excision | | | | | |
| H0633 | Lung Carcinoma A549 | TNFalpha activated A549- | | | disease | pSport1 |
| | TNFalpha activated | Lung Carcinoma | | | | |
| H0634 | Human Testes Tumor, re- | Human Testes Tumor | Testis | | disease | Uni-ZAP XR |
| | excision | | | | | |
| H0635 | Human Activated T-Cells, | Activated T-Cells | Blood | Cell Line | | Uni-ZAP XR |
| | re-excision | | | | | |
| H0637 | Dendritic Cells From CD34 | Dentritic cells from CD34 | | | | pSport1 |
| | Cells | cells | | | | |
| H0638 | CD40 activated monocyte | CD40 activated monocyte | | | | pSport1 |
| | dendridic cells | dendridic cells | | | | |
| H0640 | Ficolled Human Stromal | Ficolled Human Stromal | | | | Other |
| | Cells, Untreated | Cells, Untreated | | | | |
| H0641 | LPS activated derived | LPS activated monocyte | | | | pSport1 |
| | dendritic cells | derived dendritic cells | | | | |
| H0642 | Hep G2 Cells, lambda | Hep G2 Cells | | | | Other |
| | library | | | | | |
| H0643 | Hep G2 Cells, PCR library | Hep G2 Cells | | | | Other |
| H0644 | Human Placenta (re- | Human Placenta | Placenta | | | Uni-ZAP XR |
| | excision) | | | | | |
| H0645 | Fetal Heart, re-excision | Human Fetal Heart | Heart | | | Uni-ZAP XR |
| H0646 | Lung, Cancer (4005313 | Metastatic squamous cell | | | | pSport1 |
| | A3): Invasive Poorly | lung carcinoma, poorly di | | | | |
| | Differentiated Lung | | | | | |
| | Adenocarcinoma, | | | | | |
| H0647 | Lung, Cancer (4005163 B7): | Invasive poorly differentiated | | | disease | pSport1 |
| | Invasive, Poorly Diff. | lung adenocarcinoma | | | | |
| | Adenocarcinoma, Metastatic | | | | | |
| H0648 | Ovary, Cancer: (4004562 | Papillary Cstic neoplasm of | | | disease | pSport1 |
| | B6) Papillary Serous Cystic | low malignant potentia | | | | |
| | Neoplasm, Low Malignant | | | | | |
| | Pot | | | | | |
| H0649 | Lung, Normal: (4005313 | Normal Lung | | | | pSport1 |
| | B1) | | | | | |
| H0650 | B-Cells | B-Cells | | | | pCMVSport |
| | | | | | | 3.0 |
| H0651 | Ovary, Normal: | Normal Ovary | | | | pSport1 |
| | (9805C040R) | | | | | |
| H0652 | Lung, Normal: (4005313 | Normal Lung | | | | pSport1 |
| | B1) | | | | | |
| H0653 | Stromal Cells | Stromal Cells | | | | pSport1 |
| H0654 | Lung, Cancer: (4005313 | Metastatic Squamous cell | | | | Other |
| | A3) Invasive Poorly- | lung Carcinoma poorly dif | | | | |
| | differentiated Metastatic | | | | | |
| | lung adenoc | | | | | |
| H0656 | B-cells (unstimulated) | B-cells (unstimulated) | | | | pSport1 |
| H0657 | B-cells (stimulated) | B-cells (stimulated) | | | | pSport1 |
| H0658 | Ovary, Cancer (9809C332): | 9809C332—Poorly | Ovary & Fallopian | | disease | pSport1 |
| | Poorly differentiated | differentiate | Tubes | | | |
| | adenocarcinoma | | | | | |
| H0659 | Ovary, Cancer (15395A1F): | Grade II Papillary | Ovary | | disease | pSport1 |
| | Grade II Papillary | Carcinoma, Ovary | | | | |
| | Carcinoma | | | | | |
| H0660 | Ovary, Cancer: (15799A1F) | Poorly differentiated | | | disease | pSport1 |
| | Poorly differentiated | carcinoma, ovary | | | | |
| | carcinoma | | | | | |
| H0661 | Breast, Cancer: (4004943 | Breast cancer | | | disease | pSport1 |
| | A5) | | | | | |
| H0662 | Breast, Normal: | Normal Breast - | Breast | | | pSport1 |
| | (4005522B2) | #4005522(B2) | | | | |
| H0663 | Breast, Cancer: (4005522 | Breast Cancer - | Breast | | disease | pSport1 |
| | A2) | #4005522(A2) | | | | |
| H0664 | Breast, Cancer: | Breast Cancer | Breast | | disease | pSport1 |
| | (9806C012R) | | | | | |
| H0665 | Stromal cells 3.88 | Stromal cells 3.88 | | | | pSport1 |
| H0666 | Ovary, Cancer: (4004332 | Ovarian Cancer, Sample | | | disease | pSport1 |
| | A2) | #4004332A2 | | | | |
| H0667 | Stromal cells(HBM3.18) | Stromal cell(HBM 3.18) | | | | pSport1 |
| H0668 | stromal cell clone 2.5 | stromal cell clone 2.5 | | | | pSport1 |
| H0669 | Breast, Cancer: (4005385 | Breast Cancer (4005385A2) | Breast | | | pSport1 |
| | A2) | | | | | |
| H0670 | Ovary, Cancer(4004650 | Ovarian Cancer - 4004650A3 | | | | pSport1 |
| | A3): Well-Differentiated | | | | | |
| | Micropapillary Serous | | | | | |
| | Carcinoma | | | | | |
| H0671 | Breast, Cancer: | Breast Cancer - Sample # | | | | pSport1 |
| | (9802C02OE) | 9802C02OE | | | | |
| H0672 | Ovary, Cancer: (4004576 | Ovarian Cancer(4004576A8) | Ovary | | | pSport1 |
| | A8) | | | | | |
| H0673 | Human Prostate Cancer, | Human Prostate Cancer, stage | Prostate | | | Uni-ZAP XR |
| | Stage B2; re-excision | B2 | | | | |
| H0674 | Human Prostate Cancer, | Human Prostate Cancer, | Prostate | | | Uni-ZAP XR |
| | Stage C; re-excission | stage C | | | | |
| H0675 | Colon, Cancer: | Colon Cancer 9808C064R | | | | pCMVSport |
| | (9808C064R) | | | | | 3.0 |
| H0676 | Colon, Cancer: | Colon Cancer 9808C064R | | | | pCMVSport |
| | (9808C064R)-total RNA | | | | | 3.0 |
| H0677 | TNFR degenerate oligo | B-Cells | | | | PCRII |
| H0682 | Serous Papillary | serous papillary | | | | pCMVSport |
| | Adenocarcinoma | adenocarcinoma | | | | 3.0 |
| | | (9606G304SPA3B) | | | | |
| H0683 | Ovarian Serous Papillary | Serous papillary | | | | pCMVSport |
| | Adenocarcinoma | adenocarcinoma, stage 3C | | | | 3.0 |
| | | (9804G01 | | | | |
| H0684 | Serous Papillary | Ovarian Cancer-9810G606 | Ovaries | | | pCMVSport |
| | Adenocarcinoma | | | | | 3.0 |
| H0685 | Adenocarcinoma of Ovary, | Adenocarcinoma of Ovary, | | | | pCMVSport |
| | Human Cell Line, # | Human Cell Line, # OVCAR- | | | | 3.0 |
| | OVCAR-3 | | | | | |
| H0686 | Adenocarcinoma of Ovary, | Adenocarcinoma of Ovary, | | | | pCMVSport |
| | Human Cell Line | Human Cell Line, # SW-626 | | | | 3.0 |
| H0687 | Human normal | Human normal | Ovary | | | pCMVSport |
| | ovary(#9610G215) | ovary(#9610G215) | | | | 3.0 |
| H0688 | Human Ovarian | Human Ovarian | | | | pCMVSport |
| | Cancer(#9807G017) | cancer(#9807G017), mRNA | | | | 3.0 |
| | | from Maura Ru | | | | |
| H0689 | Ovarian Cancer | Ovarian Cancer, #9806G019 | | | | pCMVSport |
| | | | | | | 3.0 |
| H0690 | Ovarian Cancer, # | Ovarian Cancer, #9702G001 | | | | pCMVSport |
| | 9702G001 | | | | | 3.0 |
| H0691 | Normal Ovary, #9710G208 | normal ovary, #9710G208 | | | | pCMVSport |
| | | | | | | 3.0 |
| H0692 | BLyS Receptor from | B Cell Lymphoma | B Cell | | | pCMVSport |
| | | | | | | 3.0 |
| | Expression Cloning | | | | | |
| H0693 | Normal Prostate | Normal Prostate Tissue # | | | | pCMVSport |
| | | | | | | 3.0 |
| | #ODQ3958EN | ODQ3958EN | | | | |
| H0694 | Prostate gland | Prostate gland, | prostate gland | | | pCMVSport |
| | | | | | | 3.0 |
| | adenocarcinoma | adenocarcinoma, mod/diff, | | | | |
| | | gleason | | | | |
| H0695 | mononucleocytes from | mononucleocytes from | | | | pCMVSport |
| | patient | patient at Shady Grove | | | | 3.0 |
| | | Hospit | | | | |
| N0006 | Human Fetal Brain | Human Fetal Brain | | | | |
| S0001 | Brain frontal cortex | Brain frontal cortex | Brain | | | Lambda ZAP II |
| S0002 | Monocyte activated | Monocyte-activated | blood | Cell Line | | Uni-ZAP XR |
| S0003 | Human Osteoclastoma | Osteoclastoma | bone | | disease | Uni-ZAP XR |
| S0004 | Prostate | Prostate BPH | Prostate | | | Lambda ZAP II |
| S0006 | Neuroblastoma | Human Neural Blastoma | | | disease | pCDNA |
| S0007 | Early Stage Human Brain | Human Fetal Brain | | | | Uni-ZAP XR |
| S0010 | Human Amygdala | Amygdala | | | | Uni-ZAP XR |
| S0011 | STROMAL - | Osteoclastoma | bone | | disease | Uni-ZAP XR |
| | OSTEOCLASTOMA | | | | | |
| S0013 | Prostate | Prostate | prostate | | | Uni-ZAP XR |
| S0015 | Kidney medulla | Kidney medulla | Kidney | | | Uni-ZAP XR |
| S0016 | Kidney Pyramids | Kidney pyramids | Kidney | | | Uni-ZAP XR |
| S0022 | Human Osteoclastoma | Osteoclastoma Stromal Cells | | | | Uni-ZAP XR |
| | Stromal Cells - unamplified | | | | | |
| S0024 | Human Kidney Medulla - | Human Kidney Medulla | | | | |
| | unamplified | | | | | |
| S0026 | Stromal cell TF274 | stromal cell | Bone marrow | Cell Line | | Uni-ZAP XR |
| S0027 | Smooth muscle, serum | Smooth muscle | Pulmanary artery | Cell Line | | Uni-ZAP XR |
| | treated | | | | | |
| S0028 | Smooth muscle, control | Smooth muscle | Pulmanary artery | Cell Line | | Uni-ZAP XR |
| S0029 | brain stem | Brain stem | brain | | | Uni-ZAP XR |
| S0031 | Spinal cord | Spinal cord | spinal cord | | | Uni-ZAP XR |
| S0032 | Smooth muscle-ILb induced | Smooth muscle | Pulmanary artery | Cell Line | | Uni-ZAP XR |
| S0036 | Human Substantia Nigra | Human Substantia Nigra | | | | Uni-ZAP XR |
| S0037 | Smooth muscle, IL1b | Smooth muscle | Pulmanary artery | Cell Line | | Uni-ZAP XR |
| | induced | | | | | |
| S0038 | Human Whole Brain #2 - | Human Whole Brain #2 | | | | ZAP Express |
| | Oligo dT >1.5 Kb | | | | | |
| S0039 | Hypothalamus | Hypothalamus | Brain | | | Uni-ZAP XR |
| S0040 | Adipocytes | Human Adipocytes from | | | | Uni-ZAP XR |
| | | Osteoclastoma | | | | |
| S0042 | Testes | Human Testes | | | | ZAP Express |
| S0044 | Prostate BPH | prostate BPH | Prostate | | disease | Uni-ZAP XR |
| S0045 | Endothelial cells-control | Endothelial cell | endothelial cell- | Cell Line | | Uni-ZAP XR |
| | | | lung | | | |
| S0046 | Endothelial-induced | Endothelial cell | endothelial cell- | Cell Line | | Uni-ZAP XR |
| | | | lung | | | |
| S0049 | Human Brain, Striatum | Human Brain, Striatum | | | | Uni-ZAP XR |
| S0050 | Human Frontal Cortex, | Human Frontal Cortex, | | | disease | Uni-ZAP XR |
| | Schizophrenia | Schizophrenia | | | | |
| S0051 | Human | Human Hypothalamus, | | | disease | Uni-ZAP XR |
| | Hypothalmus, Schizophrenia | Schizophrenia | | | | |
| S0052 | neutrophils control | human neutrophils | blood | Cell Line | | Uni-ZAP XR |
| S0053 | Neutrophils IL-1 and LPS | human neutrophil induced | blood | Cell Line | | Uni-ZAP XR |
| | induced | | | | | |
| S0106 | STRIATUM DEPRESSION | | BRAIN | | disease | Uni-ZAP XR |
| S0110 | Brain Amygdala Depression | | Brain | | disease | Uni-ZAP XR |
| S0112 | Hypothalamus | | Brain | | | Uni-ZAP XR |
| S0114 | Anergic T-cell | Anergic T-cell | | Cell Line | | Uni-ZAP XR |
| S0116 | Bone marrow | Bone marrow | Bone marrow | | | Uni-ZAP XR |
| S0122 | Osteoclastoma-normalized A | Osteoclastoma | bone | | disease | pBluescript |
| S0124 | Smooth muscle-edited A | Smooth muscle | Pulmanary artery | Cell Line | | Uni-ZAP XR |
| S0126 | Osteoblasts | Osteoblasts | Knee | Cell Line | | Uni-ZAP XR |
| S0132 | Epithelial-TNFa and INF | Airway Epithelial | | | | Uni-ZAP XR |
| | induced | | | | | |
| S0134 | Apoptotic T-cell | apoptotic cells | | Cell Line | | Uni-ZAP XR |
| S0136 | PERM TF274 | stromal cell | Bone marrow | Cell Line | | Lambda ZAP II |
| S0140 | eosinophil-IL5 induced | eosinophil | lung | Cell Line | | Uni-ZAP XR |
| S0142 | Macrophage-oxLDL | macrophage-oxidized LDL | blood | Cell Line | | Uni-ZAP XR |
| | | treated | | | | |
| S0144 | Macrophage (GM-CSF | Macrophage (GM-CSF | | | | Uni-ZAP XR |
| | treated) | treated) | | | | |
| S0146 | prostate-edited | prostate BPH | Prostate | | | Uni-ZAP XR |
| S0148 | Normal Prostate | Prostate | prostate | | | Uni-ZAP XR |
| S0150 | LNCAP prostate cell line | LNCAP Cell Line | Prostate | Cell Line | | Uni-ZAP XR |
| S0152 | PC3 Prostate cell line | PC3 prostate cell line | | | | Uni-ZAP XR |
| S0174 | Prostate-BPH subtracted II | Human Prostate BPH | | | | pBluescript |
| S0176 | Prostate, normal, subtraction I | Prostate | prostate | | | Uni-ZAP XR |
| S0180 | Bone Marrow Stroma, | Bone Marrow Stroma, TNF | | | disease | Uni-ZAP XR |
| | TNF&LPS ind | & LPS induced | | | | |
| S0182 | Human B Cell 8866 | Human B-Cell 8866 | | | | Uni-ZAP XR |
| S0188 | Prostate, BPH, Lib 2 | Human Prostate BPH | | | disease | pSport1 |
| S0192 | Synovial Fibroblasts | Synovial Fibroblasts | | | | pSport1 |
| | (control) | | | | | |
| S0194 | Synovial hypoxia | Synovial Fibroblasts | | | | pSport1 |
| S0196 | Synovial IL-1/TNF | Synovial Fibroblasts | | | | pSport1 |
| | stimulated | | | | | |
| S0206 | Smooth Muscle-HASTE | Smooth muscle | Pulmanary artery | Cell Line | | pBluescript |
| | normalized | | | | | |
| S0208 | Messangial cell, frac 1 | Messangial cell | | | | pSport1 |
| S0210 | Messangial cell, frac 2 | Messangial cell | | | | pSport1 |
| S0212 | Bone Marrow Stromal Cell, | Bone Marrow Stromal | | | | pSport1 |
| | untreated | Cell, untreated | | | | |
| S0214 | Human Osteoclastoma, re- | Osteoclastoma | bone | | disease | Uni-ZAP XR |
| | excision | | | | | |
| S0216 | Neutrophils IL-1 and LPS | human neutrophil induced | blood | Cell Line | | Uni-ZAP XR |
| | induced | | | | | |
| S0218 | Apoptotic T-cell, re-excision | apoptotic cells | | Cell Line | | Uni-ZAP XR |
| S0220 | H. hypothalamus, frac A; re- | Hypothalamus | Brain | | | ZAP Express |
| | excision | | | | | |
| S0222 | H. Frontal | H. Brain, Frontal Cortex, | Brain | | disease | Uni-ZAP XR |
| | cortex, epileptic; re-excision | Epileptic | | | | |
| S0242 | Synovial Fibroblasts | Synovial Fibroblasts | | | | pSport1 |
| | (Il1/TNF), subt | | | | | |
| S0250 | Human Osteoblasts II | Human Osteoblasts | Femur | | disease | pCMVSport |
| | | | | | | 2.0 |
| S0260 | Spinal Cord, re-excision | Spinal cord | spinal cord | | | Uni-ZAP XR |
| S0276 | Synovial hypoxia-RSF | Synovial fobroblasts | Synovial tissue | | | pSport1 |
| | subtracted | (rheumatoid) | | | | |
| S0278 | H Macrophage (GM-CSF | Macrophage (GM-CSF | | | | Uni-ZAP XR |
| | treated), re-excision | treated) | | | | |
| S0280 | Human Adipose Tissue, re- | Human Adipose Tissue | | | | Uni-ZAP XR |
| | excision | | | | | |
| S0282 | Brain Frontal Cortex, re- | Brain frontal cortex | Brain | | | Lambda ZAP II |
| | excision | | | | | |
| S0292 | Osteoarthritis (OA-4) | Human Osteoarthritic | Bone | | disease | pSport1 |
| | | Cartilage | | | | |
| S0294 | Larynx tumor | Larynx tumor | Larynx, vocal cord | | disease | pSport1 |
| S0296 | Normal lung | Normal lung | Lung | | | pSport1 |
| S0298 | Bone marrow stroma, treated | Bone marrow | Bone marrow | | | pSport1 |
| | | stroma, treatedSB | | | | |
| S0300 | Frontal lobe, dementia; re- | Frontal Lobe | Brain | | | Uni-ZAP XR |
| | excision | dementia/Alzheimer''s | | | | |
| S0306 | Larynx normal #10 261-273 | Larynx normal | | | | pSport1 |
| S0308 | Spleen/normal | Spleen normal | | | | pSport1 |
| S0310 | Normal trachea | Normal trachea | | | | pSport1 |
| S0312 | Human | Human osteoarthritic | | | disease | pSport1 |
| | osteoarthritic; fraction II | cartilage | | | | |
| S0314 | Human | Human osteoarthritic | | | disease | pSport1 |
| | osteoarthritis; fraction I | cartilage | | | | |
| S0316 | Human Normal | Human Normal Cartilage | | | | pSport1 |
| | Cartilage, Fraction I | | | | | |
| S0318 | Human Normal Cartilage | Human Normal Cartilage | | | | pSport1 |
| | Fraction II | | | | | |
| S0328 | Palate carcinoma | Palate carcinoma | Uvula | | disease | pSport1 |
| S0330 | Palate normal | Palate normal | Uvula | | | pSport1 |
| S0332 | Pharynx carcinoma | Pharynx carcinoma | Hypopharynx | | | pSport1 |
| S0334 | Human Normal Cartilage | Human Normal Cartilage | | | | pSport1 |
| | Fraction III | | | | | |
| S0338 | Human Osteoarthritic | Human osteoarthritic | | | disease | pSport1 |
| | Cartilage Fraction III | cartilage | | | | |
| S0340 | Human Osteoarthritic | Human osteoarthritic | | | disease | pSport1 |
| | Cartilage Fraction IV | cartilage | | | | |
| S0342 | Adipocytes; re-excision | Human Adipocytes from | | | | Uni-ZAP XR |
| | | Osteoclastoma | | | | |
| S0344 | Macrophage-oxLDL; re- | macrophage-oxidized LDL | blood | Cell Line | | Uni-ZAP XR |
| | excision | treated | | | | |
| S0346 | Human Amygdala; re- | Amygdala | | | | Uni-ZAP XR |
| | excision | | | | | |
| S0348 | Cheek Carcinoma | Cheek Carcinoma | | | disease | pSport1 |
| S0350 | Pharynx Carcinoma | Pharynx carcinoma | Hypopharynx | | disease | pSport1 |
| S0352 | Larynx Carcinoma | Larynx carcinoma | | | disease | pSport1 |
| S0354 | Colon Normal II | Colon Normal | Colon | | | pSport1 |
| S0356 | Colon Carcinoma | Colon Carcinoma | Colon | | disease | pSport1 |
| S0358 | Colon Normal III | Colon Normal | Colon | | | pSport1 |
| S0360 | Colon Tumor II | Colon Tumor | Colon | | disease | pSport1 |
| S0362 | Human Gastrocnemius | Gastrocnemius muscle | | | | pSport1 |
| S0364 | Human Quadriceps | Quadriceps muscle | | | | pSport1 |
| S0366 | Human Soleus | Soleus Muscle | | | | pSport1 |
| S0370 | Larynx carcinoma II | Larynx carcinoma | | | disease | pSport1 |
| S0372 | Larynx carcinoma III | Larynx carcinoma | | | disease | pSport1 |
| S0374 | Normal colon | Normal colon | | | | pSport1 |
| S0376 | Colon Tumor | Colon Tumor | | | disease | pSport1 |
| S0378 | Pancreas normal PCA4 No | Pancreas Normal PCA4 No | | | | pSport1 |
| S0380 | Pancreas Tumor PCA4 Tu | Pancreas Tumor PCA4 Tu | | | disease | pSport1 |
| S0382 | Larynx carcinoma IV | Larynx carcinoma | | | disease | pSport1 |
| S0384 | Tongue carcinoma | Tongue carcinoma | | | disease | pSport1 |
| S0386 | Human Whole Brain, re- | Whole brain | Brain | | | ZAP Express |
| | excision | | | | | |
| S0388 | Human | Human Hypothalamus, | | | disease | Uni-ZAP XR |
| | Hypothalamus, schizophrenia, | Schizophrenia | | | | |
| | re-excision | | | | | |
| S0390 | Smooth muscle, control; re- | Smooth muscle | Pulmanary artery | Cell Line | | Uni-ZAP XR |
| | excision | | | | | |
| S0392 | Salivary Gland | Salivary gland; normal | | | | pSport1 |
| S0398 | Testis; normal | Testis; normal | | | | pSport1 |
| S0400 | Brain; normal | Brain; normal | | | | pSport1 |
| S0402 | Adrenal Gland, normal | Adrenal gland; normal | | | | pSport1 |
| S0404 | Rectum normal | Rectum, normal | | | | pSport1 |
| S0406 | Rectum tumour | Rectum tumour | | | | pSport1 |
| S0408 | Colon, normal | Colon, normal | | | | pSport1 |
| S0410 | Colon, tumour | Colon, tumour | | | | pSport1 |
| S0412 | Temporal cortex- | Temporal cortex, alzheimer | | | disease | Other |
| | Alzheizmer; subtracted | | | | | |
| S0414 | Hippocampus, Alzheimer | Hippocampus, Alzheimer | | | | Other |
| | Subtracted | Subtracted | | | | |
| S0418 | CHME Cell Line; treated 5 hrs | CHME Cell Line; treated | | | | pCMVSport |
| | | | | | | 3.0 |
| S0420 | CHME Cell Line, untreated | CHME Cell line, untreatetd | | | | pSport1 |
| S0422 | Mo7e Cell Line GM-CSF | Mo7e Cell Line GM-CSF | | | | pCMVSport |
| | | | | | | 3.0 |
| | treated (1 ng/ml) | treated (1 ng/ml) | | | | |
| S0424 | TF-1 Cell Line GM-CSF | TF-1 Cell Line GM-CSF | | | | pSport1 |
| | Treated | Treated | | | | |
| S0426 | Monocyte activated; re- | Monocyte-activated | blood | Cell Line | | Uni-ZAP XR |
| | excision | | | | | |
| S0428 | Neutrophils control; re- | human neutrophils | blood | Cell Line | | Uni-ZAP XR |
| | excision | | | | | |
| S0430 | Aryepiglottis Normal | Aryepiglottis Normal | | | | pSport1 |
| S0432 | Sinus piniformis Tumour | Sinus piniformis Tumour | | | | pSport1 |
| S0434 | Stomach Normal | Stomach Normal | | | disease | pSport1 |
| S0436 | Stomach Tumour | Stomach Tumour | | | disease | pSport1 |
| S0438 | Liver Normal Met5No | Liver Normal Met5No | | | | pSport1 |
| S0440 | Liver Tumour Met 5 Tu | Liver Tumour | | | | pSport1 |
| S0442 | Colon Normal | Colon Normal | | | | pSport1 |
| S0444 | Colon Tumor | Colon Tumour | | | disease | pSport1 |
| S0446 | Tongue Tumour | Tongue Tumour | | | | pSport1 |
| S0448 | Larynx Normal | Larynx Normal | | | | pSport1 |
| S0450 | Larynx Tumour | Larynx Tumour | | | | pSport1 |
| S0452 | Thymus | Thymus | | | | pSport1 |
| S0454 | Placenta | Placenta | Placenta | | | pSport1 |
| S0456 | Tongue Normal | Tongue Normal | | | | pSport1 |
| S0458 | Thyroid Normal (SDCA2 | Thyroid normal | | | | pSport1 |
| | No) | | | | | |
| S0460 | Thyroid Tumour | Thyroid Tumour | | | | pSport1 |
| S0462 | Thyroid Thyroiditis | Thyroid Thyroiditis | | | | pSport1 |
| S0464 | Larynx Normal | Larynx Normal | | | | pSport1 |
| S0468 | Ea.hy.926 cell line | Ea.hy.926 cell line | | | | pSport1 |
| S0470 | Adenocarcinoma | PYFD | | | disease | pSport1 |
| S0472 | Lung Mesothelium | PYBT | | | | pSport1 |
| S0474 | Human blood platelets | Platelets | Blood platelets | | | Other |
| S0665 | Human Amygdala; re- | Amygdala | | | | Uni-ZAP XR |
| | excission | | | | | |
| S3012 | Smooth Muscle Serum | Smooth muscle | Pulmanary artery | Cell Line | | pBluescript |
| | Treated, Norm | | | | | |
| S3014 | Smooth muscle, serum | Smooth muscle | Pulmanary artery | Cell Line | | pBluescript |
| | induced, re-exc | | | | | |
| S6014 | H. hypothalamus, frac A | Hypothalamus | Brain | | | ZAP Express |
| S6016 | H. Frontal Cortex, Epileptic | H. Brain, Frontal Cortex, | Brain | | disease | Uni-ZAP XR |
| | | Epileptic | | | | |
| S6022 | H. Adipose Tissue | Human Adipose Tissue | | | | Uni-ZAP XR |
| S6024 | Alzheimers, spongy change | Alzheimer''s/Spongy change | Brain | | disease | Uni-ZAP XR |
| S6026 | Frontal Lobe, Dementia | Frontal Lobe | Brain | | | Uni-ZAP XR |
| | | dementia/Alzheimer''s | | | | |
| S6028 | Human Manic Depression | Human Manic depression | Brain | | disease | Uni-ZAP XR |
| | Tissue | tissue | | | | |
| T0001 | Human Brown Fat | Brown Fat | | | | pBluescript |
| | | | | | | SK− |
| T0002 | Activated T-cells | Activated T-Cell, PBL | Blood | Cell Line | | pBluescript |
| | | fraction | | | | SK− |
| T0003 | Human Fetal Lung | Human Fetal Lung | | | | pBluescript |
| | | | | | | SK− |
| T0004 | Human White Fat | Human White Fat | | | | pBluescript |
| | | | | | | SK− |
| T0006 | Human Pineal Gland | Human Pinneal Gland | | | | pBluescript |
| | | | | | | SK− |
| T0008 | Colorectal Tumor | Colorectal Tumor | | | disease | pBluescript |
| | | | | | | SK− |
| T0010 | Human Infant Brain | Human Infant Brain | | | | Other |
| T0023 | Human Pancreatic | Human Pancreatic Carcinoma | | | disease | pBluescript |
| | Carcinoma | | | | | SK− |
| T0039 | HSA 172 Cells | Human HSA172 cell line | | | | pBluescript |
| | | | | | | SK− |
| T0040 | HSC172 cells | SA172 Cells | | | | pBluescript |
| | | | | | | SK− |
| T0041 | Jurkat T-cell G1 phase | Jurkat T-cell | | | | pBluescript |
| | | | | | | SK− |
| T0042 | Jurkat T-Cell, S phase | Jurkat T-Cell Line | | | | pBluescript |
| | | | | | | SK− |
| T0048 | Human Aortic Endothelium | Human Aortic Endothilium | | | | pBluescript |
| | | | | | | SK− |
| T0049 | Aorta endothelial cells + TNF-a | Aorta endothelial cells | | | | pBluescript |
| | | | | | | SK− |
| T0060 | Human White Adipose | Human White Fat | | | | pBluescript |
| | | | | | | SK− |
| T0067 | Human Thyroid | Human Thyroid | | | | pBluescript |
| | | | | | | SK− |
| T0068 | Normal Ovary, | Normal Ovary, | | | | pBluescript |
| | | | | | | SK− |
| | Premenopausal | Premenopausal | | | | |
| T0069 | Human Uterus, normal | Human Uterus, normal | | | | pBluescript |
| | | | | | | SK− |
| T0070 | Human Adrenal Gland | Human Adrenal Gland | | | | pBluescript |
| | | | | | | SK− |
| T0071 | Human Bone Marrow | Human Bone Marrow | | | | pBluescript |
| | | | | | | SK− |
| T0078 | Human Liver, normal adult | Human Liver, normal Adult | | | | pBluescript |
| | | | | | | SK− |
| T0082 | Human Adult Retina | Human Adult Retina | | | | pBluescript |
| | | | | | | SK− |
| T0104 | HCC cell line metastisis to | | | | | pBluescript |
| | | | | | | SK− |
| | liver | | | | | |
| T0109 | Human (HCC) cell line liver | | | | | pBluescript |
| | (mouse) metastasis, remake | | | | | SK− |
| T0110 | Human colon carcinoma | | | | | pBluescript |
| | (HCC) cell line, remake | | | | | SK− |
| T0112 | Human (Caco-2) cell line, | | | | | pBluescript |
| | adenocarcinoma, colon | | | | | SK− |
| T0114 | Human (Caco-2) cell line, | | | | | pBluescript |
| | adenocarcinoma, colon, | | | | | SK− |
| | remake | | | | | |
| T0115 | Human Colon Carcinoma | | | | | pBluescript |
| | (HCC) cell line | | | | | SK− |
| L0002 | Atrium cDNA library | | | | | |
| | Human heart | | | | | |
| L0004 | ClonTech HL 1065a | | | | | |
| L0005 | Clontech human aorta | | | | | |
| | polyA+ mRNA (#6572) | | | | | |
| L0009 | EST from 8p21.3-p22 | | | | | |
| L0015 | Human | | | | | |
| L0021 | Human adult (K. Okubo) | | | | | |
| L0022 | Human adult lung 3″ | | | | | |
| | directed Mbol cDNA | | | | | |
| L0032 | Human chromosome 12p | | | | | |
| | cDNAs | | | | | |
| L0040 | Human colon mucosa | | | | | |
| L0041 | Human epidermal | | | | | |
| | keratinocyte | | | | | |
| L0045 | Human keratinocyte | | | | | |
| | differential display (B. Lin) | | | | | |
| L0055 | Human promyelocyte | | | | | |
| L0060 | Human thymus NSTH II | | | | | |
| L0065 | Liver HepG2 cell line. | | | | | |
| L0097 | Subtracted human retinal | | | | | |
| | pigment epithelium (RPE) | | | | | |
| L0103 | DKFZphamy1 | amygdala | | | | |
| L0105 | Human aorta polyA+ | aorta | | | | |
| | (TFujiwara) | | | | | |
| L0109 | Human brain cDNA | brain | | | | |
| L0142 | Human placenta cDNA | placenta | | | | |
| | (TFujiwara) | | | | | |
| L0143 | Human placenta polyA+ | placenta | | | | |
| | (TFujiwara) | | | | | |
| L0149 | DKFZphsnu1 | subthalamic nucleus | | | | |
| L0151 | Human testis (C. De Smet) | testis | | | | |
| L0157 | Human fetal brain | | brain | | | |
| | (TFujiwara) | | | | | |
| L0163 | Human heart cDNA | | heart | | | |
| | (YNakamura) | | | | | |
| L0194 | Human pancreatic cancer | pancreatic cancer | | Patu 8988t | | |
| | cell line Patu 8988t | | | | | |
| L0351 | Infant brain, Bento Soares | | | | | BA, |
| | | | | | | M13-derived |
| L0352 | Normalized infant brain, | | | | | BA, |
| | Bento Soares | | | | | M13-derived |
| L0361 | Stratagene ovary (#937217) | | ovary | | | Bluescript SK |
| L0362 | Stratagene ovarian cancer | | | | | Bluescript SK− |
| | (#937219) | | | | | |
| L0363 | NCI_CGAP_GC2 | germ cell tumor | | | | Bluescript SK− |
| L0364 | NCI_CGAP_GC5 | germ cell tumor | | | | Bluescript SK− |
| L0365 | NCI_CGAP_Phel | pheochromocytoma | | | | Bluescript SK− |
| L0366 | Stratagene schizo brain S11 | schizophrenic brain S-11 | | | | Bluescript SK− |
| | | frontal lobe | | | | |
| L0367 | NCI_CGAP_Sch1 | Schwannoma tumor | | | | Bluescript SK− |
| L0368 | NCI_CGAP_SS1 | synovial sarcoma | | | | Bluescript SK− |
| L0369 | NCI_CGAP_AA1 | adrenal adenoma | adrenal gland | | | Bluescript SK− |
| L0370 | Johnston frontal cortex | pooled frontal lobe | brain | | | Bluescript SK− |
| L0371 | NCI_CGAP_Br3 | breast tumor | breast | | | Bluescript SK− |
| L0372 | NCI_CGAP_Co12 | colon tumor | colon | | | Bluescript SK− |
| L0373 | NCI_CGAP_Co11 | tumor | colon | | | Bluescript SK− |
| L0374 | NCI_CGAP_Co2 | tumor | colon | | | Bluescript SK− |
| L0375 | NCI_CGAP_Kid6 | kidney tumor | kidney | | | Bluescript SK− |
| L0376 | NCI_CGAP_Lar1 | larynx | larynx | | | Bluescript SK− |
| L0377 | NCI_CGAP_HN2 | squamous cell carcinoma | larynx | | | Bluescript SK− |
| | | from vocal cord | | | | |
| L0378 | NCI_CGAP_Lu1 | lung tumor | lung | | | Bluescript SK− |
| L0379 | NCI_CGAP_Lym3 | lymphoma | lymph node | | | Bluescript SK− |
| L0380 | NCI_CGAP_HN1 | squamous cell carcinoma | lymph node | | | Bluescript SK− |
| L0381 | NCI_CGAP_HN4 | squamous cell carcinoma | pharynx | | | Bluescript SK− |
| L0382 | NCI_CGAP_Pr25 | epithelium (cell line) | prostate | | | Bluescript SK− |
| L0383 | NCI_CGAP_Pr24 | invasive tumor (cell line) | prostate | | | Bluescript SK− |
| L0384 | NCI_CGAP_Pr23 | prostate tumor | prostate | | | Bluescript SK− |
| L0386 | NCI_CGAP_HN3 | squamous cell carcinoma | tongue | | | Bluescript SK− |
| | | from base of tongue | | | | |
| L0387 | NCI_CGAP_GCB0 | germinal center B-cells | tonsil | | | Bluescript SK− |
| L0388 | NCI_CGAP_HN6 | normal gingiva (cell line from | | | | Bluescript SK− |
| | | immortalized kerati | | | | |
| L0389 | NCI_CGAP_HN5 | normal gingiva (cell line from | | | | Bluescript SK− |
| | | primary keratinocyt | | | | |
| L0393 | B, Human Liver tissue | | | | | gtl1 |
| L0394 | H, Human adult Brain | | | | | gtl1 |
| | Cortex tissue | | | | | |
| L0411 | 1-NIB | | | | | Lafmid BA |
| L0414 | b4HB3MA | | | | | Lafmid BA |
| L0422 | b4HB3MA-Cot12-HAP-B | | | | | Lafmid BA |
| L0426 | b4HB3MA-Cot51.5-HAP-Ft | | | | | Lafmid BA |
| L0435 | Infant brain, LLNL array of | | | | | lafmid BA |
| | Dr. M. Soares 1NIB | | | | | |
| L0438 | normalized infant brain | total brain | brain | | | lafmid BA |
| | cDNA | | | | | |
| L0439 | Soares infant brain 1NIB | | whole brain | | | Lafmid BA |
| L0442 | 4HB3MK | | | | | Lafmid BK |
| L0443 | b4HB3MK | | | | | Lafmid BK |
| L0447 | NHB3MK | | | | | Lafmid BK |
| L0448 | 3HFLSK20 | | | | | Lafmid K |
| L0451 | N3HFLSK20 | | | | | Lafmid K |
| L0453 | BATM1 | | | | | lambda gt10 |
| L0455 | Human retina cDNA | retina | eye | | | lambda gt10 |
| | randomly primed sublibrary | | | | | |
| L0456 | Human retina cDNA | retina | eye | | | lambda gt10 |
| | Tsp509I-cleaved sublibrary | | | | | |
| L0457 | multi-tissue normalized | multi-tissue | pooled | | | lambda gt10 |
| | short-fragment | | | | | |
| L0462 | WATM1 | | | | | lambda gt11 |
| L0468 | HE6W | | | | | lambda zap |
| L0469 | T, Human adult | | | | | Lambda Zap |
| | Rhabdomyosarcoma cell- | | | | | |
| | line | | | | | |
| L0471 | Human fetal heart, Lambda | | | | | Lambda ZAP |
| | ZAP Express | | | | | Express |
| L0475 | KG1-a Lambda Zap Express | | | KG1-a | | Lambda Zap |
| | cDNA library | | | | | Express |
| | | | | | | (Stratagene) |
| L0477 | HPLA CCLee | placenta | | | | Lambda ZAP II |
| L0480 | Stratagene cat#937212 | | | | | Lambda ZAP, |
| | (1992) | | | | | pBluescript |
| | | | | | | SK(−) |
| L0481 | CD34 + DIRECTIONAL | | | | | Lambda ZAPII |
| L0483 | Human pancreatic islet | | | | | Lambda ZAPII |
| L0485 | STRATAGENE Human | skeletal muscle | leg muscle | | | Lambda ZAPII |
| | skeletal muscle cDNA | | | | | |
| | library, cat. #936215. | | | | | |
| L0493 | NCI_CGAP_Ov26 | papillary serous carcinoma | ovary | | | pAMP1 |
| L0497 | NCI_CGAP_HSC4 | CD34+, CD38− from normal | bone marrow | | | pAMP1 |
| | | bone marrow donor | | | | |
| L0498 | NCI_CGAP_HSC3 | CD34+, T negative, patient | bone marrow | | | pAMP1 |
| | | with chronic myelogenou | | | | |
| L0499 | NCI_CGAP_HSC2 | stem cell 34+/38+ | bone marrow | | | pAMP1 |
| L0500 | NCI_CGAP_Brn20 | oligodendroglioma | brain | | | pAMP1 |
| L0501 | NCI_CGAP_Brn21 | oligodendroglioma | brain | | | pAMP1 |
| L0502 | NCI_CGAP_Br15 | adenocarcinoma | breast | | | pAMP1 |
| L0503 | NCI_CGAP_Br17 | adenocarcinoma | breast | | | pAMP1 |
| L0504 | NCI_CGAP_Br13 | breast carcinoma in situ | breast | | | pAMP1 |
| L0505 | NCI_CGAP_Br12 | invasive carcinoma | breast | | | pAMP1 |
| L0506 | NCI_CGAP_Br16 | lobullar carcinoma in situ | breast | | | pAMP1 |
| L0507 | NCI_CGAP_Br14 | normal epithelium | breast | | | pAMP1 |
| L0508 | NCI_CGAP_Lu25 | bronchioalveolar carcinoma | lung | | | pAMP1 |
| L0509 | NCI_CGAP_Lu26 | invasive adenocarcinoma | lung | | | pAMP1 |
| L0510 | NCI_CGAP_Ov33 | borderline ovarian carcinoma | ovary | | | pAMP1 |
| L0511 | NCI_CGAP_Ov34 | borderline ovarian carcinoma | ovary | | | pAMP1 |
| L0512 | NCI_CGAP_Ov36 | borderline ovarian carcinoma | ovary | | | pAMP1 |
| L0514 | NCI_CGAP_Ov31 | papillary serous carcinoma | ovary | | | pAMP1 |
| L0515 | NCI_CGAP_Ov32 | papillary serous carcinoma | ovary | | | pAMP1 |
| L0516 | Chromosome 19p12-p13.1 | | | | | pAMP10 |
| | exon | | | | | |
| L0517 | NCI_CGAP_Pr1 | | | | | pAMP10 |
| L0518 | NCI_CGAP_Pr2 | | | | | pAMP10 |
| L0519 | NCI_CGAP_Pr3 | | | | | pAMP10 |
| L0520 | NCI_CGAP_Alv1 | alveolar rhabdomyosarcoma | | | | pAMP10 |
| L0521 | NCI_CGAP_Ew1 | Ewing''s sarcoma | | | | pAMP10 |
| L0522 | NCI_CGAP_Kid1 | kidney | | | | pAMP10 |
| L0523 | NCI_CGAP_Lip2 | liposarcoma | | | | pAMP10 |
| L0524 | NCI_CGAP_Li1 | liver | | | | pAMP10 |
| L0525 | NCI_CGAP_Li2 | liver | | | | pAMP10 |
| L0526 | NCI_CGAP_Pr12 | metastatic prostate bone | | | | pAMP10 |
| | | lesion | | | | |
| L0527 | NCI_CGAP_Ov2 | ovary | | | | pAMP10 |
| L0528 | NCI_CGAP_Pr5 | prostate | | | | pAMP10 |
| L0529 | NCI_CGAP_Pr6 | prostate | | | | pAMP10 |
| L0530 | NCI_CGAP_Pr8 | prostate | | | | pAMP10 |
| L0531 | NCI_CGAP_Pr20 | prostate metastasis, liver | | | | pAMP10 |
| L0532 | NCI_CGAP_Thy1 | thyroid | | | | pAMP10 |
| L0533 | NCI_CGAP_HSC1 | stem cells | bone marrow | | | pAMP10 |
| L0534 | Chromosome 7 Fetal Brain | brain | brain | | | pAMP10 |
| | cDNA Library | | | | | |
| L0535 | NCI_CGAP_Br5 | infiltrating ductal carcinoma | breast | | | pAMP10 |
| L0539 | Chromosome 7 Placental | | placenta | | | pAMP10 |
| | cDNA Library | | | | | |
| L0540 | NCI_CGAP_Pr10 | invasive prostate tumor | prostate | | | pAMP10 |
| L0541 | NCI_CGAP_Pr7 | low-grade prostatic neoplasia | prostate | | | pAMP10 |
| L0542 | NCI_CGAP_Pr11 | normal prostatic epithelial | prostate | | | pAMP10 |
| | | cells | | | | |
| L0543 | NCI_CGAP_Pr9 | normal prostatic epithelial | prostate | | | pAMP10 |
| | | cells | | | | |
| L0545 | NCI_CGAP_Pr4.1 | prostatic intraepithelial | prostate | | | pAMP10 |
| | | neoplasia - high grade | | | | |
| L0547 | NCI_CGAP_Pr16 | tumor | prostate | | | pAMP10 |
| L0549 | NCI_CGAP_HN10 | carcinoma in situ from | | | | pAMP10 |
| | | retromolar trigone | | | | |
| L0550 | NCI_CGAP_HN9 | normal squamous epithelium | | | | pAMP10 |
| | | from retromolar trigone | | | | |
| L0551 | NCI_CGAP_HN7 | normal squamous epithelium, | | | | pAMP10 |
| | | floor of mouth | | | | |
| L0555 | NCI_CGAP_Lu34 | large cell carcinoma | lung | | | pAMP10 |
| L0558 | NCI_CGAP_Ov40 | endometrioid ovarian | ovary | | | pAMP10 |
| | | metastasis | | | | |
| L0559 | NCI_CGAP_Ov39 | papillary serous ovarian | ovary | | | pAMP10 |
| | | metastasis | | | | |
| L0561 | NCI_CGAP_HN11 | normal squamous epithelium | tongue | | | pAMP10 |
| L0562 | Chromosome 7 HeLa cDNA | | | HeLa cell line; | | pAMP10 |
| | Library | | | ATCC | | |
| L0563 | Human Bone Marrow | bone marrow | | | | pBluescript |
| | Stromal Fibroblast | | | | | |
| L0564 | Jia bone marrow stroma | bone marrow stroma | | | | pBluescript |
| L0565 | Normal Human Trabecular | Bone | Hip | | | pBluescript |
| | Bone Cells | | | | | |
| L0581 | Stratagene liver (#937224) | | liver | | | pBluescript SK |
| L0584 | Stratagene cDNA library | | | | | pBluescript SK(+) |
| | Human heart, cat#936208 | | | | | |
| L0586 | HTCDL1 | | | | | pBluescript SK(−) |
| L0587 | Stratagene colon HT29 | | | | | pBluescript SK− |
| | (#937221) | | | | | |
| L0588 | Stratagene endothelial cell | | | | | pBluescript SK− |
| | 937223 | | | | | |
| L0589 | Stratagene fetal retina | | | | | pBluescript SK− |
| | 937202 | | | | | |
| L0590 | Stratagene fibroblast | | | | | pBluescript SK− |
| | (#937212) | | | | | |
| L0591 | Stratagene HeLa cell s3 | | | | | pBluescript SK− |
| | 937216 | | | | | |
| L0592 | Stratagene hNT neuron | | | | | pBluescript SK− |
| | (#937233) | | | | | |
| L0593 | Stratagene neuroepithelium | | | | | pBluescript SK− |
| | (#937231) | | | | | |
| L0594 | Stratagene neuroepithelium | | | | | pBluescript SK− |
| | NT2RAMI 937234 | | | | | |
| L0595 | Stratagene NT2 neuronal | neuroepithelial cells | brain | | | pBluescript SK− |
| | precursor 937230 | | | | | |
| L0596 | Stratagene colon (#937204) | | colon | | | pBluescript SK− |
| L0597 | Stratagene corneal stroma | | cornea | | | pBluescript SK− |
| | (#937222) | | | | | |
| L0598 | Morton Fetal Cochlea | cochlea | ear | | | pBluescript SK− |
| L0599 | Stratagene lung (#937210) | | lung | | | pBluescript SK− |
| L0600 | Weizmann Olfactory | olfactory epithelium | nose | | | pBluescript SK− |
| | Epithelium | | | | | |
| L0601 | Stratagene pancreas | | pancreas | | | pBluescript SK− |
| | (#937208) | | | | | |
| L0602 | Pancreatic Islet | pancreatic islet | pancreas | | | pBluescript SK− |
| L0603 | Stratagene placenta | | placenta | | | pBluescript SK− |
| | (#937225) | | | | | |
| L0604 | Stratagene muscle 937209 | muscle | skeletal muscle | | | pBluescript SK− |
| L0605 | Stratagene fetal spleen | fetal spleen | spleen | | | pBluescript SK− |
| | (#937205) | | | | | |
| L0606 | NCI_CGAP_Lym5 | follicular lymphoma | lymph node | | | pBluescript SK− |
| L0607 | NCI_CGAP_Lym6 | mantle cell lymphoma | lymph node | | | pBluescript SK− |
| L0608 | Stratagene lung carcinoma | lung carcinoma | lung | NCI-H69 | | pBluescript SK− |
| | 937218 | | | | | |
| L0609 | Schiller astrocytoma | astrocytoma | brain | | | pBluescript SK− |
| | | | | | | (Stratagene) |
| L0612 | Schiller oligodendroglioma | oligodendroglioma | brain | | | pBluescript SK− |
| | | | | | | (Stratagene) |
| L0615 | 22 week old human fetal | | | | | pBluescriptII SK(−) |
| | liver cDNA library | | | | | |
| L0617 | Chromosome 22 exon | | | | | pBluescriptIIKS+ |
| L0619 | Chromosome 9 exon II | | | | | pBluescriptIIKS+ |
| L0622 | HM1 | | | | | pcDNAII (Invitrogen) |
| L0623 | HM3 | pectoral muscle (after | | | | pcDNAII (Invitrogen) |
| | | mastectomy) | | | | |
| L0625 | NCI_CGAP_AR1 | bulk alveolar tumor | | | | pCMV-SPORT2 |
| L0626 | NCI_CGAP_GC1 | bulk germ cell seminoma | | | | pCMV-SPORT2 |
| L0627 | NCI_CGAP_Co1 | bulk tumor | colon | | | pCMV-SPORT2 |
| L0628 | NCI_CGAP_Ov1 | ovary bulk tumor | ovary | | | pCMV-SPORT2 |
| L0629 | NCI_CGAP_Mel3 | metastatic melanoma to | bowel (skin | | | pCMV-SPORT4 |
| | | bowel | primary) | | | |
| L0630 | NCI_CGAP_CNS1 | substantia nigra | brain | | | pCMV-SPORT4 |
| L0631 | NCI_CGAP_Br7 | | breast | | | pCMV-SPORT4 |
| L0632 | NCI_CGAP_Li5 | hepatic adenoma | liver | | | pCMV-SPORT4 |
| L0633 | NCI_CGAP_Lu6 | small cell carcinoma | lung | | | pCMV-SPORT4 |
| L0634 | NCI_CGAP_Ov8 | serous adenocarcinoma | ovary | | | pCMV-SPORT4 |
| L0635 | NCI_CGAP_PNS1 | dorsal root ganglion | peripheral nervous | | | pCMV-SPORT4 |
| | | | system | | | |
| L0636 | NCI_CGAP_Pit1 | four pooled pituitary | brain | | | pCMV-SPORT6 |
| | | adenomas | | | | |
| L0637 | NCI_CGAP_Brn53 | three pooled meningiomas | brain | | | pCMV-SPORT6 |
| L0638 | NCI_CGAP_Brn35 | tumor, 5 pooled (see | brain | | | pCMV-SPORT6 |
| | | description) | | | | |
| L0639 | NCI_CGAP_Brn52 | tumor, 5 pooled (see | brain | | | pCMV-SPORT6 |
| | | description) | | | | |
| L0640 | NCI_CGAP_Br18 | four pooled high-grade | breast | | | pCMV-SPORT6 |
| | | tumors, including two prima | | | | |
| L0641 | NCI_CGAP_Co17 | juvenile granulosa tumor | colon | | | pCMV-SPORT6 |
| L0642 | NCI_CGAP_Co18 | moderately differentiated | colon | | | pCMV-SPORT6 |
| | | adenocarcinoma | | | | |
| L0643 | NCI_CGAP_Co19 | moderately differentiated | colon | | | pCMV-SPORT6 |
| | | adenocarcinoma | | | | |
| L0644 | NCI_CGAP_Co20 | moderately differentiated | colon | | | pCMV-SPORT6 |
| | | adenocarcinoma | | | | |
| L0645 | NCI_CGAP_Co21 | moderately differentiated | colon | | | pCMV-SPORT6 |
| | | adenocarcinoma | | | | |
| L0646 | NCI_CGAP_Co14 | moderately-differentiated | colon | | | pCMV-SPORT6 |
| | | adenocarcinoma | | | | |
| L0647 | NCI_CGAP_Sar4 | five pooled sarcomas, | connective tissue | | | pCMV-SPORT6 |
| | | including myxoid | | | | |
| | | liposarcoma | | | | |
| L0648 | NCI_CGAP_Eso2 | squamous cell carcinoma | esophagus | | | pCMV-SPORT6 |
| L0649 | NCI_CGAP_GU1 | 2 pooled high-grade | genitourinary tract | | | pCMV-SPORT6 |
| | | transitional cell tumors | | | | |
| L0650 | NCI_CGAP_Kid13 | 2 pooled Wilms'' tumors, one | kidney | | | pCMV-SPORT6 |
| | | primary and one metast | | | | |
| L0651 | NCI_CGAP_Kid8 | renal cell tumor | kidney | | | pCMV-SPORT6 |
| L0652 | NCI_CGAP_Lu27 | four pooled poorly- | lung | | | pCMV-SPORT6 |
| | | differentiated | | | | |
| | | adenocarcinomas | | | | |
| L0653 | NCI_CGAP_Lu28 | two pooled squamous cell | lung | | | pCMV-SPORT6 |
| | | carcinomas | | | | |
| L0654 | NCI_CGAP_Lu31 | | lung, cell line | | | pCMV-SPORT6 |
| L0655 | NCI_CGAP_Lym12 | lymphoma, follicular mixed | lymph node | | | pCMV-SPORT6 |
| | | small and large cell | | | | |
| L0656 | NCI_CGAP_Ov38 | normal epithelium | ovary | | | pCMV-SPORT6 |
| L0657 | NCI_CGAP_Ov23 | tumor, 5 pooled (see | ovary | | | pCMV-SPORT6 |
| | | description) | | | | |
| L0658 | NCI_CGAP_Ov35 | tumor, 5 pooled (see | ovary | | | pCMV-SPORT6 |
| | | description) | | | | |
| L0659 | NCI_CGAP_Pan1 | adenocarcinoma | pancreas | | | pCMV-SPORT6 |
| L0661 | NCI_CGAP_Mel15 | malignant melanoma, | skin | | | pCMV-SPORT6 |
| | | metastatic to lymph node | | | | |
| L0662 | NCI_CGAP_Gas4 | poorly differentiated | stomach | | | pCMV-SPORT6 |
| | | adenocarcinoma with signet r | | | | |
| L0663 | NCI_CGAP_Ut2 | moderately-differentiated | uterus | | | pCMV-SPORT6 |
| | | endometrial adenocarcino | | | | |
| L0664 | NCI_CGAP_Ut3 | poorly-differentiated | uterus | | | pCMV-SPORT6 |
| | | endometrial adenocarcinoma, | | | | |
| L0665 | NCI_CGAP_Ut4 | serous papillary carcinoma, | uterus | | | pCMV-SPORT6 |
| | | high grade, 2 pooled t | | | | |
| L0666 | NCI_CGAP_Ut1 | well-differentiated | uterus | | | pCMV-SPORT6 |
| | | endometrial adenocarcinoma, 7 | | | | |
| L0667 | NCI_CGAP_CML1 | myeloid cells, 18 pooled | whole blood | | | pCMV-SPORT6 |
| | | CML cases, BCR/ABL rearra | | | | |
| L0669 | Human MCF7 cDNA | breast adenocarcinoma | breast | MCF7 | | pCR II [Invitrogen] |
| | subtracted with MDA-MB- | | | | | |
| | 231 cDNA | | | | | |
| L0684 | Stanley Frontal SB pool 1 | frontal lobe (see description) | brain | | | pCR2.1-TOPO |
| | | | | | | (Invitrogen) |
| L0686 | Stanley Frontal SN pool 2 | frontal lobe (see description) | brain | | | pCR2.1-TOPO |
| | | | | | | (Invitrogen) |
| L0695 | Human Glialblastoma Cell | | Brain | BT-325 | | PCRII, Invitrogen |
| L0697 | Testis 1 | | | | | PGEM 5zf(+) |
| L0698 | Testis 2 | | | | | PGEM 5zf(+) |
| L0709 | NIH_MGC_21 | choriocarcinoma | placenta | | | pOTB7 |
| L0710 | NIH_MGC_7 | small cell carcinoma | lung | MGC3 | | pOTB7 |
| L0717 | Gessler Wilms tumor | | | | | pSPORT1 |
| L0718 | Testis 5 | | | | | pSPORT1 |
| L0731 | Soares_pregnant_uterus_NbHPU | | uterus | | | pT7T3-Pac |
| L0738 | Human colorectal cancer | | | | | pT7T3D |
| L0740 | Soares melanocyte 2NbHM | melanocyte | | | | pT7T3D (Pharmacia) |
| | | | | | | with a modified |
| | | | | | | polylinker |
| L0741 | Soares adult brain | | brain | | | pT7T3D (Pharmacia) |
| | N2b4HB55Y | | | | | with a modified |
| | | | | | | polylinker |
| L0742 | Soares adult brain | | brain | | | pT7T3D (Pharmacia) |
| | N2b5HB55Y | | | | | with a modified |
| | | | | | | polylinker |
| L0743 | Soares breast 2NbHBst | | breast | | | pT7T3D (Pharmacia) |
| | | | | | | with a modified |
| | | | | | | polylinker |
| L0744 | Soares breast 3NbHBst | | breast | | | pT7T3D (Pharmacia) |
| | | | | | | with a modified |
| | | | | | | polylinker |
| L0745 | Soares retina N2b4HR | retina | eye | | | pT7T3D (Pharmacia) |
| | | | | | | with a modified |
| | | | | | | polylinker |
| L0746 | Soares retina N2b5HR | retina | eye | | | pT7T3D (Pharmacia) |
| | | | | | | with a modified |
| | | | | | | polylinker |
| L0747 | Soares_fetal_heart_NbHH19W | | heart | | | pT7T3D (Pharmacia) |
| | | | | | | with a modified |
| | | | | | | polylinker |
| L0748 | Soares fetal liver spleen | | Liver and Spleen | | | pT7T3D (Pharmacia) |
| | 1NFLS | | | | | with a modified |
| | | | | | | polylinker |
| L0749 | Soares_fetal_liver_spleen_1NFLS_S1 | | Liver and Spleen | | | pT7T3D (Pharmacia) |
| | | | | | | with a modified |
| | | | | | | polylinker |
| L0750 | Soares_fetal_lung_NbHL19W | | lung | | | pT7T3D (Pharmacia) |
| | | | | | | with a modified |
| | | | | | | polylinker |
| L0751 | Soares ovary tumor NbHOT | ovarian tumor | ovary | | | pT7T3D (Pharmacia) |
| | | | | | | with a modified |
| | | | | | | polylinker |
| L0752 | Soares_parathyroid_tumor_NbHPA | parathyroid tumor | parathyroid gland | | | pT7T3D (Pharmacia) |
| | | | | | | with a modified |
| | | | | | | polylinker |
| L0753 | Soares_pineal_gland_N3HPG | | pineal gland | | | pT7T3D (Pharmacia) |
| | | | | | | with a modified |
| | | | | | | polylinker |
| L0754 | Soares placenta Nb2HP | | placenta | | | pT7T3D (Pharmacia) |
| | | | | | | with a modified |
| | | | | | | polylinker |
| L0755 | Soares_placenta_8to9weeks_2NbHP8to9W | | placenta | | | pT7T3D (Pharmacia) |
| | | | | | | with a modified |
| | | | | | | polylinker |
| L0756 | Soares_multiple_sclerosis_2NbHMSP | multiple sclerosis lesions | | | | pT7T3D (Pharmacia) |
| | | | | | | with a modified |
| | | | | | | polylinker V_TYPE |
| L0757 | Soares_senescent_fibroblasts_NbHSF | senescent fibroblast | | | | pT7T3D (Pharmacia) |
| | | | | | | with a modified |
| | | | | | | polylinker V_TYPE |
| L0758 | Soares_testis_NHT | | | | | pT7T3D-Pac |
| | | | | | | (Pharmacia) with a |
| | | | | | | modified polylinker |
| L0759 | Soares_total_fetus_Nb2HF8_9w | | | | | pT7T3D-Pac |
| | | | | | | (Pharmacia) with a |
| | | | | | | modified polylinker |
| L0760 | Barstead aorta HPLRB3 | aorta | | | | pT7T3D-Pac |
| | | | | | | (Pharmacia) with a |
| | | | | | | modified polylinker |
| L0761 | NCI_CGAP_CLL1 | B-cell, chronic lymphotic | | | | pT7T3D-Pac |
| | | leukemia | | | | (Pharmacia) with a |
| | | | | | | modified polylinker |
| L0762 | NCI_CGAP_Br1.1 | breast | | | | pT7T3D-Pac |
| | | | | | | (Pharmacia) with a |
| | | | | | | modified polylinker |
| L0763 | NCI_CGAP_Br2 | breast | | | | pT7T3D-Pac |
| | | | | | | (Pharmacia) with a |
| | | | | | | modified polylinker |
| L0764 | NCI_CGAP_Co3 | colon | | | | pT7T3D-Pac |
| | | | | | | (Pharmacia) with a |
| | | | | | | modified polylinker |
| L0765 | NCI_CGAP_Co4 | colon | | | | pT7T3D-Pac |
| | | | | | | (Pharmacia) with a |
| | | | | | | modified polylinker |
| L0766 | NCI_CGAP_GCB1 | germinal center B cell | | | | pT7T3D-Pac |
| | | | | | | (Pharmacia) with a |
| | | | | | | modified polylinker |
| L0767 | NCI_CGAP_GC3 | pooled germ cell tumors | | | | pT7T3D-Pac |
| | | | | | | (Pharmacia) with a |
| | | | | | | modified polylinker |
| L0768 | NCI_CGAP_GC4 | pooled germ cell tumors | | | | pT7T3D-Pac |
| | | | | | | (Pharmacia) with a |
| | | | | | | modified polylinker |
| L0769 | NCI_CGAP_Brn25 | anaplastic oligodendroglioma | brain | | | pT7T3D-Pac |
| | | | | | | (Pharmacia) with a |
| | | | | | | modified polylinker |
| L0770 | NCI_CGAP_Brn23 | glioblastoma (pooled) | brain | | | pT7T3D-Pac |
| | | | | | | (Pharmacia) with a |
| | | | | | | modified polylinker |
| L0771 | NCI_CGAP_Co8 | adenocarcinoma | colon | | | pT7T3D-Pac |
| | | | | | | (Pharmacia) with a |
| | | | | | | modified polylinker |
| L0772 | NCI_CGAP_Co10 | colon tumor RER+ | colon | | | pT7T3D-Pac |
| | | | | | | (Pharmacia) with a |
| | | | | | | modified polylinker |
| L0773 | NCI_CGAP_Co9 | colon tumor RER+ | colon | | | pT7T3D-Pac |
| | | | | | | (Pharmacia) with a |
| | | | | | | modified polylinker |
| L0774 | NCI_CGAP_Kid3 | | kidney | | | pT7T3D-Pac |
| | | | | | | (Pharmacia) with a |
| | | | | | | modified polylinker |
| L0775 | NCI_CGAP_Kid5 | 2 pooled tumors (clear cell | kidney | | | pT7T3D-Pac |
| | | type) | | | | (Pharmacia) with a |
| | | | | | | modified polylinker |
| L0776 | NCI_CGAP_Lu5 | carcinoid | lung | | | pT7T3D-Pac |
| | | | | | | (Pharmacia) with a |
| | | | | | | modified polylinker |
| L0777 | Soares_NhHMPu_S1 | Pooled human melanocyte, | mixed (see below) | | | pT7T3D-Pac |
| | | fetal heart, and pregnant | | | | (Pharmacia) with a |
| | | | | | | modified polylinker |
| L0779 | Soares_NFL_T_GBC_S1 | | pooled | | | pT7T3D-Pac |
| | | | | | | (Pharmacia) with a |
| | | | | | | modified polylinker |
| L0780 | Soares_NSF_F8_9W_OT_PA_P_S1 | | pooled | | | pT7T3D-Pac |
| | | | | | | (Pharmacia) with a |
| | | | | | | modified polylinker |
| L0782 | NCI_CGAP_Pr21 | normal prostate | prostate | | | pT7T3D-Pac |
| | | | | | | (Pharmacia) with a |
| | | | | | | modified polylinker |
| L0783 | NCI_CGAP_Pr22 | normal prostate | prostate | | | pT7T3D-Pac |
| | | | | | | (Pharmacia) with a |
| | | | | | | modified polylinker |
| L0784 | NCI_CGAP_Lei2 | leiomyosarcoma | soft tissue | | | pT7T3D-Pac |
| | | | | | | (Pharmacia) with a |
| | | | | | | modified polylinker |
| L0785 | Barstead spleen HPLRB2 | | spleen | | | pT7T3D-Pac |
| | | | | | | (Pharmacia) with a |
| | | | | | | modified polylinker |
| L0786 | Soares_NbHFB | | whole brain | | | pT7T3D-Pac |
| | | | | | | (Pharmacia) with a |
| | | | | | | modified polylinker |
| L0787 | NCI_CGAP_Sub1 | | | | | pT7T3D-Pac |
| | | | | | | (Pharmacia) with a |
| | | | | | | modified polylinker |
| L0788 | NCI_CGAP_Sub2 | | | | | pT7T3D-Pac |
| | | | | | | (Pharmacia) with a |
| | | | | | | modified polylinker |
| L0789 | NCI_CGAP_Sub3 | | | | | pT7T3D-Pac |
| | | | | | | (Pharmacia) with a |
| | | | | | | modified polylinker |
| L0790 | NCI_CGAP_Sub4 | | | | | pT7T3D-Pac |
| | | | | | | (Pharmacia) with a |
| | | | | | | modified polylinker |
| L0791 | NCI_CGAP_Sub5 | | | | | pT7T3D-Pac |
| | | | | | | (Pharmacia) with a |
| | | | | | | modified polylinker |
| L0792 | NCI_CGAP_Sub6 | | | | | pT7T3D-Pac |
| | | | | | | (Pharmacia) with a |
| | | | | | | modified polylinker |
| L0793 | NCI_CGAP_Sub7 | | | | | pT7T3D-Pac |
| | | | | | | (Pharmacia) with a |
| | | | | | | modified polylinker |
| L0794 | NCI_CGAP_GC6 | pooled germ cell tumors | | | | pT7T3D-Pac |
| | | | | | | (Pharmacia) with a |
| | | | | | | modified polylinker |
| L0796 | NCI_CGAP_Brn50 | medulloblastoma | brain | | | pT7T3D-Pac |
| | | | | | | (Pharmacia) with a |
| | | | | | | modified polylinker |
| L0800 | NCI_CGAP_Co16 | colon tumor, RER+ | colon | | | pT7T3D-Pac |
| | | | | | | (Pharmacia) with a |
| | | | | | | modified polylinker |
| L0803 | NCI_CGAP_Kid11 | | kidney | | | pT7T3D-Pac |
| | | | | | | (Pharmacia) with a |
| | | | | | | modified polylinker |
| L0804 | NCI_CGAP_Kid12 | 2 pooled tumors (clear cell | kidney | | | pT7T3D-Pac |
| | | type) | | | | (Pharmacia) with a |
| | | | | | | modified polylinker |
| L0805 | NCI_CGAP_Lu24 | carcinoid | lung | | | pT7T3D-Pac |
| | | | | | | (Pharmacia) with a |
| | | | | | | modified polylinker |
| L0806 | NCI_CGAP_Lu19 | squamous cell carcinoma, | lung | | | pT7T3D-Pac |
| | | poorly differentiated (4 | | | | (Pharmacia) with a |
| | | | | | | modified polylinker |
| L0807 | NCI_CGAP_Ov18 | fibrotheoma | ovary | | | pT7T3D-Pac |
| | | | | | | (Pharmacia) with a |
| | | | | | | modified polylinker |
| L0809 | NCI_CGAP_Pr28 | | prostate | | | pT7T3D-Pac |
| | | | | | | (Pharmacia) with a |
| | | | | | | modified polylinker |
| L0988 | BT0387 | | breast | | | puc18 |
| L1562 | CN0027 | | colon_normal | | | puc18 |
| L1819 | HT0268 | | head_neck | | | puc18 |
| L2138 | ST0186 | | stomach | | | puc18 |
| L2251 | Human fetal lung | Fetal lung | | | | |
| L2255 | GLC | corresponding non cancerous | | | | pBluescript sk(−) |
| | | liver tissue | | | | |
| L2257 | NIH_MGC_65 | adenocarcinoma | colon | | | pCMV-SPORT6 |
| L2258 | NIH_MGC_67 | retinoblastoma | eye | | | pCMV-SPORT6 |
| L2259 | NIH_MGC_68 | large cell carcinoma | lung | | | pCMV-SPORT6 |
| L2260 | NIH_MGC_69 | large cell carcinoma, | lung | | | pCMV-SPORT6 |
| | | undifferentiated | | | | |
| L2261 | NIH_MGC_70 | epithelioid carcinoma | pancreas | | | pCMV-SPORT6 |
| L2262 | NIH_MGC_72 | melanotic melanoma | skin | | | pCMV-SPORT6 |
| L2263 | NIH_MGC_66 | adenocarcinoma | ovary | | | pCMV-SPORT6 |
| L2264 | NIH_MGC_71 | leiomyosarcoma | uterus | | | pCMV-SPORT6 |
| L2265 | NIH_MGC_39 | adenocarcinoma | pancreas | | | pOTB7 |
| L2270 | Lupski_dorsal_root_ganglion | dorsal root ganglia | | | | pCMV-SPORT6 (Life |
| | | | | | | Technologies) |
| L2285 | BT0723 | | breast | | | puc18 |
| L2289 | BT0757 | | breast | | | puc18 |
| L2293 | BT0762 | | breast | | | puc18 |
| L2336 | CT0428 | | colon | | | puc18 |
| L2352 | UT0001 | | uterus_tumor | | | puc18 |
| L2357 | UT0021 | | uterus_tumor | | | puc18 |
| L2359 | UT0023 | | uterus_tumor | | | puc18 |
| L2368 | UT0041 | | uterus_tumor | | | puc18 |
| L2380 | NN0068 | | nervous_normal | | | puc18 |
| L2381 | NN0070 | | nervous_normal | | | puc18 |
| L2412 | NN0136 | | nervous_normal | | | puc18 |
| L2439 | NN1022 | | nervous_normal | | | puc18 |
| L2482 | HT0497 | | head_neck | | | puc18 |
| L2486 | HT0527 | | head_neck | | | puc18 |
| L2487 | HT0542 | | head_neck | | | puc18 |
| L2491 | HT0559 | | head_neck | | | puc18 |
| L2497 | HT0618 | | head_neck | | | puc18 |
| L2504 | HT0636 | | head_neck | | | puc18 |
| L2528 | HT0713 | | head_neck | | | puc18 |
| L2543 | HT0734 | | head_neck | | | puc18 |
| L2551 | HT0744 | | head_neck | | | puc18 |
| L2652 | NIH_MGC_57 | glioblastoma | brain | | | pDNR-LIB (Clontech) |
| L2653 | NIH_MGC_58 | hypernephroma | kidney | | | pDNR-LIB (Clontech) |
| L2654 | NIH_MGC_9 | adenocarcinoma cell line | ovary | | | pOTB7 |
| L2655 | NIH_MGC_55 | from acute myelogenous | bone marrow | | | pDNR-LIB (Clontech) |
| | | leukemia | | | | |
| L2657 | NIH_MGC_54 | from chronic myelogenous | bone marrow | | | pDNR-LIB (Clontech) |
| | | leukemia | | | | |
| L2669 | NT0022 | | nervous_tumor | | | puc18 |
| L2670 | NT0023 | | nervous_tumor | | | puc18 |
| L2673 | NT0028 | | nervous_tumor | | | puc18 |
| L2675 | NT0033 | | nervous_tumor | | | puc18 |
| L2706 | NT0102 | | nervous_tumor | | | puc18 |
| L2744 | FT0004 | | prostate_tumor | | | puc18 |
| L2758 | FT0027 | | prostate_tumor | | | puc18 |
| L2759 | FT0028 | | prostate_tumor | | | puc18 |
| L2767 | FT0044 | | prostate_tumor | | | puc18 |
| L2777 | FT0056 | | prostate_tumor | | | puc18 |
| L2791 | FT0077 | | prostate_tumor | | | puc18 |
| L2842 | UM0009 | | uterus | | | puc18 |
| L2877 | AN0027 | | amnion_normal | | | puc18 |
| L2903 | BN0039 | | breast_normal | | | puc18 |
| L2904 | BN0042 | | breast_normal | | | puc18 |
| L2909 | BN0067 | | breast_normal | | | puc18 |
| L2910 | BN0070 | | breast_normal | | | puc18 |
| L2915 | BN0098 | | breast_normal | | | puc18 |
| L2985 | BN0257 | | breast_normal | | | puc18 |
| L2991 | BN0264 | | breast_normal | | | puc18 |
| L2999 | BN0273 | | breast_normal | | | puc18 |
| L3001 | BN0275 | | breast_normal | | | puc18 |
| L3019 | BN0303 | | breast_normal | | | puc18 |
| L3092 | ET0023 | | lung_tumor | | | puc18 |
| L3109 | ET0046 | | lung_tumor | | | puc18 |
| L3117 | ET0068 | | lung_tumor | | | puc18 |
| L3119 | ET0072 | | lung_tumor | | | puc18 |
| L3210 | OT0067 | | ovary | | | puc18 |
| L3271 | FN0094 | | prostate_normal | | | puc18 |
| L3280 | FN0106 | | prostate_normal | | | puc18 |
| L3327 | SN0024 | | stomach_normal | | | puc18 |
| L3357 | TN0034 | | testis_normal | | | puc18 |
| L3372 | TN0068 | | testis_normal | | | puc18 |
| L3378 | TN0080 | | testis_normal | | | puc18 |
| L3387 | GKB | hepatocellular carcinoma | | | | pBluescript sk(−) |
| L3388 | GKC | hepatocellular carcinoma | | | | pBluescript sk(−) |
| L3391 | NIH_MGC_53 | carcinoma, cell line | bladder | | | pDNR-LIB (Clontech) |
| L3450 | CT0508 | | colon | | | puc18 |
| L3499 | HT0617 | | head_neck | | | puc18 |
| L3503 | HT0870 | | head_neck | | | puc18 |
| L3516 | HT0913 | | head_neck | | | puc18 |
| L3560 | TN0023 | | testis_normal | | | puc18 |
| L3563 | TN0037 | | testis_normal | | | puc18 |
| L3566 | TN0046 | | testis_normal | | | puc18 |
| L3576 | TN0086 | | testis_normal | | | puc18 |
| L3585 | TN0119 | | testis_normal | | | puc18 |
| L3592 | TN0129 | | testis_normal | | | puc18 |
| L3630 | UT0071 | | uterus_tumor | | | puc18 |
| L3632 | UT0074 | | uterus_tumor | | | puc18 |
| L3642 | ADA | Adrenal gland | | | | pBluescript sk(−) |
| L3643 | ADB | Adrenal gland | | | | pBluescript sk(−) |
| L3644 | ADC | Adrenal gland | | | | pBluescript sk(−) |
| L3645 | Cu | adrenal cortico adenoma for | | | | pBluescript sk(−) |
| | | Cushing''s syndrome | | | | |
| L3646 | DCA | | | | | pTrip1Ex2 |
| L3649 | DCB | | | | | pTriplEx2 |
| L3651 | FHTA | hypothalamus | | | | pTriplEx2 |
| L3653 | HTB | Hypothalamus | | | | pBluescript sk(−) |
| L3655 | HTC | Hypothalamus | | | | pBluescript sk(−) |
| L3658 | cdA | pheochromocytoma | | | | pTriplEx2 |
| L3659 | CB | cord blood | | | | pBluescript |
| L3660 | NP1 | pituitary | | | | pBluescript sk(−) |
| L3661 | NPA | pituitary | | | | pBluescript sk(−) |
| L3663 | NIH_MGC_60 | adenocarcinoma | prostate | | | pDNR-LIB (Clontech) |
| L3729 | GN0079 | | placenta_normal | | | puc18 |
| L3750 | HT0945 | | head_neck | | | puc18 |
| L3783 | TN0136 | | testis_normal | | | puc18 |
| L3796 | UT0042 | | uterus_tumor | | | puc18 |
| L3807 | UT0077 | | uterus_tumor | | | puc18 |
| L3811 | NPC | pituitary | | | | pBluescript sk(−) |
| L3812 | NPD | pituitary | | | | pBluescript sk(−) |
| L3813 | TP | pituitary tumor | | | | pTriplEx2 |
| L3814 | BM | Bone marrow | | | | pTriplEx2 |
| L3815 | MDS | Bone marrow | | | | pTriplEx2 |
| L3816 | HEMBA1 | whole embryo, mainly head | | | | pME18SFL3 |
| L3817 | HEMBB1 | whole embryo, mainly body | | | | pME18SFL3 |
| L3818 | MAMMA1 | mammary gland | | | | pME18SFL3 |
| L3820 | NIH_MGC_46 | leiomyosarcoma cell line | uterus | | | pOTB7 |
| L3823 | NT2RM1 | | | NT2 | | pUC19FL3 |
| L3824 | NT2RM2 | | | NT2 | | pME18SFL3 |
| L3825 | NT2RM4 | | | NT2 | | pME18SFL3 |
| L3826 | NT2RP1 | | | NT2 | | pUC19FL3 |
| L3827 | NT2RP2 | | | NT2 | | pME18SFL3 |
| L3828 | NT2RP3 | | | NT2 | | pME18SFL3 |
| L3829 | NT2RP4 | | | NT2 | | pME18SFL3 |
| L3832 | PLACE1 | placenta | | | | pME18SFL3 |
| L3833 | PLACE2 | placenta | | | | pME18SFL3 |
| L3837 | THYRO1 | thyroid gland | | | | pME18SFL3 |
| L3872 | NCI_CGAP_Skn1 | | skin, normal, 4 | | | pCMV- |
| | | | pooled sa | | | SPORT6 |
| L3904 | NCI_CGAP_Brn64 | glioblastoma with EGFR | brain | | | pCMV- |
| | | amplification | | | | SPORT6 |
| L3905 | NCI_CGAP_Brn67 | anaplastic oligodendroglioma | brain | | | pCMV- |
| | | with 1p/19q loss | | | | SPORT6 |
| L4497 | NCI_CGAP_Br22 | invasive ductal carcinoma, 3 | breast | | | pCMV- |
| | | pooled samples | | | | SPORT6 |
| L4500 | NCI_CGAP_HN16 | moderate to poorly | mouth | | | pAMP10 |
| | | differentiated invasive | | | | |
| | | carcino | | | | |
| L4501 | NCI_CGAP_Sub8 | | | | | pT7T3D-Pac |
| | | | | | | (Pharmacia) |
| | | | | | | with a |
| | | | | | | modified |
| | | | | | | polylinker |
| L4507 | NCI_CGAP_Thy6 | normal epithelium | thyroid | | | pAMP10 |
| L4508 | NCI_CGAP_Thy8 | normal epithelium | thyroid | | | pAMP10 |
| L4537 | NCI_CGAP_Thy7 | follicular adenoma (benign | thyroid | | | pAMP10 |
| | | lesion) | | | | |
| L4556 | NCI_CGAP_HN13 | squamous cell carcinoma | tongue | | | pCMV- |
| | | | | | | SPORT6 |
| L4558 | NCI_CGAP_Pan3 | | pancreas | | | pCMV- |
| | | | | | | SPORT6 |
| L4559 | NCI_CGAP_Thy3 | follicular carcinoma | thyroid | | | pCMV- |
| | | | | | | SPORT6 |
| L4560 | NCI_CGAP_Ut7 | tumor | uterus | | | pCMV- |
| | | | | | | SPORT6 |
| L4747 | NCI_CGAP_Brn41 | oligodendroglioma | brain | | | pT7T3D-Pac |
| | | | | | | (Pharmacia) |
| | | | | | | with a |
| | | | | | | modified |
| | | | | | | polylinker |
| L4753 | NCI_CGAP_HN15 | leukoplakia of the buccal | mouth | | | pAMP10 |
| | | mucosa | | | | |
| L5286 | NCI_CGAP_Thy10 | medullary carcinoma | thyroid | | | pAMP10 |
| L5564 | NCI_CGAP_HN20 | | normal head/neck | | | pAMP1 |
| | | | tissue | | | |
| L5565 | NCI_CGAP_Brn66 | glioblastoma with probably | brain | | | pCMV- |
| | | | | | | SPORT6 |
| | | TP53 mutation and witho | | | | |
| L5566 | NCI_CGAP_Brn70 | anaplastic oligodendroglioma | brain | | | pCMV- |
| | | | | | | SPORT6.ccdb |
| L5568 | NCI_CGAP_HN21 | nasopharyngeal carcinoma | head/neck | | | pAMP1 |
| L5569 | NCI_CGAP_HN17 | normal epithelium | nasopharynx | | | pAMP10 |
| L5574 | NCI_CGAP_HN19 | normal epithelium | nasopharynx | | | pAMP10 |
| L5575 | NCI_CGAP_Brn65 | glioblastoma without EGFR | brain | | | pCMV- |
| | | | | | | SPORT6 |
| | | amplification | | | | |
| L5622 | NCI_CGAP_Skn3 | | skin | | | pCMV- |
| | | | | | | SPORT6 |
| L5623 | NCI_CGAP_Skn4 | squamous cell carcinoma | skin | | | pCMV- |
| | | | | | | SPORT6 |

Description of Table 5

[0153] Table 5 provides a key to the OMIM reference identification numbers disclosed in Table 1B.1, column 9. OMIM reference identification numbers (Column 1) were derived from Online Mendelian Inheritance in Man (Online Mendelian Inheritance in Man, OMIM. McKusick-Nathans Institute for Genetic Medicine, Johns Hopkins University (Baltimore, Md.) and National Center for Biotechnology Information, National Library of Medicine, (Bethesda, Md.) 2000. World Wide Web URL: http://www.ncbi.nlm.nih.gov/omim/). Column 2 provides diseases associated with the cytologic band disclosed in Table 1B.1, column 8, as determined using the Morbid Map database.

TABLE 5

| OMIM Reference | Description |
|---|---|
| 100678 | ACAT2 deficiency |
| 100690 | Myasthenic syndrome, slow-channel congenital, 601462 |
| 100730 | Myasthenia gravis, neonatal transient |
| 101000 | Meningioma, NF2-related, sporadic Schwannoma, sporadic |
| 101000 | Neurofibromatosis, type 2 |
| 101000 | Neurolemmomatosis |
| 101000 | Malignant mesothelioma, sporadic |
| 102700 | Severe combined immunodeficiency due to ADA deficiency |
| 102700 | Hemolytic anemia due to ADA excess |
| 102770 | Myoadenylate deaminase deficiency |
| 102772 | [AMP deaminase deficiency, erythrocytic] |
| 103600 | [Dysalbuminemic hyperthyroxinemia] |
| 103600 | [Dysalbuminemic hyperzincemia], 194470 |
| 103600 | Analbuminemia |
| 103850 | Aldolase A deficiency |
| 103950 | Emphysema due to alpha-2-macroglobulin deficiency |
| 104150 | [AFP deficiency, congenital] |
| 104150 | [Hereditary persistence of alpha-fetoprotein] |
| 104311 | Alzheimer disease-3 |
| 104500 | Amelogenesis imperfecta-2, hypoplastic local type |
| 104770 | Amyloidosis, secondary, susceptibility to |
| 106100 | Angioedema, hereditary |
| 106150 | Hypertension, essential, susceptibility to |
| 106150 | Preeclampsia, susceptibility to |
| 106165 | Hypertension, essential, 145500 |
| 106180 | Myocardial infarction, susceptibility to |
| 106210 | Peters anomaly |
| 106210 | Cataract, congenital, with late-onset corneal dystrophy |
| 106210 | Foveal hypoplasia, isolated, 136520 |
| 106210 | Aniridia |
| 107250 | Anterior segment mesenchymal dysgenesis |
| 107271 | CD59 deficiency |
| 107300 | Antithrombin III deficiency |
| 107670 | Apolipoprotein A-II deficiency |
| 107741 | Hyperlipoproteinemia, type III |
| 107777 | Diabetes insipidus, nephrogenic, autosomal recessive, 222000 |
| 108120 | Distal arthrogryposis-1 |
| 108725 | Atherosclerosis, susceptibility to |
| 109150 | Machado-Joseph disease |
| 110700 | Vivax malaria, susceptibility to |
| 112250 | Bone dysplasia with medullary fibrosarcoma |
| 112410 | Hypertension with brachydactyly |
| 113900 | Heart block, progressive familial, type I |
| 114240 | Muscular dystrophy, limb-girdle, type 2A, 253600 |
| 114290 | Campomelic dysplasia with autosomal sex reversal |
| 114400 | Lynch cancer family syndrome II |
| 114550 | Hepatocellular carcinoma |
| 114835 | Monocyte carboxyesterase deficiency |
| 115500 | Acatalasemia |
| 116800 | Cataract, Marner type |
| 116806 | Colorectal cancer |
| 116860 | Cavernous angiomatous malformations |
| 117700 | [Hypoceruloplasminemia, hereditary] |
| 117700 | Hemosiderosis, systemic, due to aceruloplasminemia |
| 118210 | Charcot-Marie-Tooth neuropathy-2A |
| 118425 | Myotonia congenita, dominant, 160800 |
| 118425 | Myotonia congenita, recessive, 255700 |
| 118425 | Myotonia levior, recessive |
| 118800 | Choreoathetosis, familial paroxysmal |
| 120070 | Alport syndrome, autosomal recessive, 203780 |
| 120120 | Epidermolysis bullosa dystrophica, dominant, 131750 |
| 120120 | Epidermolysis bullosa dystrophica, recessive, 226600 |
| 120120 | Epidermolysis bullosa, pretibial, 131850 |
| 120131 | Alport syndrome, autosomal recessive, 203780 |
| 120131 | Hematuria, familial benign |
| 120140 | Osteoarthrosis, precocious |
| 120140 | SED congenita |
| 120140 | SMED Strudwick type |
| 120140 | Stickler syndrome, type I |
| 120140 | Wagner syndrome, type II |
| 120140 | Achondrogenesis-hypochondrogenesis, type II |
| 120140 | Kniest dysplasia |
| 120160 | Osteogenesis imperfecta, 4 clinical forms, 166200, 166210, 259420, |
| | 166220 |
| 120160 | Osteoporosis, idiopathic, 166710 |
| 120160 | Ehlers-Danlos syndrome, type VIIA2, 130060 |
| 120160 | Marfan syndrome, atypical |
| 120260 | Epiphyseal dysplasia, multiple, type 2, 600204 |
| 120436 | Muir-Torre family cancer syndrome, 158320 |
| 120436 | Turcot syndrome with glioblastoma, 276300 |
| 120436 | Colorectal cancer, hereditary nonpolyposis, type 2 |
| 120550 | C1q deficiency, type A |
| 120570 | C1q deficiency, type B |
| 120575 | C1q deficiency, type C |
| 120700 | C3 deficiency |
| 120950 | C8 deficiency, type I |
| 120960 | C8 deficiency, type II |
| 121800 | Corneal dystrophy, crystalline, Schnyder |
| 122720 | Nicotine addiction, protection from |
| 122720 | Coumarin resistance, 122700 |
| 123000 | Craniometaphyseal dysplasia |
| 123100 | Craniosynostosis, type 1 |
| 123270 | [Creatine kinase, brain type, ectopic expression of] |
| 123620 | Cataract, cerulean, type 2, 601547 |
| 123660 | Cataract, Coppock-like |
| 123940 | White sponge nevus, 193900 |
| 125660 | Myopathy, desminopathic |
| 125660 | Cardiomyopathy |
| 125852 | Insulin-dependent diabetes mellitus-2 |
| 126337 | Myxoid liposarcoma |
| 126340 | Xeroderma pigmentosum, group D, 278730 |
| 126391 | DNA ligase I deficiency |
| 126451 | Schizophrenia, susceptibility to |
| 126452 | Autonomic nervous system dysfunction |
| 126452 | [Novelty seeking personality] |
| 126650 | Chloride diarrhea, congenital, Finnish type, 214700 |
| 126650 | Colon cancer |
| 129900 | EEC syndrome-1 |
| 130500 | Elliptocytosis-1 |
| 130650 | Beckwith-Wiedemann syndrome |
| 131210 | Atherosclerosis, susceptibility to |
| 132700 | Cylindromatosis |
| 133171 | [Erythrocytosis, familial], 133100 |
| 133200 | Erythrokeratodermia variabilis |
| 133450 | Neuroepithelioma |
| 133450 | Ewing sarcoma |
| 133780 | Vitreoretinopathy, exudative, familial |
| 134580 | Factor XIIIB deficiency |
| 134790 | Hyperferritinemia-cataract syndrome, 600886 |
| 134820 | Dysfibrinogenemia, alpha type, causing bleeding diathesis |
| 134820 | Dysfibrinogenemia, alpha type, causing recurrent thrombosis |
| 134820 | Amyloidosis, hereditary renal, 105200 |
| 134830 | Dysfibrinogenemia, beta type |
| 134850 | Dysfibrinogenemia, gamma type |
| 134850 | Hypofibrinogenemia, gamma type |
| 135600 | Ehlers-Danlos syndrome, type X |
| 135700 | Fibrosis of extraocular muscles, congenital, 1 |
| 135940 | Ichthyosis vulgaris, 146700 |
| 136132 | [Fish-odor syndrome], 602079 |
| 136530 | Male infertility, familial |
| 136836 | Fucosyltransferase-6 deficiency |
| 138030 | [Hyperproglucagonemia] |
| 138033 | Diabetes mellitus, type II |
| 138079 | Hyperinsulinism, familial, 602485 |
| 138079 | MODY, type 2, 125851 |
| 138130 | Hyperinsulinism-hyperammonemia syndrome |
| 138140 | Glucose transport defect, blood-brain barrier |
| 138190 | Diabetes mellitus, noninsulin-dependent |
| 138300 | Hemolytic anemia due to glutathione reductase deficiency |
| 138320 | Hemolytic anemia due to glutathione peroxidase deficiency |
| 138700 | [Apolipoprotein H deficiency] |
| 138720 | Bernard-Soulier syndrome, type B |
| 138981 | Pulmonary alveolar proteinosis, 265120 |
| 139250 | Isolated growth hormone deficiency, Illig type with absent GH and |
| | Kowarski type with bioinactive GH |
| 139350 | Epidermolytic hyperkeratosis, 113800 |
| 139350 | Keratoderma, palmoplantar, nonepidermolytic |
| 140100 | [Anhaptoglobinemia] |
| 140100 | [Hypohaptogloginemia] |
| 141900 | Methemoglobinemias, beta- |
| 141900 | Sickle cell anemia |
| 141900 | Thalassemias, beta- |
| 141900 | Erythremias, beta- |
| 141900 | HPFH, deletion type |
| 141900 | Heinz body anemias, beta- |
| 142000 | Thalassemia due to Hb Lepore |
| 142000 | Thalassemia, delta- |
| 142200 | HPFH, nondeletion type A |
| 142250 | HPFH, nondeletion type G |
| 142270 | Hereditary persistence of fetal hemoglobin |
| 142989 | Synpolydactyly, type II, 186000 |
| 143890 | Hyercholesterolemia, familial |
| 145001 | Hyperparathyroidism-jaw tumor syndrome |
| 145260 | Pseudohypoaldosteronism, type II |
| 145410 | Opitz G syndrome, type II |
| 145981 | Hypocalciuric hypercalcemia, type II |
| 146760 | [IgG receptor I, phagocytic, familial deficiency of] |
| 146790 | Lupus nephritis, susceptibility to |
| 147050 | Atopy |
| 147141 | Leukemia, acute lymphoblastic |
| 147200 | [Kappa light chain deficiency] |
| 147545 | Diabetes mellitus, noninsulin-dependent |
| 147670 | Rabson-Mendenhall syndrome |
| 147670 | Diabetes mellitus, insulin-resistant, with acanthosis nigricans |
| 147670 | Leprechaunism |
| 148040 | Epidermolysis bullosa simplex, Koebner, Dowling-Meara, and |
| | Weber-Cockayne types, 131900, 131760, 131800 |
| 148041 | Pachyonychia congenita, Jadassohn-Lewandowsky type, 167200 |
| 148043 | Meesmann corneal dystrophy, 122100 |
| 148070 | Liver disease, susceptibility to, from hepatotoxins or viruses |
| 148370 | Keratolytic winter erythema |
| 150000 | Exertional myoglobinuria due to deficiency of LDH-A |
| 150200 | [Placental lactogen deficiency] |
| 150210 | Lactoferrin-deficient neutrophils, 245480 |
| 150250 | Larsen syndrome, autosomal dominant |
| 150292 | Epidermolysis bullosa, Herlitz junctional type, 226700 |
| 151390 | Leukemia, acute T-cell |
| 151440 | Leukemia, T-cell acute lymphoblastoid |
| 151670 | Hepatic lipase deficiency |
| 152427 | Long QT syndrome-2 |
| 152445 | Vohwinkel syndrome, 124500 |
| 152445 | Erythrokeratoderma, progressive symmetric, 602036 |
| 153880 | Macular dystrophy, dominant cystoid |
| 154275 | Malignant hyperthermia susceptibility 2 |
| 154276 | Malignant hyperthermia susceptibility 3 |
| 154705 | Marfan syndrome, type II |
| 155600 | Malignant melanoma, cutaneous |
| 156232 | Mesomelic dysplasia, Kantaputra type |
| 157640 | PEO with mitochondrial DNA deletions, type 1 |
| 157655 | Lactic acidosis due to defect in iron-sulfur cluster of complex I |
| 157900 | Moebius syndrome |
| 159001 | Muscular dystrophy, limb-girdle, type 1B |
| 160900 | Myotonic dystrophy |
| 162100 | Neuralgic amyotrophy with predilection for brachial plexus |
| 162200 | Neurofibromatosis, type 1 |
| 162200 | Watson syndrome, 193520 |
| 164500 | Spinocerebellar ataxia-7 |
| 164731 | Ovarian carcinoma, 167000 |
| 164790 | Colorectal cancer |
| 164920 | Piebaldism |
| 164920 | Mast cell leukemia |
| 164920 | Mastocytosis with associated hematologic disorder |
| 164953 | Liposarcoma |
| 165240 | Pallister-Hall syndrome, 146510 |
| 165240 | Postaxial polydactyly type A1, 174200 |
| 165240 | Greig cephalopolysyndactyly syndrome, 175700 |
| 165320 | Hepatocellular carcinoma |
| 168468 | Metaphyseal chondrodysplasia, Murk Jansen type, 156400 |
| 168470 | Humoral hypercalcemia of malignancy |
| 169600 | Hailey-Hailey disease |
| 170500 | Myotonia congenita, atypical acetazolamide-responsive |
| 170500 | Paramyotonia congenita, 168300 |
| 170500 | Hyperkalemic periodic paralysis |
| 170650 | Periodontitis, juvenile |
| 171760 | Hypophosphatasia, adult, 146300 |
| 171760 | Hypophosphatasia, infantile, 241500 |
| 172400 | Hemolytic anemia due to glucosephosphate isomerase deficiency |
| 172400 | Hydrops fetalis, one form |
| 172490 | Phosphorylase kinase deficiency of liver and muscle, 261750 |
| 173360 | Thrombophilia due to excessive plasminogen activator inhibitor |
| 173360 | Hemorrhagic diathesis due to PAI1 deficiency |
| 173610 | Platelet alpha/delta storage pool deficiency |
| 173850 | Polio, susceptibility to |
| 173870 | Xeroderma pigmentosum |
| 173870 | Fanconi anemia |
| 174000 | Medullary cystic kidney disease, AD |
| 174900 | Polyposis, juvenile intestinal |
| 176730 | Diabetes mellitus, rare form |
| 176730 | Hyperproinsulinemia, familial |
| 176730 | MODY, one form |
| 176830 | Obesity, adrenal insufficiency, and red hair |
| 176830 | ACTH deficiency |
| 176960 | Pituitary tumor, invasive |
| 178300 | Ptosis, hereditary congenital, 1 |
| 178600 | Pulmonary hypertension, familial primary |
| 178640 | Pulmonary alveolar proteinosis, congenital, 265120 |
| 179615 | Reticulosis, familial histiocytic, 267700 |
| 179615 | Severe combined immunodeficiency, B cell-negative, 601457 |
| 179616 | Severe combined immunodeficiency, B cell-negative, 601457 |
| 179755 | Renal cell carcinoma, papillary, 1 |
| 180020 | Retinal cone dystrophy-1 |
| 180100 | Retinitis pigmentosa-1 |
| 180104 | Retinitis pigmentosa-9 |
| 180105 | Retinitis pigmentosa-10 |
| 180200 | Osteosarcoma, 259500 |
| 180200 | Pinealoma with bilateral retinoblastoma |
| 180200 | Retinoblastoma |
| 180200 | Bladder cancer, 109800 |
| 180297 | Anemia, hemolytic, Rh-null, suppressor type, 268150 |
| 180380 | Night blindness, congenital stationery, rhodopsin-related |
| 180380 | Retinitis pigmentosa, autosomal recessive |
| 180380 | Retinitis pigmentosa-4, autosomal dominant |
| 180385 | Leukemia, acute T-cell |
| 180860 | Russell-Silver syndrome |
| 180901 | Malignant hyperthermia susceptibility 1, 145600 |
| 180901 | Central core disease, 117000 |
| 181430 | Scapuloperoneal syndrome, myopathic type |
| 181600 | Sclerotylosis |
| 182138 | Anxiety-related personality traits |
| 182280 | Small-cell cancer of lung |
| 182600 | Spastic paraplegia-3A |
| 182601 | Spastic paraplegia-4 |
| 182860 | Pyropoikilocytosis |
| 182860 | Spherocytosis, recessive |
| 182860 | Elliptocytosis-2 |
| 185470 | Myopathy due to succinate dehydrogenase deficiency |
| 186860 | Leukemia/lymphoma, T-cell |
| 187040 | Leukemia-1, T-cell acute lymphoblastic |
| 188070 | Bleeding disorder due to defective thromboxane A2 receptor |
| 188450 | Goiter, adolescent multinodular |
| 188450 | Goiter, nonendemic, simple |
| 188450 | Hypothyroidism, hereditary congenital |
| 188826 | Sorsby fundus dystrophy, 136900 |
| 189800 | Preeclampsia/eclampsia |
| 190020 | Bladder cancer, 109800 |
| 190160 | Thyroid hormone resistance, 274300, 188570 |
| 190900 | Colorblindness, tritan |
| 191010 | Cardiomyopathy, familial hypertrophic, 3, 115196 |
| 191044 | Cardiomyopathy, familial hypertrophic |
| 191170 | Colorectal cancer, 114500 |
| 191170 | Li-Fraumeni syndrome |
| 191290 | Segawa syndrome, recessive |
| 191315 | Insensitivity to pain, congenital, with anhidrosis, 256800 |
| 192090 | Ovarian carcinoma |
| 192090 | Breast cancer, lobular |
| 192090 | Endometrial carcinoma |
| 192090 | Gastric cancer, familial, 137215 |
| 192340 | Diabetes insipidus, neurohypophyseal, 125700 |
| 192500 | Jervell and Lange-Nielsen syndrome, 220400 |
| 192500 | Long QT syndrome-1 |
| 193500 | Rhabdomyosarcoma, alveolar, 268220 |
| 193500 | Waardenburg syndrome, type I |
| 193500 | Waardenburg syndrome, type III, 148820 |
| 193500 | Craniofacial-deafness-hand syndrome, 122880 |
| 194070 | Wilms tumor, type 1 |
| 194070 | Denys-Drash syndrome |
| 194070 | Frasier syndrome, 136680 |
| 194071 | Wilms tumor, type 2 |
| 194071 | Adrenocortical carcinoma, hereditary, 202300 |
| 200990 | Acrocallosal syndrome |
| 201460 | Acyl-CoA dehydrogenase, long chain, deficiency of |
| 203300 | Hermansky-Pudlak syndrome |
| 203500 | Alkaptonuria |
| 203740 | Alpha-ketoglutarate dehydrogenase deficiency |
| 203800 | Alstrom syndrome |
| 204500 | Ceroid-lipofuscinosis, neuronal 2, classic late infantile |
| 205100 | Amyotrophic lateral sclerosis, juvenile |
| 207750 | Hyperlipoproteinemia, type Ib |
| 208250 | Jacobs syndrome |
| 211420 | Breast cancer, ductal |
| 212138 | Carnitine-acylcarnitine translocase deficiency |
| 214500 | Chediak-Higashi syndrome |
| 216900 | Achromatopsia |
| 219800 | Cystinosis, nephropathic |
| 221770 | Polycystic lipomembranous osteodysplasia with sclerosing |
| | leukencephalopathy |
| 222800 | Hemolytic anemia due to bisphosphoglycerate mutase deficiency |
| 224120 | Dyserythropoietic anemia, contenital, type I |
| 227646 | Fanconi anemia, type D |
| 229800 | [Fructosuria] |
| 230350 | Galactose epimerase deficiency |
| 230800 | Gaucher disease |
| 230800 | Gaucher disease with cardiovascular calcification |
| 231550 | Achalasia-addisonianism-alacrimia syndrome |
| 231670 | Glutaricaciduria, type I |
| 231680 | Glutaricaciduria, type IIA |
| 231950 | Glutathioninuria |
| 232050 | Propionicacidemia, type II or pccB type |
| 232300 | Glycogen storage disease II |
| 232800 | Glycogen storage disease VII |
| 233700 | Chronic granulomatous disease due to deficiency of NCF-1 |
| 234200 | Neurodegeneration with brain iron accumulation |
| 236730 | Urofacial syndrome |
| 237300 | Carbamoylphosphate synthetase I deficiency |
| 238600 | Chylomicronemia syndrome, familial |
| 238600 | Combined hyperlipemia, familial |
| 238600 | Hyperlipoproteinemia I |
| 238600 | Lipoprotein lipase deficiency |
| 239100 | Van Buchem disease |
| 239500 | Hyperprolinemia, type I |
| 240400 | Scurvy |
| 245200 | Krabbe disease |
| 245349 | Lacticacidemia due to PDX1 deficiency |
| 245900 | Norum disease |
| 245900 | Fish-eye disease |
| 246450 | HMG-CoA lyase deficiency |
| 246900 | Lipoamide dehydrogenase deficiency |
| 247640 | Leukemia, acute lymphoblastic |
| 248600 | Maple syrup urine disease, type Ia |
| 248611 | Maple syrup urine disease, type Ib |
| 249000 | Meckel syndrome |
| 249270 | Thiamine-responsive megaloblastic anemia |
| 251000 | Methylmalonicaciduria, mutase deficiency type |
| 251600 | Microphthalmia, autosomal recessive |
| 252900 | Sanfilippo syndrome, type A |
| 253250 | Mulibrey nanism |
| 254210 | Myasthenia gravis, familial infantile |
| 255800 | Schwartz-Jampel syndrome |
| 257200 | Niemann-Pick disease, type A |
| 257200 | Niemann-Pick disease, type B |
| 257220 | Niemann-Pick disease, type C |
| 257220 | Niemann-Pick disease, type D, 257250 |
| 258501 | 3-methylglutaconicaciduria, type III |
| 259700 | Osteopetrosis, recessive |
| 259770 | Osteoporosis-pseudoglioma syndrome |
| 259900 | Hyperoxaluria, primary, type 1 |
| 261510 | Pseudo-Zellweger syndrome |
| 261670 | Myopathy due to phosphoglycerate mutase deficiency |
| 262000 | Bjornstad syndrome |
| 263200 | Polycystic kidney disease, autosomal recessive |
| 264470 | Adrenoleukodystrophy, pseudoneonatal |
| 266200 | Anemia, hemolytic, due to PK deficiency |
| 266300 | [Hair color, red] |
| 270100 | Situs inversus viscerum |
| 271900 | Canavan disease |
| 275350 | Transcobalamin II deficiency |
| 276000 | Pancreatitis, hereditary, 167800 |
| 276000 | Trypsinogen deficiency |
| 276600 | Tyrosinemia, type II |
| 276700 | Tyrosinemia, type I |
| 276900 | Usher syndrome, type 1A |
| 276901 | Usher syndrome, type 2 |
| 276902 | Usher syndrome, type 3 |
| 277730 | Wernicke-Korsakoff syndrome, susceptibility to |
| 278250 | Wrinkly skin syndrome |
| 278700 | Xeroderma pigmentosum, group A |
| 300008 | Nephrolithiasis, type I, 310468 |
| 300008 | Proteinuria, low molecular weight, with hypercalciuric |
| | nephrocalcinosis |
| 300008 | Dent disease, 300009 |
| 300008 | Hypophosphatemia, type III |
| 300031 | Mental retardation, X-linked, FRAXF type |
| 300044 | Wernicke-Korsakoff syndrome, susceptibility to |
| 300046 | Mental retardation, X-linked 23, nonspecific |
| 300047 | Mental retardation, X-linked 20 |
| 300048 | Intestinal pseudoobstruction, neuronal, X-linked |
| 300049 | Nodular heterotopia, bilateral periventricular |
| 300049 | BPNH/MR syndrome |
| 300055 | Mental retardation with psychosis, pyramidal signs, and |
| | macroorchidism |
| 300088 | Epilepsy, female restricted, with mental retardation |
| 300100 | Adrenoleukodystrophy |
| 300100 | Adrenomyeloneuropathy |
| 300104 | Mental retardation, X-linked nonspecific, 309541 |
| 300123 | Mental retardation with isolated growth hormone deficiency |
| 300126 | Dyskeratosis congenita-1, 305000 |
| 300300 | XLA and isolated growth hormone deficiency, 307200 |
| 300300 | Agammaglobulinemia, type 1, X-linked |
| 301000 | Thrombocytopenia, X-linked, 313900 |
| 301000 | Wiskott-Aldrich syndrome |
| 301201 | Amelogenesis imperfecta-3, hypoplastic type |
| 301300 | Anemia, sideroblastic/hypochromic |
| 301500 | Fabry disease |
| 301590 | Anophthalmos-1 |
| 301830 | Arthrogryposis, X-linked (spinal muscular atrophy, infantile, X- |
| | linked) |
| 301835 | Arts syndrome |
| 301845 | Bazex syndrome |
| 301900 | Borjeson-Forssman-Lehmann syndrome |
| 302060 | Noncompaction of left ventricular myocardium, isolated |
| 302060 | Barth syndrome |
| 302060 | Cardiomyopathy, X-linked dilated, 300069 |
| 302060 | Endocardial fibroelastosis-2 |
| 302960 | Chondrodysplasia punctata, X-linked dominant |
| 303400 | Cleft palate, X-linked |
| 303630 | Alport syndrome, 301050 |
| 303630 | Leiomyomatosis-nephropathy syndrome, 308940 |
| 303631 | Leiomyomatosis, diffuse, with Alport syndrome |
| 303700 | Colorblindness, blue monochromatic |
| 303800 | Colorblindness, deutan |
| 303900 | Colorblindness, protan |
| 304340 | Mental retardation, X-linked, syndromic-5, with Dandy-Walker |
| | malformation, basal ganglia disease, and seizures |
| 304500 | Deafness, X-linked 2, perceptive congenital |
| 304700 | Mohr-Tranebjaerg syndrome |
| 304700 | Deafness, X-linked 1, progressive |
| 304700 | Jensen syndrome, 311150 |
| 304800 | Diabetes insipidus, nephrogenic |
| 305400 | Aarskog-Scott syndrome |
| 305450 | FG syndrome |
| 305900 | Favism |
| 305900 | G6PD deficiency |
| 305900 | Hemolytic anemia due to G6PD deficiency |
| 306700 | Hemophilia A |
| 306900 | Hemophilia B |
| 306995 | [Homosexuality, male] |
| 307150 | Hypertrichosis, congenital generalized |
| 307700 | Hypoparathyroidism, X-linked |
| 308000 | HPRT-related gout |
| 308000 | Lesch-Nyhan syndrome |
| 308300 | Incontinentia pigmenti, sporadic type |
| 308310 | Incontinentia pigmenti, familial |
| 308840 | Spastic paraplegia, 312900 |
| 308840 | Hydrocephalus due to aqueductal stenosis, 307000 |
| 308840 | MASA syndrome, 303350 |
| 309000 | Lowe syndrome |
| 309200 | Manic-depressive illness, X-linked |
| 309300 | Megalocornea, X-linked |
| 309470 | Mental retardation, X-linked, syndromic-3, with spastic diplegia |
| 309500 | Renpenning syndrome-1 |
| 309548 | Mental retardation, X-linked, FRAXE type |
| 309605 | Mental retardation, X-linked, syndromic-4, with congenital |
| | contractures and low fingertip arches |
| 309610 | Mental retardation, X-linked, syndromic-2, with dysmorphism and |
| | cerebral atrophy |
| 309620 | Mental retardation-skeletal dysplasia |
| 309900 | Mucopolysaccharidosis II |
| 310300 | Emery-Dreifuss muscular dystrophy |
| 310400 | Myotubular myopathy, X-linked |
| 310460 | Myopia-1 |
| 310460 | Bornholm eye disease |
| 310490 | Cowchock syndrome |
| 311050 | Optic atrophy, X-linked |
| 311300 | Otopalatodigital syndrome, type I |
| 311510 | Waisman parkinsonism-mental retardation syndrome |
| 311850 | Phosphoribosyl pyrophosphate synthetase-related gout |
| 312080 | Pelizaeus-Merzbacher disease |
| 312080 | Spastic paraplegia-2, 312920 |
| 313850 | Thoracoabdominal syndrome |
| 314300 | Goeminne TKCR syndrome |
| 314400 | Cardiac valvular dysplasia-1 |
| 600040 | Colorectal cancer |
| 600045 | Xeroderma pigmentosum, group E, subtype 2 |
| 600079 | Colon cancer |
| 600101 | Deafness, autosomal dominant 2 |
| 600105 | Retinitis pigmentosa-12, autosomal recessive |
| 600138 | Retinitis pigmentosa-11 |
| 600143 | Epilepsy, progressive, with mental retardation |
| 600160 | Melanoma, 155601 |
| 600163 | Long QT syndrome-3 |
| 600179 | Leber congenital amaurosis, type I, 204000 |
| 600185 | Pancreatic cancer |
| 600185 | Breast cancer 2, early onset |
| 600194 | Ichthyosis bullosa of Siemens, 146800 |
| 600211 | Cleidocranial dysplasia, 119600 |
| 600221 | Venous malformations, multiple cutaneous and mucosal, 600195 |
| 600223 | Spinocerebellar ataxia-4 |
| 600231 | Palmoplantar keratoderma, Bothnia type |
| 600258 | Colorectal cancer, hereditary nonpolyposis, type 3 |
| 600266 | Resistance/susceptibility to TB, etc. |
| 600276 | Cerebral arteriopathy with subcortical infarcts and |
| | leukoencephalopathy, 125310 |
| 600281 | Non-insulin-dependent diabetes mellitus, 125853 |
| 600281 | MODY, type 1, 125850 |
| 600320 | Insulin-dependent diabetes mellitus-5 |
| 600332 | Rippling muscle disease-1 |
| 600510 | Pigment dispersion syndrome |
| 600512 | Epilepsy, partial |
| 600536 | Myopathy, congenital |
| 600631 | Enuresis, nocturnal, 1 |
| 600650 | Myopathy due to CPT II deficiency, 255110 |
| 600650 | CPT deficiency, hepatic, type II, 600649 |
| 600698 | Salivary adenoma |
| 600698 | Uterine leiomyoma |
| 600698 | Lipoma |
| 600698 | Lipomatosis, mutiple, 151900 |
| 600701 | Lipoma |
| 600722 | Ceroid lipofuscinosis, neuronal, variant juvenile type, with granular |
| | osmiophilic deposits |
| 600722 | Ceroid lipofuscinosis, neuronal-1, infantile, 256730 |
| 600759 | Alzheimer disease-4 |
| 600808 | Enuresis, nocturnal, 2 |
| 600839 | Bartter syndrome, 241200 |
| 600850 | Schizophrenia disorder-4 |
| 600856 | Beckwith-Wiedemann syndrome, 130650 |
| 600881 | Cataract, congenital, zonular, with sutural opacities |
| 600882 | Charcot-Marie-Tooth neuropathy-2B |
| 600883 | Diabetes mellitus, insulin-dependent, 8 |
| 600897 | Cataract, zonular pulverulent-1, 116200 |
| 600900 | Muscular dystrophy, limb-girdle, type 2E |
| 600918 | Cystinuria, type III |
| 600956 | Persistent Mullerian duct syndrome, type II, 261550 |
| 600957 | Persistent Mullerian duct syndrome, type I, 261550 |
| 600968 | Gitelman syndrome, 263800 |
| 600971 | Deafness, autosomal recessive 6 |
| 600977 | Cone dystrophy, progressive |
| 600995 | Nephrotic syndrome, idiopathic, steroid-resistant |
| 600996 | Arrhythmogenic right ventricular dysplasia-2 |
| 601105 | Pycnodysostosis, 265800 |
| 601154 | Cardiomyopathy, dilated, 1E |
| 601199 | Neonatal hyperparathyroidism, 239200 |
| 601199 | Hypocalcemia, autosomal dominant, 601198 |
| 601199 | Hypocalciuric hypercalcemia, type I, 145980 |
| 601202 | Cataract, anterior polar-2 |
| 601208 | Insulin-dependent diabetes mellitus-11 |
| 601226 | Progressive external ophthalmoplegia, type 2 |
| 601238 | Cerebellar ataxia, Cayman type |
| 601277 | Ichthyosis, lamellar, type 2 |
| 601284 | Hereditary hemorrhagic telangiectasia-2, 600376 |
| 601318 | Diabetes mellitus, insulin-dependent, 13 |
| 601385 | Prostate cancer |
| 601412 | Deafness, autosomal dominant 7 |
| 601414 | Retinitis pigmentosa-18 |
| 601458 | Inflammatory bowel disease-2 |
| 601471 | Moebius syndrome-2 |
| 601606 | Trichoepithelioma, multiple familial |
| 601649 | Blepharophimosis, epicanthus inversus, and ptosis, type 2 |
| 601650 | Paraganglioma, familial nonchromaffin, 2 |
| 601652 | Glaucoma 1A, primary open angle, juvenile-onset, 137750 |
| 601669 | Hirschsprung disease, one form |
| 601680 | Distal arthrogryposis, type 2B |
| 601682 | Glaucoma 1C, primary open angle |
| 601690 | Platelet-activating factor acetylhydrolase deficiency |
| 601691 | Retinitis pigmentosa-19, 601718 |
| 601691 | Stargardt disease-1, 248200 |
| 601691 | Cone-rod dystrophy 3 |
| 601691 | Fundus flavimaculatus with macular dystrophy, 248200 |
| 601718 | Retinitis pigmentosa-19 |
| 601728 | Bannayan-Zonana syndrome, 153480 |
| 601728 | Cowden disease, 158350 |
| 601728 | Endometrial carcinoma |
| 601728 | Lhermitte-Duclos syndrome |
| 601744 | Systemic lupus erythematosus, susceptibility to, 1 |
| 601769 | Osteoporosis, involutional |
| 601769 | Rickets, vitamin D-resistant, 277440 |
| 601777 | Cone dystrophy, progressive |
| 601780 | Ceroid-lipofuscinosis, neuronal-6, variant late infantile |
| 601843 | Hypothyroidism, congenital, 274400 |
| 601846 | Muscular dystrophy with rimmed vacuoles |
| 601863 | Bare lymphocyte syndrome, complementation group C |
| 601884 | [High bone mass] |
| 601928 | Monilethrix, 158000 |
| 601954 | Muscular dystrophy, limb-girdle, type 2G |
| 601975 | Ectodermal dysplasia/skin fragility syndrome |
| 601990 | Neuroblastoma |
| 602023 | Bartter syndrome, type 3 |
| 602025 | Obesity/hyperinsulinism, susceptibility to |
| 602088 | Nephronophthisis, infantile |
| 602094 | Lipodystrophy, familial partial |
| 602096 | Alzheimer disease-5 |
| 602099 | Amytrophic lateral sclerosis-5 |
| 602116 | Glioma |
| 602134 | Tremor, familial essential, 2 |
| 602136 | Refsum disease, infantile, 266510 |
| 602136 | Zellweger syndrome-1, 214100 |
| 602136 | Adrenoleukodystrophy, neonatal, 202370 |
| 602153 | Monilethrix, 158000 |
| 602216 | Peutz-Jeghers syndrome, 175200 |
| 602403 | Alzheimer disease, susceptibility to |
| 602447 | Coronary artery disease, susceptibility to |
| 602477 | Febrile convulsions, familial, 2 |
| 602491 | Hyperlipidemia, familial combined, 1 |
| 602544 | Parkinson disease, juvenile, type 2, 600116 |
| 602568 | Homocystinuria-megaloblastic anemia, cbl E type, 236270 |
| 602574 | Deafness, autosomal dominant 12, 601842 |
| 602574 | Deafness, autosomal dominant 8, 601543 |
| 602629 | Dystonia-6, torsion |
| 602631 | Rhabdomyosarcoma, 268210 |
| 602631 | Breast Cancer |
| 602716 | Nephrosis-1, congenital, Finnish type, 256300 |
| 602771 | Muscular dystrophy, congenital, with early spine rigidity |

[0154] Mature Polypeptides

[0155] The present invention also encompasses mature forms of a polypeptide having the amino acid sequence of SEQ ID NO:Y and/or the amino acid sequence encoded by the cDNA in a deposited clone. Polynucleotides encoding the mature forms (such as, for example, the polynucleotide sequence in SEQ ID NO:X and/or the polynucleotide sequence contained in the cDNA of a deposited clone) are also encompassed by the invention. Moreover, fragments or variants of these polypeptides (such as, fragments as described herein, polypeptides at least 80%, 85%, 90%, 95%, 96%, 97%, 98%, 99%, or 100% identical to these polypeptides, or polypeptides encoded by a polynucleotide that hybridizes under stringent conditions to the complementary strand of the polynucleotide encoding these polypeptides) are also encompassed by the invention. In preferred embodiments, these fragments or variants retain one or more functional acitivities of the full-length or mature form of the polypeptide (e.g., biological activity (such as, for example, activity useful in detecting, preventing, diagnosing, prognosticating, treating, and/or ameliorating immune disorders), antigenicity (ability to bind, or compete with a polypeptide of the invention for binding, to an anti-polypeptide of the invention antibody), immunogenicity (ability to generate antibody which binds to a specific polypeptide of the invention), ability to form multimers with polypeptides of the invention, and ability to bind to a receptor or ligand for a polypeptide of the invention). Antibodies that bind the polypeptides of the invention, and polynucleotides encoding these polypeptides are also encompassed by the invention.

[0156] According to the signal hypothesis, proteins secreted by mammalian cells have a signal or secretary leader sequence that is cleaved from the mature protein once export of the growing protein chain across the rough endoplasmic reticulum has been initiated. Most mammalian cells and even insect cells cleave secreted proteins with the same specificity. However, in some cases, cleavage of a secreted protein is not entirely uniform, which results in two or more mature species of the protein. Further, it has long been known that cleavage specificity of a secreted protein is ultimately determined by the primary structure of the complete protein, that is, it is inherent in the amino acid sequence of the polypeptide.

[0157] Methods for predicting whether a protein has a signal sequence, as well as the cleavage point for that sequence, are available. For instance, the method of McGeoch, Virus Res. 3:271-286 (1985), uses the information from a short N-terminal charged region and a subsequent uncharged region of the complete (uncleaved) protein. The method of von Heinje, Nucleic Acids Res. 14:4683-4690 (1986) uses the information from the residues surrounding the cleavage site, typically residues −13 to +2, where +1 indicates the amino terminus of the secreted protein. The accuracy of predicting the cleavage points of known mammalian secretory proteins for each of these methods is in the range of 75-80%. (von Heinje, supra.) However, the two methods do not always produce the same predicted cleavage point(s) for a given protein.

[0158] In the present case, the deduced amino acid sequence of the secreted polypeptide was analyzed by a computer program called SignalP (Henrik Nielsen et al., Protein Engineering 10:1-6 (1997)), which predicts the cellular location of a protein based on the amino acid sequence. As part of this computational prediction of localization, the methods of McGeoch and von Heinje are incorporated. The analysis of the amino acid sequences of the secreted proteins described herein by this program provided the results shown in Table 1A.

[0159] In specific embodiments, polypeptides of the invention comprise, or alternatively consist of, the predicted mature form of the polypeptide as delineated in columns 14 and 15 of Table 1A. Moreover, fragments or variants of these polypeptides (such as, fragments as described herein, polypeptides at least 80%, 85%, 90%, 95%, 96%, 97%, 98%, 99%, or 100% identical to these polypeptides, or polypeptides encoded by a polynucleotide that hybridizes under stringent conditions to the complementary strand of the polynucleotide encoding these polypeptides) are also encompassed by the invention. In preferred embodiments, these fragments or variants retain one or more functional acitivities of the full-length or mature form of the polypeptide (e.g., biological activity (such as, for example, activity useful in detecting, preventing, diagnosing, prognosticating, treating, and/or ameliorating immune disorders), antigenicity (ability to bind, or compete with a polypeptide of the invention for binding, to an anti-polypeptide of the invention antibody), immunogenicity (ability to generate antibody which binds to a specific polypeptide of the invention), ability to form multimers with polypeptides of the invention, and ability to bind to a receptor or ligand for a polypeptide of the invention). Antibodies that bind the polypeptides of the invention, and polynucleotides encoding these polypeptides are also encompassed by the invention.

[0160] Polynucleotides encoding proteins comprising, or consisting of, the predicted mature form of polypeptides of the invention (e.g., polynucleotides having the sequence of SEQ ID NO: X (Table 1A, column 4), the sequence delineated in columns 7 and 8 of Table 1A, and a sequence encoding the mature polypeptide delineated in columns 14 and 15 of Table 1A (e.g., the sequence of SEQ ID NO:X encoding the mature polypeptide delineated in columns 14 and 15 of Table 1)) are also encompassed by the invention, as are fragments or variants of these polynucleotides (such as, fragments as described herein, polynucleotides at least 80%, 85%, 90%, 95%, 96%, 97%, 98%, 99%, or 100% identical to these polyncueotides, and nucleic acids which hybridizes under stringent conditions to the complementary strand of the polynucleotide).

[0161] As one of ordinary skill would appreciate, however, cleavage sites sometimes vary from organism to organism and cannot be predicted with absolute certainty. Accordingly, the present invention provides secreted polypeptides having a sequence shown in SEQ ID NO:Y which have an N-terminus beginning within 15 residues of the predicted cleavage point (i.e., having 1, 2, 3, 4, 5, 6, 7, 8, 9, 10, 11, 12, 13, 14, or 15 more or less contiguous residues of SEQ ID NO:Y at the N-terminus when compared to the predicted mature form of the polypeptide (e.g., the mature polypeptide delineated in columns 14 and 15 of Table 1). Similarly, it is also recognized that in some cases, cleavage of the signal sequence from a secreted protein is not entirely uniform, resulting in more than one secreted species. These polypeptides, and the polynucleotides encoding such polypeptides, are contemplated by the present invention.

[0162] Moreover, the signal sequence identified by the above analysis may not necessarily predict the naturally occurring signal sequence. For example, the naturally occurring signal sequence may be further upstream from the predicted signal sequence. However, it is likely that the predicted signal sequence will be capable of directing the secreted protein to the ER. Nonetheless, the present invention provides the mature protein produced by expression of the polynucleotide sequence of SEQ ID NO:X and/or the polynucleotide sequence contained in the cDNA of a deposited clone, in a mammalian cell (e.g., COS cells, as desribed below). These polypeptides, and the polynucleotides encoding such polypeptides, are contemplated by the present invention.

Polynucleotide and Polypeptide Variants

[0163] The present invention is also directed to variants of the polynucleotide sequence disclosed in SEQ ID NO:X or the complementary strand thereto, nucleotide sequences encoding the polypeptide of SEQ ID NO:Y, the nucleotide sequence of SEQ ID NO:X that encodes the polypeptide sequence as defined in columns 13 and 14 of Table 1A, nucleotide sequences encoding the polypeptide sequence as defined in columns 13 and 14 of Table 1A, the nucleotide sequence of SEQ ID NO:X encoding the polypeptide sequence as defined in Table 1B, nucleotide sequences encoding the polypeptide as defined in Table 1B, the nucleotide sequence as defined in columns 8 and 9 of Table 2, nucleotide sequences encoding the polypeptide encoded by the nucleotide sequence as defined in columns 8 and 9 of Table 2, the nucleotide sequence as defined in column 6 of Table 1C, nucleotide sequences encoding the polypeptide encoded by the nucleotide sequence as defined in column 6 of Table 1C, the cDNA sequence contained in ATCC Deposit No:Z, nucleotide sequences encoding the polypeptide encoded by the cDNA sequence contained in ATCC Deposit No:Z, and/or nucleotide sequences encoding a mature (secreted) polypeptide encoded by the cDNA sequence contained in ATCC Deposit No:Z.

[0164] The present invention also encompasses variants of the polypeptide sequence disclosed in SEQ ID NO:Y, the polypeptide as defined in columns 13 and 14 of Table 1A, the polypeptide sequence as defined in Table 1B, a polypeptide sequence encoded by the polynucleotide sequence in SEQ ID NO:X, a polypeptide sequence encoded by the nucleotide sequence as defined in columns 8 and 9 of Table 2, a polypeptide sequence encoded by the nucleotide sequence as defined in column 6 of Table 1C, a polypeptide sequence encoded by the complement of the polynucleotide sequence in SEQ ID NO:X, the polypeptide sequence encoded by the cDNA sequence contained in ATCC Deposit No:Z and/or a mature (secreted) polypeptide encoded by the cDNA sequence contained in ATCC Deposit No:Z.

[0165] “Variant” refers to a polynucleotide or polypeptide differing from the polynucleotide or polypeptide of the present invention, but retaining essential properties thereof. Generally, variants are overall closely similar, and, in many regions, identical to the polynucleotide or polypeptide of the present invention.

[0166] Thus, one aspect of the invention provides an isolated nucleic acid molecule comprising, or alternatively consisting of, a polynucleotide having a nucleotide sequence selected from the group consisting of: (a) a nucleotide sequence described in SEQ ID NO:X or contained in the cDNA sequence of ATCC Deposit No:Z; (b) a nucleotide sequence in SEQ ID NO:X or the cDNA in ATCC Deposit No:Z which encodes the complete amino acid sequence of SEQ ID NO:Y or the complete amino acid sequence encoded by the cDNA in ATCC Deposit No:Z; (c) a nucleotide sequence in SEQ ID NO:X or the cDNA in ATCC Deposit No:Z which encodes a mature polypeptide (i.e., a secreted polypeptide (e.g., as delineated in columns 14 and 15 of Table 1A)); (d) a nucleotide sequence in SEQ ID NO:X or the cDNA sequence of ATCC Deposit No:Z, which encodes a biologically active fragment of a polypeptide; (e) a nucleotide sequence in SEQ ID NO:X or the cDNA sequence of ATCC Deposit No:Z, which encodes an antigenic fragment of a polypeptide; (f) a nucleotide sequence encoding a polypeptide comprising the complete amino acid sequence of SEQ ID NO:Y or the complete amino acid sequence encoded by the cDNA in ATCC Deposit No:Z; (g) a nucleotide sequence encoding a mature polypeptide of the amino acid sequence of SEQ ID NO:Y (i.e., a secreted polypeptide (e.g., as delineated in columns 14 and 15 of Table 1A)) or a mature polypeptide of the amino acid sequence encoded by the cDNA in ATCC Deposit No:Z; (h) a nucleotide sequence encoding a biologically active fragment of a polypeptide having the complete amino acid sequence of SEQ ID NO:Y or the complete amino acid sequence encoded by the cDNA in ATCC Deposit No:Z; (i) a nucleotide sequence encoding an antigenic fragment of a polypeptide having the complete amino acid sequence of SEQ ID NO:Y or the complete amino acid sequence encoded by the cDNA in ATCC Deposit No:Z; and (j) a nucleotide sequence complementary to any of the nucleotide sequences in (a), (b), (c), (d), (e), (f), (g), (h), or (i) above.

[0167] The present invention is also directed to nucleic acid molecules which comprise, or alternatively consist of, a nucleotide sequence which is at least 80%, 85%, 90%, 95%, 96%, 97%, 98%, 99% or 100%, identical to, for example, any of the nucleotide sequences in (a), (b), (c), (d), (e), (f), (g), (h), (i), or (j) above, the nucleotide coding sequence in SEQ ID NO:X or the complementary strand thereto, the nucleotide coding sequence of the cDNA contained in ATCC Deposit No:Z or the complementary strand thereto, a nucleotide sequence encoding the polypeptide of SEQ ID NO:Y, a nucleotide sequence encoding a polypeptide sequence encoded by the nucleotide sequence in SEQ ID NO:X, a polypeptide sequence encoded by the complement of the polynucleotide sequence in SEQ ID NO:X, a nucleotide sequence encoding the polypeptide encoded by the cDNA contained in ATCC Deposit No:Z, the nucleotide coding sequence in SEQ ID NO:X as defined in columns 8 and 9 of Table 2 or the complementary strand thereto, a nucleotide sequence encoding the polypeptide encoded by the nucleotide sequence in SEQ ID NO:X as defined in columns 8 and 9 of Table 2 or the complementary strand thereto, the nucleotide coding sequence in SEQ ID NO:B as defined in column 6 of Table 1C or the complementary strand thereto, a nucleotide sequence encoding the polypeptide encoded by the nucleotide sequence in SEQ ID NO:B as defined in column 6 of Table 1C or the complementary strand thereto, the nucleotide sequence in SEQ ID NO:X encoding the polypeptide sequence as defined in Table 1B or the complementary strand thereto, nucleotide sequences encoding the polypeptide as defined in Table 1B or the complementary strand thereto, and/or polynucleotide fragments of any of these nucleic acid molecules (e.g., those fragments described herein). Polynucleotides which hybridize to the complement of these nucleic acid molecules under stringent hybridization conditions or alternatively, under lower stringency conditions, are also encompassed by the invention, as are polypeptides encoded by these polynucleotides and nucleic acids.

[0168] In a preferred embodiment, the invention encompasses nucleic acid molecules which comprise, or alternatively, consist of a polynucleotide which hybridizes under stringent hybridization conditions, or alternatively, under lower stringency conditions, to a polynucleotide in (a), (b), (c), (d), (e), (f), (g), (h), or (i), above, as are polypeptides encoded by these polynucleotides. In another preferred embodiment, polynucleotides which hybridize to the complement of these nucleic acid molecules under stringent hybridization conditions, or alternatively, under lower stringency conditions, are also encompassed by the invention, as are polypeptides encoded by these polynucleotides.

[0169] In another embodiment, the invention provides a purified protein comprising, or alternatively consisting of, a polypeptide having an amino acid sequence selected from the group consisting of: (a) the complete amino acid sequence of SEQ ID NO:Y or the complete amino acid sequence encoded by the cDNA in ATCC Deposit No:Z; (b) the amino acid sequence of a mature (secreted) form of a polypeptide having the amino acid sequence of SEQ ID NO:Y (e.g., as delineated in columns 14 and 15 of Table 1A) or a mature form of the amino acid sequence encoded by the cDNA in ATCC Deposit No:Z mature; (c) the amino acid sequence of a biologically active fragment of a polypeptide having the complete amino acid sequence of SEQ ID NO:Y or the complete amino acid sequence encoded by the cDNA in ATCC Deposit No:Z; and

[0170] (d) the amino acid sequence of an antigenic fragment of a polypeptide having the complete amino acid sequence of SEQ ID NO:Y or the complete amino acid sequence encoded by the cDNA in ATCC Deposit No:Z.

[0171] The present invention is also directed to proteins which comprise, or alternatively consist of, an amino acid sequence which is at least 80%, 85%, 90%, 95%, 96%, 97%, 98%, 99% or 100%, identical to, for example, any of the amino acid sequences in (a), (b), (c), or (d), above, the amino acid sequence shown in SEQ ID NO:Y, the amino acid sequence encoded by the cDNA contained in ATCC Deposit No:Z, the amino acid sequence of the polypeptide encoded by the nucleotide sequence in SEQ ID NO:X as defined in columns 8 and 9 of Table 2, the amino acid sequence of the polypeptide encoded by the nucleotide sequence in SEQ ID NO:B as defined in column 6 of Table 1C, the amino acid sequence as defined in Table 1B, an amino acid sequence encoded by the nucleotide sequence in SEQ ID NO:X, and an amino acid sequence encoded by the complement of the polynucleotide sequence in SEQ ID NO:X. Fragments of these polypeptides are also provided (e.g., those fragments described herein). Further proteins encoded by polynucleotides which hybridize to the complement of the nucleic acid molecules encoding these amino acid sequences under stringent hybridization conditions or alternatively, under lower stringency conditions, are also encompassed by the invention, as are the polynucleotides encoding these proteins.

[0172] By a nucleic acid having a nucleotide sequence at least, for example, 95% “identical” to a reference nucleotide sequence of the present invention, it is intended that the nucleotide sequence of the nucleic acid is identical to the reference sequence except that the nucleotide sequence may include up to five point mutations per each 100 nucleotides of the reference nucleotide sequence encoding the polypeptide. In other words, to obtain a nucleic acid having a nucleotide sequence at least 95% identical to a reference nucleotide sequence, up to 5% of the nucleotides in the reference sequence may be deleted or substituted with another nucleotide, or a number of nucleotides up to 5% of the total nucleotides in the reference sequence may be inserted into the reference sequence. The query sequence may be an entire sequence referred to in Table 1B or 2 as the ORF (open reading frame), or any fragment specified as described herein.

[0173] As a practical matter, whether any particular nucleic acid molecule or polypeptide is at least 80%, 85%, 90%, 95%, 96%, 97%, 98% or 99% identical to a nucleotide sequence of the present invention can be determined conventionally using known computer programs. A preferred method for determining the best overall match between a query sequence (a sequence of the present invention) and a subject sequence, also referred to as a global sequence alignment, can be determined using the FASTDB computer program based on the algorithm of Brutlag et al. (Comp. App. Biosci. 6:237-245 (1990)). In a sequence alignment the query and subject sequences are both DNA sequences. An RNA sequence can be compared by converting U's to T's. The result of said global sequence alignment is expressed as percent identity. Preferred parameters used in a FASTDB alignment of DNA sequences to calculate percent identity are: Matrix=Unitary, k-tuple=4, Mismatch Penalty=1, Joining Penalty=30, Randomization Group Length=0, Cutoff Score=1, Gap Penalty=5, Gap Size Penalty 0.05, Window Size=500 or the length of the subject nucleotide sequence, whichever is shorter.

[0174] If the subject sequence is shorter than the query sequence because of 5′ or 3′ deletions, not because of internal deletions, a manual correction must be made to the results. This is because the FASTDB program does not account for 5′ and 3′ truncations of the subject sequence when calculating percent identity. For subject sequences truncated at the 5′ or 3′ ends, relative to the query sequence, the percent identity is corrected by calculating the number of bases of the query sequence that are 5′ and 3′ of the subject sequence, which are not matched/aligned, as a percent of the total bases of the query sequence. Whether a nucleotide is matched/aligned is determined by results of the FASTDB sequence alignment. This percentage is then subtracted from the percent identity, calculated by the above FASTDB program using the specified parameters, to arrive at a final percent identity score. This corrected score is what is used for the purposes of the present invention. Only bases outside the 5′ and 3′ bases of the subject sequence, as displayed by the FASTDB alignment, which are not matched/aligned with the query sequence, are calculated for the purposes of manually adjusting the percent identity score.

[0175] For example, a 90 base subject sequence is aligned to a 100 base query sequence to determine percent identity. The deletions occur at the 5′ end of the subject sequence and therefore, the FASTDB alignment does not show a matched/alignment of the first 10 bases at 5′ end. The 10 unpaired bases represent 10% of the sequence (number of bases at the 5′ and 3′ ends not matched/total number of bases in the query sequence) so 10% is subtracted from the percent identity score calculated by the FASTDB program. If the remaining 90 bases were perfectly matched the final percent identity would be 90%. In another example, a 90 base subject sequence is compared with a 100 base query sequence. This time the deletions are internal deletions so that there are no bases on the 5′ or 3′ of the subject sequence which are not matched/aligned with the query. In this case the percent identity calculated by FASTDB is not manually corrected. Once again, only bases 5′ and 3′ of the subject sequence which are not matched/aligned with the query sequence are manually corrected for. No other manual corrections are to be made for the purposes of the present invention.

[0176] By a polypeptide having an amino acid sequence at least, for example, 95% “identical” to a query amino acid sequence of the present invention, it is intended that the amino acid sequence of the subject polypeptide is identical to the query sequence except that the subject polypeptide sequence may include up to five amino acid alterations per each 100 amino acids of the query amino acid sequence. In other words, to obtain a polypeptide having an amino acid sequence at least 95% identical to a query amino acid sequence, up to 5% of the amino acid residues in the subject sequence may be inserted, deleted, (indels) or substituted with another amino acid. These alterations of the reference sequence may occur at the amino or carboxy terminal positions of the reference amino acid sequence or anywhere between those terminal positions, interspersed either individually among residues in the reference sequence or in one or more contiguous groups within the reference sequence.

[0177] As a practical matter, whether any particular polypeptide is at least 80%, 85%, 90%, 95%, 96%, 97%, 98% or 99% identical to, for instance, the amino acid sequence of a polypeptide referred to in Table 1A (e.g., the amino acid sequence delineated in columns 14 and 15) or a fragment thereof, Table 1B (e.g., the amino acid sequence identified in column 6) or a fragment thereof, Table 2 (e.g., the amino acid sequence of the polypeptide encoded by the polynucleotide sequence defined in columns 8 and 9 of Table 2) or a fragment thereof, the amino acid sequence of the polypeptide encoded by the polynucleotide sequence in SEQ ID NO:B as defined in column 6 of Table 1C or a fragment thereof, the amino acid sequence of the polypeptide encoded by the nucleotide sequence in SEQ ID NO:X or a fragment thereof, or the amino acid sequence of the polypeptide encoded by cDNA contained in ATCC Deposit No:Z, or a fragment thereof, the amino acid sequence of a mature (secreted) polypeptide encoded by cDNA contained in ATCC Deposit No:Z, or a fragment thereof, can be determined conventionally using known computer programs. A preferred method for determining the best overall match between a query sequence (a sequence of the present invention) and a subject sequence, also referred to as a global sequence alignment, can be determined using the FASTDB computer program based on the algorithm of Brutlag et al. (Comp. App. Biosci. 6:237-245 (1990)). In a sequence alignment the query and subject sequences are either both nucleotide sequences or both amino acid sequences. The result of said global sequence alignment is expressed as percent identity. Preferred parameters used in a FASTDB amino acid alignment are: Matrix=PAM 0, k-tuple=2, Mismatch Penalty=1, Joining Penalty=20, Randomization Group Length=0, Cutoff Score=1, Window Size=sequence length, Gap Penalty=5, Gap Size Penalty=0.05, Window Size=500 or the length of the subject amino acid sequence, whichever is shorter.

[0178] If the subject sequence is shorter than the query sequence due to N- or C-terminal deletions, not because of internal deletions, a manual correction must be made to the results. This is because the FASTDB program does not account for N- and C-terminal truncations of the subject sequence when calculating global percent identity. For subject sequences truncated at the N- and C-termini, relative to the query sequence, the percent identity is corrected by calculating the number of residues of the query sequence that are N- and C-terminal of the subject sequence, which are not matched/aligned with a corresponding subject residue, as a percent of the total bases of the query sequence. Whether a residue is matched/aligned is determined by results of the FASTDB sequence alignment. This percentage is then subtracted from the percent identity, calculated by the above FASTDB program using the specified parameters, to arrive at a final percent identity score. This final percent identity score is what is used for the purposes of the present invention. Only residues to the N- and C-termini of the subject sequence, which are not matched/aligned with the query sequence, are considered for the purposes of manually adjusting the percent identity score. That is, only query residue positions outside the farthest N- and C-terminal residues of the subject sequence.

[0179] For example, a 90 amino acid residue subject sequence is aligned with a 100 residue query sequence to determine percent identity. The deletion occurs at the N-terminus of the subject sequence and therefore, the FASTDB alignment does not show a matching/alignment of the first 10 residues at the N-terminus. The 10 unpaired residues represent 10% of the sequence (number of residues at the N- and C-termini not matched/total number of residues in the query sequence) so 10% is subtracted from the percent identity score calculated by the FASTDB program. If the remaining 90 residues were perfectly matched the final percent identity would be 90%. In another example, a 90 residue subject sequence is compared with a 100 residue query sequence. This time the deletions are internal deletions so there are no residues at the N- or C-termini of the subject sequence which are not matched/aligned with the query. In this case the percent identity calculated by FASTDB is not manually corrected. Once again, only residue positions outside the N- and C-terminal ends of the subject sequence, as displayed in the FASTDB alignment, which are not matched/aligned with the query sequnce are manually corrected for. No other manual corrections are to made for the purposes of the present invention.

[0180] The polynucleotide variants of the invention may contain alterations in the coding regions, non-coding regions, or both. Especially preferred are polynucleotide variants containing alterations which produce silent substitutions, additions, or deletions, but do not alter the properties or activities of the encoded polypeptide. Nucleotide variants produced by silent substitutions due to the degeneracy of the genetic code are preferred. Moreover, polypeptide variants in which less than 50, less than 40, less than 30, less than 20, less than 10, or 5-50, 5-25, 5-10, 1-5, or 1-2 amino acids are substituted, deleted, or added in any combination are also preferred. Polynucleotide variants can be produced for a variety of reasons, e.g., to optimize codon expression for a particular host (change codons in the human mRNA to those preferred by a bacterial host such as E. coli).

[0181] Naturally occurring variants are called “allelic variants,” and refer to one of several alternate forms of a gene occupying a given locus on a chromosome of an organism. (Genes II, Lewin, B., ed., John Wiley & Sons, New York (1985)). These allelic variants can vary at either the polynucleotide and/or polypeptide level and are included in the present invention. Alternatively, non-naturally occurring variants may be produced by mutagenesis techniques or by direct synthesis.

[0182] Using known methods of protein engineering and recombinant DNA technology, variants may be generated to improve or alter the characteristics of the polypeptides of the present invention. For instance, one or more amino acids can be deleted from the N-terminus or C-terminus of the polypeptide of the present invention without substantial loss of biological function. As an example, Ron et al. (J. Biol. Chem. 268: 2984-2988 (1993)) reported variant KGF proteins having heparin binding activity even after deleting 3, 8, or 27 amino-terminal amino acid residues. Similarly, Interferon gamma exhibited up to ten times higher activity after deleting 8-10 amino acid residues from the carboxy terminus of this protein. (Dobeli et al., J. Biotechnology 7:199-216 (1988).)

[0183] Moreover, ample evidence demonstrates that variants often retain a biological activity similar to that of the naturally occurring protein. For example, Gayle and coworkers (J. Biol. Chem. 268:22105-22111 (1993)) conducted extensive mutational analysis of human cytokine IL-1a. They used random mutagenesis to generate over 3,500 individual IL-1a mutants that averaged 2.5 amino acid changes per variant over the entire length of the molecule. Multiple mutations were examined at every possible amino acid position. The investigators found that “[m]ost of the molecule could be altered with little effect on either [binding or biological activity].” In fact, only 23 unique amino acid sequences, out of more than 3,500 nucleotide sequences examined, produced a protein that significantly differed in activity from wild-type.

[0184] Furthermore, even if deleting one or more amino acids from the N-terminus or C-terminus of a polypeptide results in modification or loss of one or more biological functions, other biological activities may still be retained. For example, the ability of a deletion variant to induce and/or to bind antibodies which recognize the secreted form will likely be retained when less than the majority of the residues of the secreted form are removed from the N-terminus or C-terminus. Whether a particular polypeptide lacking N- or C-terminal residues of a protein retains such immunogenic activities can readily be determined by routine methods described herein and otherwise known in the art.

[0185] Thus, the invention further includes polypeptide variants which show a biological or functional activity of the polypeptides of the invention (such as, for example, activity useful in detecting, preventing, diagnosing, prognosticating, treating, and/or ameliorating immune disorders). Such variants include deletions, insertions, inversions, repeats, and substitutions selected according to general rules known in the art so as have little effect on activity.

[0186] The present application is directed to nucleic acid molecules at least 80%, 85%, 90%, 95%, 96%, 97%, 98%, 99% or 100% identical to the nucleic acid sequences disclosed herein, (e.g., encoding a polypeptide having the amino acid sequence of an N and/or C terminal deletion), irrespective of whether they encode a polypeptide having functional activity. This is because even where a particular nucleic acid molecule does not encode a polypeptide having functional activity, one of skill in the art would still know how to use the nucleic acid molecule, for instance, as a hybridization probe or a polymerase chain reaction (PCR) primer. Uses of the nucleic acid molecules of the present invention that do not encode a polypeptide having functional activity include, inter alia, (1) isolating a gene or allelic or splice variants thereof in a cDNA library; (2) in situ hybridization (e.g., “FISH”) to metaphase chromosomal spreads to provide precise chromosomal location of the gene, as described in Verma et al., Human Chromosomes: A Manual of Basic Techniques, Pergamon Press, New York (1988); (3) Northern Blot analysis for detecting mRNA expression in specific tissues (e.g., normal or diseased tissues); and (4) in situ hybridization (e.g., histochemistry) for detecting mRNA expression in specific tissues (e.g., normal or diseased tissues).

[0187] Preferred, however, are nucleic acid molecules having sequences at least 80%, 85%, 90%, 95%, 96%, 97%, 98%, 99% or 100% identical to the nucleic acid sequences disclosed herein, which do, in fact, encode a polypeptide having functional activity. By a polypeptide having “functional activity” is meant, a polypeptide capable of displaying one or more known functional activities associated with a full-length (complete) protein and/or a mature (secreted) protein of the invention. Such functional activities include, but are not limited to, biological activity (such as, for example, activity useful in detecting, preventing, diagnosing, prognosticating, treating, and/or ameliorating immune diseases and disorders), antigenicity (ability to bind, or compete with a polypeptide of the invention for binding, to an anti-polypeptide of the invention antibody), immunogenicity (ability to generate antibody which binds to a specific polypeptide of the invention), ability to form multimers with polypeptides of the invention, and ability to bind to a receptor or ligand for a polypeptide of the invention.

[0188] The functional activity of the polypeptides, and fragments, variants and derivatives of the invention, can be assayed by various methods.

[0189] For example, in one embodiment where one is assaying for the ability to bind or compete with a full-length polypeptide of the present invention for binding to an anti-polypetide antibody, various immunoassays known in the art can be used, including but not limited to, competitive and non-competitive assay systems using techniques such as radioimmunoassays, ELISA (enzyme linked immunosorbent assay), “sandwich” immunoassays, immunoradiometric assays, gel diffusion precipitation reactions, immunodiffusion assays, in situ immunoassays (using colloidal gold, enzyme or radioisotope labels, for example), western blots, precipitation reactions, agglutination assays (e.g., gel agglutination assays, hemagglutination assays), complement fixation assays, immunofluorescence assays, protein A assays, and immunoelectrophoresis assays, etc. In one embodiment, antibody binding is detected by detecting a label on the primary antibody. In another embodiment, the primary antibody is detected by detecting binding of a secondary antibody or reagent to the primary antibody. In a further embodiment, the secondary antibody is labeled. Many means are known in the art for detecting binding in an immunoassay and are within the scope of the present invention.

[0190] In another embodiment, where a ligand is identified, or the ability of a polypeptide fragment, variant or derivative of the invention to multimerize is being evaluated, binding can be assayed, e.g., by means well-known in the art, such as, for example, reducing and non-reducing gel chromatography, protein affinity chromatography, and affinity blotting. See generally, Phizicky et al., Microbiol. Rev. 59:94-123 (1995). In another embodiment, the ability of physiological correlates of a polypeptide of the present invention to bind to a substrate(s) of the polypeptide of the invention can be routinely assayed using techniques known in the art.

[0191] In addition, assays described herein (see Examples) and otherwise known in the art may routinely be applied to measure the ability of polypeptides of the present invention and fragments, variants and derivatives thereof to elicit polypeptide related biological activity (either in vitro or in vivo). Other methods will be known to the skilled artisan and are within the scope of the invention.

[0192] Of course, due to the degeneracy of the genetic code, one of ordinary skill in the art will immediately recognize that a large number of the nucleic acid molecules having a sequence at least 80%, 85%, 90%, 95%, 96%, 97%, 98%, 99%, or 100% identical to, for example, the nucleic acid sequence of the cDNA contained in ATCC Deposit No:Z, the nucleic acid sequence referred to in Table 1B (SEQ ID NO:X), the nucleic acid sequence disclosed in Table 1A (e.g., the nucleic acid sequence delineated in columns 7 and 8), the nucleic acid sequence disclosed in Table 2 (e.g., the nucleic acid sequence delineated in columns 8 and 9) or fragments thereof, will encode polypeptides “having functional activity.” In fact, since degenerate variants of any of these nucleotide sequences all encode the same polypeptide, in many instances, this will be clear to the skilled artisan even without performing the above described comparison assay. It will be further recognized in the art that, for such nucleic acid molecules that are not degenerate variants, a reasonable number will also encode a polypeptide having functional activity. This is because the skilled artisan is fully aware of amino acid substitutions that are either less likely or not likely to significantly effect protein function (e.g., replacing one aliphatic amino acid with a second aliphatic amino acid), as further described below.

[0193] For example, guidance concerning how to make phenotypically silent amino acid substitutions is provided in Bowie et al., “Deciphering the Message in Protein Sequences: Tolerance to Amino Acid Substitutions,” Science 247:1306-1310 (1990), wherein the authors indicate that there are two main strategies for studying the tolerance of an amino acid sequence to change.

[0194] The first strategy exploits the tolerance of amino acid substitutions by natural selection during the process of evolution. By comparing amino acid sequences in different species, conserved amino acids can be identified. These conserved amino acids are likely important for protein function. In contrast, the amino acid positions where substitutions have been tolerated by natural selection indicates that these positions are not critical for protein function. Thus, positions tolerating amino acid substitution could be modified while still maintaining biological activity of the protein.

[0195] The second strategy uses genetic engineering to introduce amino acid changes at specific positions of a cloned gene to identify regions critical for protein function. For example, site directed mutagenesis or alanine-scanning mutagenesis (introduction of single alanine mutations at every residue in the molecule) can be used. See Cunningham and Wells, Science 244:1081-1085 (1989). The resulting mutant molecules can then be tested for biological activity.

[0196] As the authors state, these two strategies have revealed that proteins are surprisingly tolerant of amino acid substitutions. The authors further indicate which amino acid changes are likely to be permissive at certain amino acid positions in the protein. For example, most buried (within the tertiary structure of the protein) amino acid residues require nonpolar side chains, whereas few features of surface side chains are generally conserved. Moreover, tolerated conservative amino acid substitutions involve replacement of the aliphatic or hydrophobic amino acids Ala, Val, Leu and Ile; replacement of the hydroxyl residues Ser and Thr; replacement of the acidic residues Asp and Glu; replacement of the amide residues Asn and Gln, replacement of the basic residues Lys, Arg, and His; replacement of the aromatic residues Phe, Tyr, and Trp, and replacement of the small-sized amino acids Ala, Ser, Thr, Met, and Gly.

[0197] Besides conservative amino acid substitution, variants of the present invention include (i) substitutions with one or more of the non-conserved amino acid residues, where the substituted amino acid residues may or may not be one encoded by the genetic code, or (ii) substitutions with one or more of the amino acid residues having a substituent group, or (iii) fusion of the mature polypeptide with another compound, such as a compound to increase the stability and/or solubility of the polypeptide (for example, polyethylene glycol), (iv) fusion of the polypeptide with additional amino acids, such as, for example, an IgG Fc fusion region peptide, serum albumin (preferably human serum albumin) or a fragment thereof, or leader or secretory sequence, or a sequence facilitating purification, or (v) fusion of the polypeptide with another compound, such as albumin (including but not limited to recombinant albumin (see, e.g., U.S. Pat. No. 5,876,969, issued Mar. 2, 1999, EP Patent 0 413 622, and U.S. Pat. No. 5,766,883, issued Jun. 16, 1998, herein incorporated by reference in their entirety)). Such variant polypeptides are deemed to be within the scope of those skilled in the art from the teachings herein.

[0198] For example, polypeptide variants containing amino acid substitutions of charged amino acids with other charged or neutral amino acids may produce proteins with improved characteristics, such as less aggregation. Aggregation of pharmaceutical formulations both reduces activity and increases clearance due to the aggregate's immunogenic activity. See Pinckard et al., Clin. Exp. Immunol. 2:331-340 (1967); Robbins et al., Diabetes 36: 838-845 (1987); Cleland et al., Crit. Rev. Therapeutic Drug Carrier Systems 10:307-377 (1993).

[0199] A further embodiment of the invention relates to polypeptides which comprise the amino acid sequence of a polypeptide having an amino acid sequence which contains at least one amino acid substitution, but not more than 50 amino acid substitutions, even more preferably, not more than 40 amino acid substitutions, still more preferably, not more than 30 amino acid substitutions, and still even more preferably, not more than 20 amino acid substitutions from a polypeptide sequence disclosed herein. Of course it is highly preferable for a polypeptide to have an amino acid sequence which, for example, comprises the amino acid sequence of a polypeptide of SEQ ID NO:Y, the amino acid sequence of the mature (e.g., secreted) polypeptide of SEQ ID NO:Y, an amino acid sequence encoded by SEQ ID NO:X, an amino acid sequence encoded by the portion of SEQ ID NO:X as defined in columnns 8 and 9 of Table 2, an amino acid sequence encoded by the complement of SEQ ID NO:X, an amino acid sequence encoded by cDNA contained in ATCC Deposit No:Z, and/or the amino acid sequence of a mature (secreted) polypeptide encoded by cDNA contained in ATCC Deposit No:Z, or a fragment thereof, which contains, in order of ever-increasing preference, at least one, but not more than 10, 9, 8, 7, 6, 5, 4, 3, 2 or 1 amino acid substitutions.

[0200] In specific embodiments, the polypeptides of the invention comprise, or alternatively, consist of, fragments or variants of a reference amino acid sequence selected from: (a) the amino acid sequence of SEQ ID NO:Y or fragments thereof (e.g., the mature form and/or other fragments described herein); (b) the amino acid sequence encoded by SEQ ID NO:X or fragments thereof; (c) the amino acid sequence encoded by the complement of SEQ ID NO:X or fragments thereof; (d) the amino acid sequence encoded by the portion of SEQ ID NO:X as defined in columns 8 and 9 of Table 2 or fragments thereof; and (e) the amino acid sequence encoded by cDNA contained in ATCC Deposit No:Z or fragments thereof; wherein the fragments or variants have 1-5, 5-10, 5-25, 5-50, 10-50 or 50-150, amino acid residue additions, substitutions, and/or deletions when compared to the reference amino acid sequence. In preferred embodiments, the amino acid substitutions are conservative. Polynucleotides encoding these polypeptides are also encompassed by the invention.

Polynucleotide and Polypeptide Fragments

[0201] The present invention is also directed to polynucleotide fragments of the polynucleotides (nucleic acids) of the invention. In the present invention, a “polynucleotide fragment” refers to a polynucleotide having a nucleic acid sequence which, for example: is a portion of the cDNA contained in ATCC Deposit No:Z or the complementary strand thereto; is a portion of the polynucleotide sequence encoding the polypeptide encoded by the cDNA contained in ATCC Deposit No:Z or the complementary strand thereto; is a portion of the polynucleotide sequence encoding the mature (secreted) polypeptide encoded by the cDNA contained in ATCC Deposit No:Z or the complementary strand thereto; is a portion of a polynucleotide sequence encoding the mature amino acid sequence as defined in columns 14 and 15 of Table 1A or the complementary strand thereto; is a portion of a polynucleotide sequence encoding the amino acid sequence encoded by the region of SEQ ID NO:X as defined in columns 8 and 9 of Table 2 or the complementary strand thereto; is a portion of the polynucleotide sequence of SEQ ID NO:X as defined in columns 8 and 9 of Table 2 or the complementary strand thereto; is a portion of the polynucleotide sequence in SEQ ID NO:X or the complementary strand thereto; is a polynucleotide sequence encoding a portion of the polypeptide of SEQ ID NO:Y; is a polynucleotide sequence encoding a portion of a polypeptide encoded by SEQ ID NO:X; is a polynucleotide sequence encoding a portion of a polypeptide encoded by the complement of the polynucleotide sequence in SEQ ID NO:X; is a portion of a polynucleotide sequence encoding the amino acid sequence encoded by the region of SEQ ID NO:B as defined in column 6 of Table 1C or the complementary strand thereto; or is a portion of the polynucleotide sequence of SEQ ID NO:B as defined in column 6 of Table 1C or the complementary strand thereto.

[0202] The polynucleotide fragments of the invention are preferably at least about 15 nt, and more preferably at least about 20 nt, still more preferably at least about 30 nt, and even more preferably, at least about 40 nt, at least about 50 nt, at least about 75 nt, or at least about 150 nt in length. A fragment “at least 20 nt in length,” for example, is intended to include 20 or more contiguous bases from the cDNA sequence contained in ATCC Deposit No:Z, or the nucleotide sequence shown in SEQ ID NO:X or the complementary stand thereto. In this context “about” includes the particularly recited value or a value larger or smaller by several (5, 4, 3, 2, or 1) nucleotides, at either terminus or at both termini. These nucleotide fragments have uses that include, but are not limited to, as diagnostic probes and primers as discussed herein. Of course, larger fragments (e.g., at least 160, 170, 180, 190, 200, 250, 500, 600, 1000, or 2000 nucleotides in length) are also encompassed by the invention.

[0203] Moreover, representative examples of polynucleotide fragments of the invention comprise, or alternatively consist of, a sequence from about nucleotide number 1-50, 51-100, 101-150, 151-200, 201-250, 251-300, 301-350, 351-400, 401-450, 451-500, 501-550, 551-600, 601-650, 651-700, 701-750, 751-800, 801-850, 851-900, 901-950, 951-1000, 1001-1050, 1051-1100, 1101-1150, 1151-1200, 1201-1250, 1251-1300, 1301-1350, 1351-1400, 1401-1450, 1451-1500, 1501-1550, 1551-1600, 1601-1650, 1651-1700, 1701-1750, 1751-1800, 1801-1850, 1851-1900, 1901-1950, 1951-2000, 2001-2050, 2051-2100, 2101-2150, 2151-2200, 2201-2250, 2251-2300, 2301-2350, 2351-2400, 2401-2450, 2451-2500, 2501-2550, 2551-2600, 2601-2650, 2651-2700, 2701-2750, 2751-2800, 2801-2850, 2851-2900, 2901-2950, 2951-3000, 3001-3050, 3051-3100, 3101-3150, 3151-3200, 3201-3250, 3251-3300, 3301-3350, 3351-3400, 3401-3450, 3451-3500, 3501-3550, 3551-3600, 3601-3650, 3651-3700, 3701-3750, 3751-3800, 3801-3850, 3851-3900, 3901-3950, 3951-4000, 4001-4050, 4051-4100, 4101-4150, 4151-4200, 4201-4250, 4251-4300, 4301-4350, 4351-4400, 4401-4450, 4451-4500, 4501-4550, 4551-4600, 4601-4650, 4651-4700, 4701-4750, 4751-4800, 4801-4850, 4851-4900, 4901-4950, 4951-5000, 5001-5050, 5051-5100, 5101-5150, 5151-5200, 5201-5250, 5251-5300, 5301-5350, 5351-5400, 5401-5450, 5451-5500, 5501-5550, 5551-5600, 5601-5650, 5651-5700, 5701-5750, 5751-5800, 5801-5850, 5851-5900, 5901-5950, 5951-6000, 6001-6050, 6051-6100, 6101-6150, 6151-6200, 6201-6250, 6251-6300, 6301-6350, 6351-6400, 6401-6450, 6451-6500, 6501-6550, 6551-6600, 6601-6650, 6651-6700, 6701-6750, 6751-6800, 6801-6850, 6851-6900, 6901-6950, 6951-7000, 7001-7050, 7051-7100, 7101-7150, 7151-7200, 7201-7250, 7251-7300 or 7301 to the end of SEQ ID NO:X, or the complementary strand thereto. In this context “about” includes the particularly recited range or a range larger or smaller by several (5, 4, 3, 2, or 1) nucleotides, at either terminus or at both termini. Preferably, these fragments encode a polypeptide which has a functional activity (e.g., biological activity; such as, for example, activity useful in detecting, preventing, diagnosing, prognosticating, treating, and/or ameliorating immune diseases and disorders). More preferably, these polynucleotides can be used as probes or primers as discussed herein. Polynucleotides which hybridize to one or more of these polynucleotides under stringent hybridization conditions or alternatively, under lower stringency conditions are also encompassed by the invention, as are polypeptides encoded by these polynucleotides.

[0204] Further representative examples of polynucleotide fragments of the invention comprise, or alternatively consist of, a sequence from about nucleotide number 1-50, 51-100, 101-150, 151-200, 201-250, 251-300, 301-350, 351-400, 401-450, 451-500, 501-550, 551-600, 601-650, 651-700, 701-750, 751-800, 801-850, 851-900, 901-950, 951-1000, 1001-1050, 1051-1100, 1101-1150, 1151-1200, 1201-1250, 1251-1300, 1301-1350, 1351-1400, 1401-1450, 1451-1500, 1501-1550, 1551-1600, 1601-1650, 1651-1700, 1701-1750, 1751-1800, 1801-1850, 1851-1900, 1901-1950, 1951-2000, 2001-2050, 2051-2100, 2101-2150, 2151-2200, 2201-2250, 2251-2300, 2301-2350, 2351-2400, 2401-2450, 2451-2500, 2501-2550, 2551-2600, 2601-2650, 2651-2700, 2701-2750, 2751-2800, 2801-2850, 2851-2900, 2901-2950, 2951-3000, 3001-3050, 3051-3100, 3101-3150, 3151-3200, 3201-3250, 3251-3300, 3301-3350, 3351-3400, 3401-3450, 3451-3500, 3501-3550, 3551-3600, 3601-3650, 3651-3700, 3701-3750, 3751-3800, 3801-3850, 3851-3900, 3901-3950, 3951-4000, 4001-4050, 4051-4100, 4101-4150, 4151-4200, 4201-4250, 4251-4300, 4301-4350, 4351-4400, 4401-4450, 4451-4500, 4501-4550, 4551-4600, 4601-4650, 4651-4700, 4701-4750, 4751-4800, 4801-4850, 4851-4900, 4901-4950, 4951-5000, 5001-5050, 5051-5100, 5101-5150, 5151-5200, 5201-5250, 5251-5300, 5301-5350, 5351-5400, 5401-5450, 5451-5500, 5501-5550, 5551-5600, 5601-5650, 5651-5700, 5701-5750, 5751-5800, 5801-5850, 5851-5900, 5901-5950, 5951-6000, 6001-6050, 6051-6100, 6101-6150, 6151-6200, 6201-6250, 6251-6300, 6301-6350, 6351-6400, 6401-6450, 6451-6500, 6501-6550, 6551-6600, 6601-6650, 6651-6700, 6701-6750, 6751-6800, 6801-6850, 6851-6900, 6901-6950, 6951-7000, 7001-7050, 7051-7100, 7101-7150, 7151-7200, 7201-7250, 7251-7300 or 7301 to the end of the cDNA sequence contained in ATCC Deposit No:Z, or the complementary strand thereto. In this context “about” includes the particularly recited range or a range larger or smaller by several (5, 4, 3, 2, or 1) nucleotides, at either terminus or at both termini. Preferably, these fragments encode a polypeptide which has a functional activity (e.g., biological activity). More preferably, these polynucleotides can be used as probes or primers as discussed herein. Polynucleotides which hybridize to one or more of these polynucleotides under stringent hybridization conditions or alternatively, under lower stringency conditions are also encompassed by the invention, as are polypeptides encoded by these polynucleotides.

[0205] Moreover, representative examples of polynucleotide fragments of the invention comprise, or alternatively consist of, a nucleic acid sequence comprising one, two, three, four, five, six, seven, eight, nine, ten, or more of the above described polynucleotide fragments of the invention in combination with a polynucleotide sequence delineated in Table 1C column 6. Additional, representative examples of polynucleotide fragments of the invention comprise, or alternatively consist of, a nucleic acid sequence comprising one, two, three, four, five, six, seven, eight, nine, ten, or more of the above described polynucleotide fragments of the invention in combination with a polynucleotide sequence that is the complementary strand of a sequence delineated in column 6 of Table 1C. In further embodiments, the above-described polynucleotide fragments of the invention comprise, or alternatively consist of, sequences delineated in Table 1C, column 6, and have a nucleic acid sequence which is different from that of the BAC fragment having the sequence disclosed in SEQ ID NO:B (see Table 1C, column 5). In additional embodiments, the above-described polynucleotide fragments of the invention comprise, or alternatively consist of, sequences delineated in Table 1C, column 6, and have a nucleic acid sequence which is different from that published for the BAC clone identified as BAC ID NO:A (see Table 1C, column 4). In additional embodiments, the above-described polynucleotides of the invention comprise, or alternatively consist of, sequences delineated Table 1C, column 6, and have a nucleic acid sequence which is different from that contained in the BAC clone identified as BAC ID NO:A (see Table 1C, column 4). Polypeptides encoded by these polynucleotides, other polynucleotides that encode these polypeptides, and antibodies that bind these polypeptides are also encompassed by the invention. Additionally, fragments and variants of the above-described polynucleotides and polypeptides are also encompassed by the invention.

[0206] In additional specific embodiments, polynucleotides of the invention comprise, or alternatively consist of, one, two, three, four, five, six, seven, eight, nine, ten, or more fragments of the sequences delineated in column 6 of Table 1C, and the polynucleotide sequence of SEQ ID NO:X (e.g., as defined in Table 1C, column 2) or fragments or variants thereof. Polypeptides encoded by these polynucleotides, other polynucleotides that encode these polypeptides, and antibodies that bind these polypeptides are also encompassed by the invention.

[0207] In additional specific embodiments, polynucleotides of the invention comprise, or alternatively consist of, one, two, three, four, five, six, seven, eight, nine, ten, or more fragments of the sequences delineated in column 6 of Table 1C which correspond to the same ATCC Deposit No:Z (see Table 1C, column 1), and the polynucleotide sequence of SEQ ID NO:X (e.g., as defined in Table 1A, 1B, or 1C) or fragments or variants thereof. Polypeptides encoded by these polynucleotides, other polynucleotides that encode these polypeptides, and antibodies that bind these polypeptides are also encompassed by the invention.

[0208] In further specific embodiments, polynucleotides of the invention comprise, or alternatively consist of, one, two, three, four, five, six, seven, eight, nine, ten, or more fragments of the sequences delineated in the same row of column 6 of Table 1C, and the polynucleotide sequence of SEQ ID NO:X (e.g., as defined in Table 1A, 1B, or 1C) or fragments or variants thereof. Polypeptides encoded by these polynucleotides, other polynucleotides that encode these polypeptides, and antibodies that bind these polypeptides are also encompassed by the invention.

[0209] In additional specific embodiments, polynucleotides of the invention comprise, or alternatively consist of a polynucleotide sequence in which the 3′ 10 polynucleotides of one of the sequences delineated in column 6 of Table 1C and the 5′ 10 polynucleotides of the sequence of SEQ ID NO:X are directly contiguous. Nucleic acids which hybridize to the complement of these 20 contiguous polynucleotides under stringent hybridization conditions or alternatively, under lower stringency conditions, are also encompassed by the invention. Polypeptides encoded by these polynucleotides and/or nucleic acids, other polynucleotides and/or nucleic acids that encode these polypeptides, and antibodies that bind these polypeptides are also encompassed by the invention. Additionally, fragments and variants of the above-described polynucleotides, nucleic acids, and polypeptides are also encompassed by the invention.

[0210] In additional specific embodiments, polynucleotides of the invention comprise, or alternatively consist of a polynucleotide sequence in which the 3′ 10 polynucleotides of one of the sequences delineated in column 6 of Table 1C and the 5′ 10 polynucleotides of a fragment or variant of the sequence of SEQ ID NO:X (e.g., as described herein) are directly contiguous Nucleic acids which hybridize to the complement of these 20 contiguous polynucleotides under stringent hybridization conditions or alternatively, under lower stringency conditions, are also encompassed by the invention. Polypeptides encoded by these polynucleotides and/or nucleic acids, other polynucleotides and/or nucleic acids encoding these polypeptides, and antibodies that bind these polypeptides are also encompassed by the invention. Additionally, fragments and variants of the above-described polynucleotides, nucleic acids, and polypeptides are also encompassed by the invention.

[0211] In further specific embodiments, polynucleotides of the invention comprise, or alternatively consist of a polynucleotide sequence in which the 3′ 10 polynucleotides of a fragment or variant of the sequence of SEQ ID NO:X and the 5′ 10 polynucleotides of the sequence of one of the sequences delineated in column 6 of Table 1C are directly contiguous. Nucleic acids which hybridize to the complement of these 20 contiguous polynucleotides under stringent hybridization conditions or alternatively, under lower stringency conditions, are also encompassed by the invention. Polypeptides encoded by these polynucleotides and/or nucleic acids, other polynucleotides and/or nucleic acids encoding these polypeptides, and antibodies that bind these polypeptides are also encompassed by the invention. Additionally, fragments and variants of the above-described polynucleotides, nucleic acids, and polypeptides are also encompassed by the invention.

[0212] In specific embodiments, polynucleotides of the invention comprise, or alternatively consist of a polynucleotide sequence in which the 3′ 10 polynucleotides of one of the sequences delineated in column 6 of Table 1C and the 5′ 10 polynucleotides of another sequence in column 6 are directly contiguous. In preferred embodiments, the 3′ 10 polynucleotides of one of the sequences delineated in column 6 of Table 1C is directly contiguous with the 5′ 10 polynucleotides of the next sequential exon delineated in Table 1C, column 6. Nucleic acids which hybridize to the complement of these 20 contiguous polynucleotides under stringent hybridization conditions or alternatively, under lower stringency conditions, are also encompassed by the invention. Polypeptides encoded by these polynucleotides and/or nucleic acids, other polynucleotides and/or nucleic acids encoding these polypeptides, and antibodies that bind these polypeptides are also encompassed by the invention. Additionally, fragments and variants of the above-described polynucleotides, nucleic acids, and polypeptides are also encompassed by the invention.

[0213] In the present invention, a “polypeptide fragment” refers to an amino acid sequence which is a portion of the amino acid sequence contained in SEQ ID NO:Y, is a portion of the mature form of SEQ ID NO:Y as defined in columns 14 and 15 of Table 1A, a portion of an amino acid sequence encoded by the portion of SEQ ID NO:X as defined in columnns 8 and 9 of Table 2, is a portion of an amino acid sequence encoded by the polynucleotide sequence of SEQ ID NO:X, is a portion of an amino acid sequence encoded by the complement of the polynucleotide sequence in SEQ ID NO:X, is a portion of the amino acid sequence of a mature (secreted) polypeptide encoded by the cDNA contained in ATCC Deposit No:Z, and/or is a portion of an amino acid sequence encoded by the cDNA contained in ATCC Deposit No:Z. Protein (polypeptide) fragments may be “free-standing,” or comprised within a larger polypeptide of which the fragment forms a part or region, most preferably as a single continuous region. Representative examples of polypeptide fragments of the invention, include, for example, fragments comprising, or alternatively consisting of, from about amino acid number 1-20, 21-40, 41-60, 61-80, 81-100, 101-120, 121-140, 141-160, 161-180, 181-200, 201-220, 221-240, 241-260, 261-280, 281-300, 301-320, 321-340, 341-360, 361-380, 381-400, 401-420, 421-440, 441-460, 461-480, 481-500, 501-520, 521-540, 541-560, 561-580, 581-600, 601-620, 621-640, 641-660, 661-680, 681-700, 701-720, 721-740, 741-760, 761-780, 781-800, 801-820, 821-840, 841-860, 861-880, 881-900, 901-920, 921-940, 941-960, 961-980, 981-1000, 1001-1020, 1021-1040, 1041-1060, 1061-1080, 1081-1100, 1101-1120, 1121-1140, 1141-1160, 1161-1180, 1181-1200, 1201-1220, 1221-1240, 1241-1260, 1261-1280, 1281-1300, 1301-1320, 1321-1340, 1341-1360, 1361-1380, 1381-1400, 1401-1420, 1421-1440, or 1441 to the end of the coding region of cDNA and SEQ ID NO: Y. In a preferred embodiment, polypeptide fragments of the invention include, for example, fragments comprising, or alternatively consisting of, from about amino acid number 1-20, 21-40, 41-60, 61-80, 81-100, 101-120, 121-140, 141-160, 161-180, 181-200, 201-220, 221-240, 241-260, 261-280, 281-300, 301-320, 321-340, 341-360, 361-380, 381-400, 401-420, 421-440, 441-460, 461-480, 481-500, 501-520, 521-540, 541-560, 561-580, 581-600, 601-620, 621-640, 641-660, 661-680, 681-700, 701-720, 721-740, 741-760, 761-780, 781-800, 801-820, 821-840, 841-860, 861-880, 881-900, 901-920, 921-940, 941-960, 961-980, 981-1000, 1001-1020, 1021-1040, 1041-1060, 1061-1080, 1081-1100, 1101-1120, 1121-1140, 1141-1160, 1161-1180, 1181-1200, 1201-1220, 1221-1240, 1241-1260, 1261-1280, 1281-1300, 1301-1320, 1321-1340, 1341-1360, 1361-1380, 1381-1400, 1401-1420, 1421-1440, or 1441 to the end of the coding region of SEQ ID NO:Y. Moreover, polypeptide fragments of the invention may be at least about 10, 15, 20, 25, 30, 35, 40, 45, 50, 55, 60, 65, 70, 75, 80, 85, 90, 100, 110, 120, 130, 140, or 150 amino acids in length. In this context “about” includes the particularly recited ranges or values, or ranges or values larger or smaller by several (5, 4, 3, 2, or 1) amino acids, at either extreme or at both extremes. Polynucleotides encoding these polypeptide fragments are also encompassed by the invention.

[0214] Even if deletion of one or more amino acids from the N-terminus of a protein results in modification of loss of one or more biological functions of the protein, other functional activities (e.g., biological activities; such as, for example, activity useful in detecting, preventing, diagnosing, prognosticating, treating, and/or ameliorating immune diseases and disorders; ability to multimerize; ability to bind a ligand; antigenic ability useful for production of polypeptide specific antibodies) may still be retained. For example, the ability of shortened muteins to induce and/or bind to antibodies which recognize the complete or mature forms of the polypeptides generally will be retained when less than the majority of the residues of the complete or mature polypeptide are removed from the N-terminus. Whether a particular polypeptide lacking N-terminal residues of a complete polypeptide retains such immunologic activities can readily be determined by routine methods described herein and otherwise known in the art. It is not unlikely that a mutein with a large number of deleted N-terminal amino acid residues may retain some biological or immunogenic activities. In fact, peptides composed of as few as six amino acid residues may often evoke an immune response.

[0215] Accordingly, polypeptide fragments include the secreted protein as well as the mature form. Further preferred polypeptide fragments include the secreted protein or the mature form having a continuous series of deleted residues from the amino or the carboxy terminus, or both. For example, any number of amino acids, ranging from 1-60, can be deleted from the amino terminus of either the secreted polypeptide or the mature form. Similarly, any number of amino acids, ranging from 1-30, can be deleted from the carboxy terminus of the secreted protein or mature form. Furthermore, any combination of the above amino and carboxy terminus deletions are preferred. Similarly, polynucleotides encoding these polypeptide fragments are also preferred.

[0216] The present invention further provides polypeptides having one or more residues deleted from the amino terminus of the amino acid sequence of a polypeptide disclosed herein (e.g., a polypeptide of SEQ ID NO:Y, a polypeptide as defined in columns 14 and 15 of Table 1A, a polypeptide encoded by the polynucleotide sequence contained in SEQ ID NO:X or the complement thereof, a polypeptide encoded by the portion of SEQ ID NO:X as defined in columns 8 and 9 of Table 2, a polypeptide encoded by the portion of SEQ ID NO:B as defined in column 6 of Table 1C, a polypeptide encoded by the cDNA contained in ATCC Deposit No:Z, and/or a mature polypeptide encoded by the cDNA contained in ATCC Deposit No:Z). In particular, N-terminal deletions may be described by the general formula m−q, where q is a whole integer representing the total number of amino acid residues in a polypeptide of the invention (e.g., the polypeptide disclosed in SEQ ID NO:Y, the mature (secreted) portion of SEQ ID NO:Y as defined in columns 14 and 15 of Table 1A, or the polypeptide encoded by the portion of SEQ ID NO:X as defined in columns 8 and 9 of Table 2), and m is defined as any integer ranging from 2 to q−6. Polynucleotides encoding these polypeptides are also encompassed by the invention.

[0217] The present invention further provides polypeptides having one or more residues from the carboxy terminus of the amino acid sequence of a polypeptide disclosed herein (e.g., a polypeptide of SEQ ID NO:Y, the mature (secreted) portion of SEQ ID NO:Y as defined in columns 14 and 15 of Table 1A, a polypeptide encoded by the polynucleotide sequence contained in SEQ ID NO:X, a polypeptide encoded by the portion of SEQ ID NO:X as defined in columns 8 and 9 of Table 2, a polypeptide encoded by the portion of SEQ ID NO:B as defined in column 6 of Table 1C, a polypeptide encoded by the cDNA contained in ATCC Deposit No:Z, and/or a mature polypeptide encoded by the cDNA contained in ATCC Deposit No:Z). In particular, C-terminal deletions may be described by the general formula 1-n, where n is any whole integer ranging from 6 to q−1, and where n corresponds to the position of amino acid residue in a polypeptide of the invention. Polynucleotides encoding these polypeptides are also encompassed by the invention.

[0218] In addition, any of the above described N- or C-terminal deletions can be combined to produce a N- and C-terminal deleted polypeptide. The invention also provides polypeptides having one or more amino acids deleted from both the amino and the carboxyl termini, which may be described generally as having residues m-n of a polypeptide encoded by SEQ ID NO:X (e.g., including, but not limited to, the preferred polypeptide disclosed as SEQ ID NO:Y, the mature (secreted) portion of SEQ ID NO:Y as defined in columns 14 and 15 of Table 1A, and the polypeptide encoded by the portion of SEQ ID NO:X as defined in columns 8 and 9 of Table 2), the cDNA contained in ATCC Deposit No:Z, and/or the complement thereof, where n and m are integers as described above. Polynucleotides encoding these polypeptides are also encompassed by the invention.

[0219] Also as mentioned above, even if deletion of one or more amino acids from the C-terminus of a protein results in modification of loss of one or more biological functions of the protein, other functional activities (e.g., biological activities such as, for example, activity useful in detecting, preventing, diagnosing, prognosticating, treating, and/or ameliorating immune diseases and disorders; ability to multimerize; ability to bind a ligand; antigenic ability useful for production of polypeptide specific antibodies) may still be retained. For example the ability of the shortened mutein to induce and/or bind to antibodies which recognize the complete or mature forms of the polypeptide generally will be retained when less than the majority of the residues of the complete or mature polypeptide are removed from the C-terminus. Whether a particular polypeptide lacking C-terminal residues of a complete polypeptide retains such immunologic activities can readily be determined by routine methods described herein and otherwise known in the art. It is not unlikely that a mutein with a large number of deleted C-terminal amino acid residues may retain some biological or immunogenic activities. In fact, peptides composed of as few as six amino acid residues may often evoke an immune response.

[0220] The present application is also directed to proteins containing polypeptides at least 80%, 85%, 90%, 95%, 96%, 97%, 98% or 99% identical to a polypeptide sequence set forth herein. In preferred embodiments, the application is directed to proteins containing polypeptides at least 80%, 85%, 90%, 95%, 96%, 97%, 98% or 99% identical to polypeptides having the amino acid sequence of the specific N- and C-terminal deletions. Polynucleotides encoding these polypeptides are also encompassed by the invention.

[0221] Any polypeptide sequence encoded by, for example, the polynucleotide sequences set forth as SEQ ID NO:X or the complement thereof, (presented, for example, in Tables 1A and 2), the cDNA contained in ATCC Deposit No:Z, or the polynucleotide sequence as defined in column 6 of Table 1C, may be analyzed to determine certain preferred regions of the polypeptide. For example, the amino acid sequence of a polypeptide encoded by a polynucleotide sequence of SEQ ID NO:X (e.g., the polypeptide of SEQ ID NO:Y and the polypeptide encoded by the portion of SEQ ID NO:X as defined in columnns 8 and 9 of Table 2) or the cDNA contained in ATCC Deposit No:Z may be analyzed using the default parameters of the DNASTAR computer algorithm (DNASTAR, Inc., 1228 S. Park St., Madison, Wis. 53715 USA; http://www.dnastar.com/).

[0222] Polypeptide regions that may be routinely obtained using the DNASTAR computer algorithm include, but are not limited to, Garnier-Robson alpha-regions, beta-regions, turn-regions, and coil-regions; Chou-Fasman alpha-regions, beta-regions, and turn-regions; Kyte-Doolittle hydrophilic regions and hydrophobic regions; Eisenberg alpha- and beta-amphipathic regions; Karplus-Schulz flexible regions; Emini surface-forming regions; and Jameson-Wolf regions of high antigenic index. Among highly preferred polynucleotides of the invention in this regard are those that encode polypeptides comprising regions that combine several structural features, such as several (e.g., 1, 2, 3 or 4) of the features set out above.

[0223] Additionally, Kyte-Doolittle hydrophilic regions and hydrophobic regions, Emini surface-forming regions, and Jameson-Wolf regions of high antigenic index (i.e., containing four or more contiguous amino acids having an antigenic index of greater than or equal to 1.5, as identified using the default parameters of the Jameson-Wolf program) can routinely be used to determine polypeptide regions that exhibit a high degree of potential for antigenicity. Regions of high antigenicity are determined from data by DNASTAR analysis by choosing values which represent regions of the polypeptide which are likely to be exposed on the surface of the polypeptide in an environment in which antigen recognition may occur in the process of initiation of an immune response.

[0224] Preferred polypeptide fragments of the invention are fragments comprising, or alternatively, consisting of, an amino acid sequence that displays a functional activity (e.g. biological activity such as, for example, activity useful in detecting, preventing, diagnosing, prognosticating, treating, and/or ameliorating immune diseases and disorders; ability to multimerize; ability to bind a ligand; antigenic ability useful for production of polypeptide specific antibodies) of the polypeptide sequence of which the amino acid sequence is a fragment. By a polypeptide displaying a “functional activity” is meant a polypeptide capable of one or more known functional activities associated with a full-length protein, such as, for example, biological activity, antigenicity, immunogenicity, and/or multimerization, as described herein.

[0225] Other preferred polypeptide fragments are biologically active fragments. Biologically active fragments are those exhibiting activity similar, but not necessarily identical, to an activity of the polypeptide of the present invention. The biological activity of the fragments may include an improved desired activity, or a decreased undesirable activity.

[0226] In preferred embodiments, polypeptides of the invention comprise, or alternatively consist of, one, two, three, four, five or more of the antigenic fragments of the polypeptide of SEQ ID NO:Y, or portions thereof. Polynucleotides encoding these polypeptides are also encompassed by the invention.

Epitopes and Antibodies

[0227] The present invention encompasses polypeptides comprising, or alternatively consisting of, an epitope of: the polypeptide sequence shown in SEQ ID NO:Y; a polypeptide sequence encoded by SEQ ID NO:X or the complementary strand thereto; the polypeptide sequence encoded by the portion of SEQ ID NO:X as defined in columns 8 and 9 of Table 2; the polypeptide sequence encoded by the portion of SEQ ID NO:B as defined in column 6 of Table 1C or the complement thereto; the polypeptide sequence encoded by the cDNA contained in ATCC Deposit No:Z; or the polypeptide sequence encoded by a polynucleotide that hybridizes to the sequence of SEQ ID NO:X, the complement of the sequence of SEQ ID NO:X, the complement of a portion of SEQ ID NO:X as defined in columns 8 and 9 of Table 2, or the cDNA sequence contained in ATCC Deposit No:Z under stringent hybridization conditions or alternatively, under lower stringency hybridization as defined supra. The present invention further encompasses polynucleotide sequences encoding an epitope of a polypeptide sequence of the invention (such as, for example, the sequence disclosed in SEQ ID NO:X, or a fragment thereof), polynucleotide sequences of the complementary strand of a polynucleotide sequence encoding an epitope of the invention, and polynucleotide sequences which hybridize to the complementary strand under stringent hybridization conditions or alternatively, under lower stringency hybridization conditions defined supra.

[0228] The term “epitopes,” as used herein, refers to portions of a polypeptide having antigenic or immunogenic activity in an animal, preferably a mammal, and most preferably in a human. In a preferred embodiment, the present invention encompasses a polypeptide comprising an epitope, as well as the polynucleotide encoding this polypeptide. An “immunogenic epitope,” as used herein, is defined as a portion of a protein that elicits an antibody response in an animal, as determined by any method known in the art, for example, by the methods for generating antibodies described infra. (See, for example, Geysen et al., Proc. Natl. Acad. Sci. USA 81:3998-4002 (1983)). The term “antigenic epitope,” as used herein, is defined as a portion of a protein to which an antibody can immunospecifically bind its antigen as determined by any method well known in the art, for example, by the immunoassays described herein. Immunospecific binding excludes non-specific binding but does not necessarily exclude cross-reactivity with other antigens. Antigenic epitopes need not necessarily be immunogenic.

[0229] Fragments which function as epitopes may be produced by any conventional means. (See, e.g., Houghten, R. A., Proc. Natl. Acad. Sci. USA 82:5131-5135 (1985) further described in U.S. Pat. No. 4,631,211.)

[0230] In the present invention, antigenic epitopes preferably contain a sequence of at least 4, at least 5, at least 6, at least 7, more preferably at least 8, at least 9, at least 10, at least 11, at least 12, at least 13, at least 14, at least 15, at least 20, at least 25, at least 30, at least 40, at least 50, and, most preferably, between about 15 to about 30 amino acids. Preferred polypeptides comprising immunogenic or antigenic epitopes are at least 10, 15, 20, 25, 30, 35, 40, 45, 50, 55, 60, 65, 70, 75, 80, 85, 90, 95, or 100 amino acid residues in length. Additional non-exclusive preferred antigenic epitopes include the antigenic epitopes disclosed herein, as well as portions thereof. Antigenic epitopes are useful, for example, to raise antibodies, including monoclonal antibodies, that specifically bind the epitope. Preferred antigenic epitopes include the antigenic epitopes disclosed herein, as well as any combination of two, three, four, five or more of these antigenic epitopes. Antigenic epitopes can be used as the target molecules in immunoassays. (See, for instance, Wilson et al., Cell 37:767-778 (1984); Sutcliffe et al., Science 219:660-666 (1983)).

[0231] Non-limiting examples of epitopes of polypeptides that can be used to generate antibodies of the invention include a polypeptide comprising, or alternatively consisting of, at least one, two, three, four, five, six or more of the portion(s) of SEQ ID NO:Y specified in Table 1B. These polypeptide fragments have been determined to bear antigenic epitopes of the proteins of the invention by the analysis of the Jameson-Wolf antigenic index that is included in the DNAStar suite of computer programs. By “comprise” it is intended that a polypeptide contains at least one, two, three, four, five, six or more of the portion(s) of SEQ ID NO:Y shown in Table 1B, but it may contain additional flanking residues on either the amino or carboxyl termini of the recited portion. Such additional flanking sequences are preferably sequences naturally found adjacent to the portion; i.e., contiguous sequence shown in SEQ ID NO:Y. The flanking sequence may, however, be sequences from a heterolgous polypeptide, such as from another protein described herein or from a heterologous polypeptide not described herein. In particular embodiments, epitope portions of a polypeptide of the invention comprise one, two, three, or more of the portions of SEQ ID NO:Y shown in Table 1B.

[0232] Similarly, immunogenic epitopes can be used, for example, to induce antibodies according to methods well known in the art. See, for instance, Sutcliffe et al., supra; Wilson et al., supra; Chow et al., Proc. Natl. Acad. Sci. USA 82:910-914; and Bittle et al., J. Gen. Virol. 66:2347-2354 (1985). Preferred immunogenic epitopes include the immunogenic epitopes disclosed herein, as well as any combination of two, three, four, five or more of these immunogenic epitopes. The polypeptides comprising one or more immunogenic epitopes may be presented for eliciting an antibody response together with a carrier protein, such as an albumin, to an animal system (such as rabbit or mouse), or, if the polypeptide is of sufficient length (at least about 25 amino acids), the polypeptide may be presented without a carrier. However, immunogenic epitopes comprising as few as 8 to 10 amino acids have been shown to be sufficient to raise antibodies capable of binding to, at the very least, linear epitopes in a denatured polypeptide (e.g., in Western blotting).

[0233] Epitope-bearing polypeptides of the present invention may be used to induce antibodies according to methods well known in the art including, but not limited to, in vivo immunization, in vitro immunization, and phage display methods. See, e.g., Sutcliffe et al., supra; Wilson et al., supra, and Bittle et al., J. Gen. Virol., 66:2347-2354 (1985). If in vivo immunization is used, animals may be immunized with free peptide; however, anti-peptide antibody titer may be boosted by coupling the peptide to a macromolecular carrier, such as keyhole limpet hemacyanin (KLH) or tetanus toxoid. For instance, peptides containing cysteine residues may be coupled to a carrier using a linker such as maleimidobenzoyl-N-hydroxysuccinimide ester (MBS), while other peptides may be coupled to carriers using a more general linking agent such as glutaraldehyde. Animals such as rabbits, rats and mice are immunized with either free or carrier-coupled peptides, for instance, by intraperitoneal and/or intradermal injection of emulsions containing about 100 μg of peptide or carrier protein and Freund's adjuvant or any other adjuvant known for stimulating an immune response. Several booster injections may be needed, for instance, at intervals of about two weeks, to provide a useful titer of anti-peptide antibody which can be detected, for example, by ELISA assay using free peptide adsorbed to a solid surface. The titer of anti-peptide antibodies in serum from an immunized animal may be increased by selection of anti-peptide antibodies, for instance, by adsorption to the peptide on a solid support and elution of the selected antibodies according to methods well known in the art.

[0234] As one of skill in the art will appreciate, and as discussed above, the polypeptides of the present invention (e.g., those comprising an immunogenic or antigenic epitope) can be fused to heterologous polypeptide sequences. For example, polypeptides of the present invention (including fragments or variants thereof), may be fused with the constant domain of immunoglobulins (IgA, IgE, IgG, IgM), or portions thereof (CH1, CH2, CH3, or any combination thereof and portions thereof, resulting in chimeric polypeptides. By way of another non-limiting example, polypeptides and/or antibodies of the present invention (including fragments or variants thereof) may be fused with albumin (including but not limited to recombinant human serum albumin or fragments or variants thereof (see, e.g., U.S. Pat. No. 5,876,969, issued Mar. 2, 1999, EP Patent 0 413 622, and U.S. Pat. No. 5,766,883, issued Jun. 16, 1998, herein incorporated by reference in their entirety)). In a preferred embodiment, polypeptides and/or antibodies of the present invention (including fragments or variants thereof) are fused with the mature form of human serum albumin (i.e., amino acids 1-585 of human serum albumin as shown in FIGS. 1 and 2 of EP Patent 0 322 094) which is herein incorporated by reference in its entirety. In another preferred embodiment, polypeptides and/or antibodies of the present invention (including fragments or variants thereof) are fused with polypeptide fragments comprising, or alternatively consisting of, amino acid residues 1-z of human serum albumin, where z is an integer from 369 to 419, as described in U.S. Pat. No. 5,766,883 herein incorporated by reference in its entirety. Polypeptides and/or antibodies of the present invention (including fragments or variants thereof) may be fused to either the N- or C-terminal end of the heterologous protein (e.g., immunoglobulin Fc polypeptide or human serum albumin polypeptide). Polynucleotides encoding fusion proteins of the invention are also encompassed by the invention.

[0235] Such fusion proteins as those described above may facilitate purification and may increase half-life in vivo. This has been shown for chimeric proteins consisting of the first two domains of the human CD4-polypeptide and various domains of the constant regions of the heavy or light chains of mammalian immunoglobulins. See, e.g., EP 394,827; Traunecker et al., Nature, 331:84-86 (1988). Enhanced delivery of an antigen across the epithelial barrier to the immune system has been demonstrated for antigens (e.g., insulin) conjugated to an FcRn binding partner such as IgG or Fc fragments (see, e.g., PCT Publications WO 96/22024 and WO 99/04813). IgG fusion proteins that have a disulfide-linked dimeric structure due to the IgG portion desulfide bonds have also been found to be more efficient in binding and neutralizing other molecules than monomeric polypeptides or fragments thereof alone. See, e.g., Fountoulakis et al., J. Biochem., 270:3958-3964 (1995). Nucleic acids encoding the above epitopes can also be recombined with a gene of interest as an epitope tag (e.g., the hemagglutinin (HA) tag or flag tag) to aid in detection and purification of the expressed polypeptide. For example, a system described by Janknecht et al. allows for the ready purification of non-denatured fusion proteins expressed in human cell lines (Janknecht et al., 1991, Proc. Natl. Acad. Sci. USA 88:8972-897). In this system, the gene of interest is subcloned into a vaccinia recombination plasmid such that the open reading frame of the gene is translationally fused to an amino-terminal tag consisting of six histidine residues. The tag serves as a matrix binding domain for the fusion protein. Extracts from cells infected with the recombinant vaccinia virus are loaded onto Ni2+nitriloacetic acid-agarose column and histidine-tagged proteins can be selectively eluted with imidazole-containing buffers.

Fusion Proteins

[0236] Any polypeptide of the present invention can be used to generate fusion proteins. For example, the polypeptide of the present invention, when fused to a second protein, can be used as an antigenic tag. Antibodies raised against the polypeptide of the present invention can be used to indirectly detect the second protein by binding to the polypeptide. Moreover, because secreted proteins target cellular locations based on trafficking signals, polypeptides of the present invention which are shown to be secreted can be used as targeting molecules once fused to other proteins.

[0237] Examples of domains that can be fused to polypeptides of the present invention include not only heterologous signal sequences, but also other heterologous functional regions. The fusion does not necessarily need to be direct, but may occur through linker sequences.

[0238] In certain preferred embodiments, proteins of the invention are fusion proteins comprising an amino acid sequence that is an N and/or C-terminal deletion of a polypeptide of the invention. In preferred embodiments, the invention is directed to a fusion protein comprising an amino acid sequence that is at least 90%, 95%, 96%, 97%, 98% or 99% identical to a polypeptide sequence of the invention. Polynucleotides encoding these proteins are also encompassed by the invention.

[0239] Moreover, fusion proteins may also be engineered to improve characteristics of the polypeptide of the present invention. For instance, a region of additional amino acids, particularly charged amino acids, may be added to the N-terminus of the polypeptide to improve stability and persistence during purification from the host cell or subsequent handling and storage. Also, peptide moieties may be added to the polypeptide to facilitate purification. Such regions may be removed prior to final preparation of the polypeptide. The addition of peptide moieties to facilitate handling of polypeptides are familiar and routine techniques in the art.

[0240] As one of skill in the art will appreciate that, as discussed above, polypeptides of the present invention, and epitope-bearing fragments thereof, can be combined with heterologous polypeptide sequences. For example, the polypeptides of the present invention may be fused with heterologous polypeptide sequences, for example, the polypeptides of the present invention may be fused with the constant domain of immunoglobulins (IgA, IgE, IgG, IgM) or portions thereof (CH1, CH2, CH3, and any combination thereof, including both entire domains and portions thereof), or albumin (including, but not limited to, native or recombinant human albumin or fragments or variants thereof (see, e.g., U.S. Pat. No. 5,876,969, issued Mar. 2, 1999, EP Patent 0 413 622, and U.S. Pat. No. 5,766,883, issued Jun. 16, 1998, herein incorporated by reference in their entirety)), resulting in chimeric polypeptides. For example, EP-A-O 464 533 (Canadian counterpart 2045869) discloses fusion proteins comprising various portions of constant region of immunoglobulin molecules together with another human protein or part thereof. In many cases, the Fc part in a fusion protein is beneficial in therapy and diagnosis, and thus can result in, for example, improved pharmacokinetic properties (EP-A 0232 262). Alternatively, deleting the Fc part after the fusion protein has been expressed, detected, and purified, would be desired. For example, the Fc portion may hinder therapy and diagnosis if the fusion protein is used as an antigen for immunizations. In drug discovery, for example, human proteins, such as hIL-5, have been fused with Fc portions for the purpose of high-throughput screening assays to identify antagonists of hIL-5. See, D. Bennett et al., J. Molecular Recognition 8:52-58 (1995); K. Johanson et al., J. Biol. Chem. 270:9459-9471 (1995).

[0241] Moreover, the polypeptides of the present invention can be fused to marker sequences, such as a polypeptide which facilitates purification of the fused polypeptide. In preferred embodiments, the marker amino acid sequence is a hexa-histidine peptide, such as the tag provided in a pQE vector (QIAGEN, Inc., 9259 Eton Avenue, Chatsworth, Calif., 91311), among others, many of which are commercially available. As described in Gentz et al., Proc. Natl. Acad. Sci. USA 86:821-824 (1989), for instance, hexa-histidine provides for convenient purification of the fusion protein. Another peptide tag useful for purification, the “HA” tag, corresponds to an epitope derived from the influenza hemagglutinin protein (Wilson et al., Cell 37:767 (1984)).

[0242] Additional fusion proteins of the invention may be generated through the techniques of gene-shuffling, motif-shuffling, exon-shuffling, and/or codon-shuffling (collectively referred to as “DNA shuffling”). DNA shuffling may be employed to modulate the activities of polypeptides of the invention, such methods can be used to generate polypeptides with altered activity, as well as agonists and antagonists of the polypeptides. See, generally, U.S. Pat. Nos. 5,605,793; 5,811,238; 5,830,721; 5,834,252; and 5,837,458, and Patten et al., Curr. Opinion Biotechnol. 8:724-33 (1997); Harayama, Trends Biotechnol. 16(2):76-82 (1998); Hansson, et al., J. Mol. Biol. 287:265-76 (1999); and Lorenzo and Blasco, Biotechniques 24(2):308-13 (1998) (each of these patents and publications are hereby incorporated by reference in its entirety). In one embodiment, alteration of polynucleotides corresponding to SEQ ID NO:X and the polypeptides encoded by these polynucleotides may be achieved by DNA shuffling. DNA shuffling involves the assembly of two or more DNA segments by homologous or site-specific recombination to generate variation in the polynucleotide sequence. In another embodiment, polynucleotides of the invention, or the encoded polypeptides, may be altered by being subjected to random mutagenesis by error-prone PCR, random nucleotide insertion or other methods prior to recombination. In another embodiment, one or more components, motifs, sections, parts, domains, fragments, etc., of a polynucleotide encoding a polypeptide of the invention may be recombined with one or more components, motifs, sections, parts, domains, fragments, etc. of one or more heterologous molecules.

[0243] Thus, any of these above fusions can be engineered using the polynucleotides or the polypeptides of the present invention.

Recombinant and Synthetic Production of Polypeptides of the Invention

[0244] The present invention also relates to vectors containing the polynucleotide of the present invention, host cells, and the production of polypeptides by synthetic and recombinant techniques. The vector may be, for example, a phage, plasmid, viral, or retroviral vector. Retroviral vectors may be replication competent or replication defective. In the latter case, viral propagation generally will occur only in complementing host cells.

[0245] The polynucleotides of the invention may be joined to a vector containing a selectable marker for propagation in a host. Generally, a plasmid vector is introduced in a precipitate, such as a calcium phosphate precipitate, or in a complex with a charged lipid. If the vector is a virus, it may be packaged in vitro using an appropriate packaging cell line and then transduced into host cells.

[0246] The polynucleotide insert should be operatively linked to an appropriate promoter, such as the phage lambda PL promoter, the E. coli lac, trp, phoA and tac promoters, the SV40 early and late promoters and promoters of retroviral LTRs, to name a few. Other suitable promoters will be known to the skilled artisan. The expression constructs will further contain sites for transcription initiation, termination, and, in the transcribed region, a ribosome binding site for translation. The coding portion of the transcripts expressed by the constructs will preferably include a translation initiating codon at the beginning and a termination codon (UAA, UGA or UAG) appropriately positioned at the end of the polypeptide to be translated.

[0247] As indicated, the expression vectors will preferably include at least one selectable marker. Such markers include dihydrofolate reductase, G418, glutamine synthase, or neomycin resistance for eukaryotic cell culture, and tetracycline, kanamycin or ampicillin resistance genes for culturing in E. coli and other bacteria. Representative examples of appropriate hosts include, but are not limited to, bacterial cells, such as E. coli, Streptomyces and Salmonella typhimurium cells; fungal cells, such as yeast cells (e.g., Saccharomyces cerevisiae or Pichia pastoris (ATCC Accession No. 201178)); insect cells such as Drosophila S2 and Spodoptera Sf9 cells; animal cells such as CHO, COS, 293, and Bowes melanoma cells; and plant cells. Appropriate culture mediums and conditions for the above-described host cells are known in the art.

[0248] Among vectors preferred for use in bacteria include pQE70, pQE60 and pQE-9, available from QIAGEN, Inc.; pBluescript vectors, Phagescript vectors, pNH8A, pNH16a, pNH18A, pNH46A, available from Stratagene Cloning Systems, Inc.; and ptrc99a, pKK223-3, pKK233-3, pDR540, pRIT5 available from Pharmacia Biotech, Inc. Among preferred eukaryotic vectors are pWLNEO, pSV2CAT, pOG44, pXT1 and pSG available from Stratagene; and pSVK3, pBPV, pMSG and pSVL available from Pharmacia. Preferred expression vectors for use in yeast systems include, but are not limited to pYES2, pYD1, pTEF1/Zeo, pYES2/GS, pPICZ, pGAPZ, pGAPZalph, pPIC9, pPIC3.5, pHIL-D2, pHIL-S1, pPIC3.5K, pPIC9K, and PAO815 (all available from Invitrogen, Carlbad, Calif.). Other suitable vectors will be readily apparent to the skilled artisan.

[0249] Vectors which use glutamine synthase (GS) or DHFR as the selectable markers can be amplified in the presence of the drugs methionine sulphoximine or methotrexate, respectively. An advantage of glutamine synthase based vectors are the availabilty of cell lines (e.g., the murine myeloma cell line, NS0) which are glutamine synthase negative. Glutamine synthase expression systems can also function in glutamine synthase expressing cells (e.g., Chinese Hamster Ovary (CHO) cells) by providing additional inhibitor to prevent the functioning of the endogenous gene. A glutamine synthase expression system and components thereof are detailed in PCT publications: WO87/04462; WO86/05807; WO89/01036; WO89/10404; and WO91/06657, which are hereby incorporated in their entireties by reference herein. Additionally, glutamine synthase expression vectors can be obtained from Lonza Biologics, Inc. (Portsmouth, N.H.). Expression and production of monoclonal antibodies using a GS expression system in murine myeloma cells is described in Bebbington et al., Bio/technology 10:169(1992) and in Biblia and Robinson Biotechnol. Prog. 11:1 (1995) which are herein incorporated by reference.

[0250] The present invention also relates to host cells containing the above-described vector constructs described herein, and additionally encompasses host cells containing nucleotide sequences of the invention that are operably associated with one or more heterologous control regions (e.g., promoter and/or enhancer) using techniques known of in the art. The host cell can be a higher eukaryotic cell, such as a mammalian cell (e.g., a human derived cell), or a lower eukaryotic cell, such as a yeast cell, or the host cell can be a prokaryotic cell, such as a bacterial cell. A host strain may be chosen which modulates the expression of the inserted gene sequences, or modifies and processes the gene product in the specific fashion desired. Expression from certain promoters can be elevated in the presence of certain inducers; thus expression of the genetically engineered polypeptide may be controlled. Furthermore, different host cells have characteristics and specific mechanisms for the translational and post-translational processing and modification (e.g., phosphorylation, cleavage) of proteins. Appropriate cell lines can be chosen to ensure the desired modifications and processing of the foreign protein expressed.

[0251] Introduction of the nucleic acids and nucleic acid constructs of the invention into the host cell can be effected by calcium phosphate transfection, DEAE-dextran mediated transfection, cationic lipid-mediated transfection, electroporation, transduction, infection, or other methods. Such methods are described in many standard laboratory manuals, such as Davis et al., Basic Methods In Molecular Biology (1986). It is specifically contemplated that the polypeptides of the present invention may in fact be expressed by a host cell lacking a recombinant vector.

[0252] In addition to encompassing host cells containing the vector constructs discussed herein, the invention also encompasses primary, secondary, and immortalized host cells of vertebrate origin, particularly mammalian origin, that have been engineered to delete or replace endogenous genetic material (e.g., the coding sequence), and/or to include genetic material (e.g., heterologous polynucleotide sequences) that is operably associated with polynucleotides of the invention, and which activates, alters, and/or amplifies endogenous polynucleotides. For example, techniques known in the art may be used to operably associate heterologous control regions (e.g., promoter and/or enhancer) and endogenous polynucleotide sequences via homologous recombination (see, e.g., U.S. Pat. No. 5,641,670, issued Jun. 24, 1997; International Publication Number WO 96/29411; International Publication Number WO 94/12650; Koller et al., Proc. Natl. Acad. Sci USA 86:8932-8935 (1989); and Zijlstra et al., Nature 342:435-438 (1989), the disclosures of each of which are incorporated by reference in their entireties).

[0253] Polypeptides of the invention can be recovered and purified from recombinant cell cultures by well-known methods including ammonium sulfate or ethanol precipitation, acid extraction, anion or cation exchange chromatography, phosphocellulose chromatography, hydrophobic interaction chromatography, affinity chromatography, hydroxylapatite chromatography and lectin chromatography. Most preferably, high performance liquid chromatography (“HPLC”) is employed for purification.

[0254] Polypeptides of the present invention can also be recovered from: products purified from natural sources, including bodily fluids, tissues and cells, whether directly isolated or cultured; products of chemical synthetic procedures; and products produced by recombinant techniques from a prokaryotic or eukaryotic host, including, for example, bacterial, yeast, higher plant, insect, and mammalian cells. Depending upon the host employed in a recombinant production procedure, the polypeptides of the present invention may be glycosylated or may be non-glycosylated. In addition, polypeptides of the invention may also include an initial modified methionine residue, in some cases as a result of host-mediated processes. Thus, it is well known in the art that the N-terminal methionine encoded by the translation initiation codon generally is removed with high efficiency from any protein after translation in all eukaryotic cells. While the N-terminal methionine on most proteins also is efficiently removed in most prokaryotes, for some proteins, this prokaryotic removal process is inefficient, depending on the nature of the amino acid to which the N-terminal methionine is covalently linked.

[0255] In one embodiment, the yeast Pichia pastoris is used to express polypeptides of the invention in a eukaryotic system. Pichia pastoris is a methylotrophic yeast which can metabolize methanol as its sole carbon source. A main step in the methanol metabolization pathway is the oxidation of methanol to formaldehyde using O₂. This reaction is catalyzed by the enzyme alcohol oxidase. In order to metabolize methanol as its sole carbon source, Pichia pastoris must generate high levels of alcohol oxidase due, in part, to the relatively low affinity of alcohol oxidase for O₂. Consequently, in a growth medium depending on methanol as a main carbon source, the promoter region of one of the two alcohol oxidase genes (AOX1) is highly active. In the presence of methanol, alcohol oxidase produced from the AOX1 gene comprises up to approximately 30% of the total soluble protein in Pichia pastoris. See Ellis, S. B., et al., Mol. Cell. Biol. 5:1111-21 (1985); Koutz, P. J, et al., Yeast 5:167-77 (1989); Tschopp, J. F., et al., Nucl. Acids Res. 15:3859-76 (1987). Thus, a heterologous coding sequence, such as, for example, a polynucleotide of the present invention, under the transcriptional regulation of all or part of the AOX1 regulatory sequence is expressed at exceptionally high levels in Pichia yeast grown in the presence of methanol.

[0256] In one example, the plasmid vector pPIC9K is used to express DNA encoding a polypeptide of the invention, as set forth herein, in a Pichea yeast system essentially as described in “Pichia Protocols: Methods in Molecular Biology,” D. R. Higgins and J. Cregg, eds. The Humana Press, Totowa, N.J., 1998. This expression vector allows expression and secretion of a polypeptide of the invention by virtue of the strong AOX1 promoter linked to the Pichia pastoris alkaline phosphatase (PHO) secretory signal peptide (i.e., leader) located upstream of a multiple cloning site.

[0257] Many other yeast vectors could be used in place of pPIC9K, such as, pYES2, pYD1, pTEF1/Zeo, pYES2/GS, pPICZ, pGAPZ, pGAPZalpha, pPIC9, pPIC3.5, pHIL-D2, pHIL-S1, pPIC3.5K, and PAO815, as one skilled in the art would readily appreciate, as long as the proposed expression construct provides appropriately located signals for transcription, translation, secretion (if desired), and the like, including an in-frame AUG as required.

[0258] In another embodiment, high-level expression of a heterologous coding sequence, such as, for example, a polynucleotide of the present invention, may be achieved by cloning the heterologous polynucleotide of the invention into an expression vector such as, for example, pGAPZ or pGAPZalpha, and growing the yeast culture in the absence of methanol.

[0259] In addition to encompassing host cells containing the vector constructs discussed herein, the invention also encompasses primary, secondary, and immortalized host cells of vertebrate origin, particularly mammalian origin, that have been engineered to delete or replace endogenous genetic material (e.g., coding sequence), and/or to include genetic material (e.g., heterologous polynucleotide sequences) that is operably associated with polynucleotides of the invention, and which activates, alters, and/or amplifies endogenous polynucleotides. For example, techniques known in the art may be used to operably associate heterologous control regions (e.g., promoter and/or enhancer) and endogenous polynucleotide sequences via homologous recombination (see, e.g., U.S. Pat. No. 5,641,670, issued Jun. 24, 1997; International Publication No. WO 96/29411, published Sep. 26, 1996; International Publication No. WO 94/12650, published Aug. 4, 1994; Koller et al., Proc. Natl. Acad. Sci. USA 86:8932-8935 (1989); and Zijlstra et al., Nature 342:435-438 (1989), the disclosures of each of which are incorporated by reference in their entireties).

[0260] In addition, polypeptides of the invention can be chemically synthesized using techniques known in the art (e.g., see Creighton, 1983, Proteins: Structures and Molecular Principles, W.H. Freeman & Co., N.Y., and Hunkapiller et al., Nature, 310:105-111 (1984)). For example, a polypeptide corresponding to a fragment of a polypeptide can be synthesized by use of a peptide synthesizer. Furthermore, if desired, nonclassical amino acids or chemical amino acid analogs can be introduced as a substitution or addition into the polypeptide sequence. Non-classical amino acids include, but are not limited to, to the D-isomers of the common amino acids, 2,4-diaminobutyric acid, a-amino isobutyric acid, 4-aminobutyric acid, Abu, 2-amino butyric acid, g-Abu, e-Ahx, 6-amino hexanoic acid, Aib, 2-amino isobutyric acid, 3-amino propionic acid, omithine, norleucine, norvaline, hydroxyproline, sarcosine, citrulline, homocitrulline, cysteic acid, t-butylglycine, t-butylalanine, phenylglycine, cyclohexylalanine, b-alanine, fluoro-amino acids, designer amino acids such as b-methyl amino acids, Ca-methyl amino acids, Na-methyl amino acids, and amino acid analogs in general. Furthermore, the amino acid can be D (dextrorotary) or L (levorotary).

[0261] The invention encompasses polypeptides of the present invention which are differentially modified during or after translation, e.g., by glycosylation, acetylation, phosphorylation, amidation, derivatization by known protecting/blocking groups, proteolytic cleavage, linkage to an antibody molecule or other cellular ligand, etc. Any of numerous chemical modifications may be carried out by known techniques, including but not limited, to specific chemical cleavage by cyanogen bromide, trypsin, chymotrypsin, papain, V8 protease, NaBH₄; acetylation, formylation, oxidation, reduction; metabolic synthesis in the presence of tunicamycin; etc.

[0262] Additional post-translational modifications encompassed by the invention include, for example, e.g., N-linked or O-linked carbohydrate chains, processing of N-terminal or C-terminal ends), attachment of chemical moieties to the amino acid backbone, chemical modifications of N-linked or O-linked carbohydrate chains, and addition or deletion of an N-terminal methionine residue as a result of procaryotic host cell expression. The polypeptides may also be modified with a detectable label, such as an enzymatic, fluorescent, isotopic or affinity label to allow for detection and isolation of the protein.

[0263] Examples of suitable enzymes include horseradish peroxidase, alkaline phosphatase, beta-galactosidase, or acetylcholinesterase; examples of suitable prosthetic group complexes include streptavidin/biotin and avidin/biotin; examples of suitable fluorescent materials include umbelliferone, fluorescein, fluorescein isothiocyanate, rhodamine, dichlorotriazinylamine fluorescein, dansyl chloride or phycoerythrin; an example of a luminescent material includes luminol; examples of bioluminescent materials include luciferase, luciferin, and aequorin; and examples of suitable radioactive material include iodine (¹²¹I, ¹²³I, ¹²⁵I, ¹³¹I), carbon (¹⁴C), sulfur (³⁵S), tritium (³H), indium (¹¹¹In, ¹¹²In, ^{113m}In, ^{115m}In), technetium (⁹⁹Tc, ^{99m}Tc), thallium (²⁰¹Ti), gallium (⁶⁸Ga, ⁶⁷Ga), palladium (¹⁰³Pd), molybdenum (⁹⁹Mo), xenon (¹³³Xe), fluorine (¹⁸F), ¹⁵³Sm, ¹⁷⁷Lu, ¹⁵⁹Gd, ¹⁴⁹ Pm, ¹⁴⁰La, ¹⁷⁵Yb, 166Ho, ⁹⁰Y, ⁴⁷Sc, ¹⁸⁶Re, ¹⁸⁸Re, ¹⁴²Pr, ¹⁰⁵Rh, and ⁹⁷Ru.

[0264] In specific embodiments, a polypeptide of the present invention or fragment or variant thereof is attached to macrocyclic chelators that associate with radiometal ions, including but not limited to, ¹⁷⁷Lu, ⁹⁰Y, 166Ho, and ¹⁵³Sm, to polypeptides. In a preferred embodiment, the radiometal ion associated with the macrocyclic chelators is ¹¹¹In. In another preferred embodiment, the radiometal ion associated with the macrocyclic chelator is ⁹⁰Y. In specific embodiments, the macrocyclic chelator is 1,4,7,10-tetraazacyclododecane-N,N′,N″,N′″-tetraacetic acid (DOTA). In other specific embodiments, DOTA is attached to an antibody of the invention or fragment thereof via a linker molecule. Examples of linker molecules useful for conjugating DOTA to a polypeptide are commonly known in the art—see, for example, DeNardo et al., Clin Cancer Res. 4(10):2483-90 (1998); Peterson et al., Bioconjug. Chem. 10(4):553-7 (1999); and Zimmerman et al, Nucl. Med. Biol. 26(8):943-50 (1999); which are hereby incorporated by reference in their entirety.

[0265] As mentioned, the proteins of the invention may be modified by either natural processes, such as posttranslational processing, or by chemical modification techniques which are well known in the art. It will be appreciated that the same type of modification may be present in the same or varying degrees at several sites in a given polypeptide. Polypeptides of the invention may be branched, for example, as a result of ubiquitination, and they may be cyclic, with or without branching. Cyclic, branched, and branched cyclic polypeptides may result from posttranslation natural processes or may be made by synthetic methods. Modifications include acetylation, acylation, ADP-ribosylation, amidation, covalent attachment of flavin, covalent attachment of a heme moiety, covalent attachment of a nucleotide or nucleotide derivative, covalent attachment of a lipid or lipid derivative, covalent attachment of phosphotidylinositol, cross-linking, cyclization, disulfide bond formation, demethylation, formation of covalent cross-links, formation of cysteine, formation of pyroglutamate, formylation, gamma-carboxylation, glycosylation, GPI anchor formation, hydroxylation, iodination, methylation, myristoylation, oxidation, pegylation, proteolytic processing, phosphorylation, prenylation, racemization, selenoylation, sulfation, transfer-RNA mediated addition of amino acids to proteins such as arginylation, and ubiquitination. (See, for instance, PROTEINS—STRUCTURE AND MOLECULAR PROPERTES, 2nd Ed., T. E. Creighton, W. H. Freeman and Company, New York (1993); POSTTRANSLATIONAL COVALENT MODIFICATION OF PROTEINS, B. C. Johnson, Ed., Academic Press, New York, pgs. 1-12 (1983); Seifter et al., Meth. Enzymol. 182:626-646 (1990); Rattan et al., Ann. N.Y. Acad. Sci. 663:48-62 (1992)).

[0266] Also provided by the invention are chemically modified derivatives of the polypeptides of the invention which may provide additional advantages such as increased solubility, stability and circulating time of the polypeptide, or decreased immunogenicity (see U.S. Pat. No. 4,179,337). The chemical moieties for derivitization may be selected from water soluble polymers such as polyethylene glycol, ethylene glycol/propylene glycol copolymers, carboxymethylcellulose, dextran, polyvinyl alcohol and the like. The polypeptides may be modified at random positions within the molecule, or at predetermined positions within the molecule and may include one, two, three or more attached chemical moieties.

[0267] The polymer may be of any molecular weight, and may be branched or unbranched. For polyethylene glycol, the preferred molecular weight is between about 1 kDa and about 100 kDa (the term “about” indicating that in preparations of polyethylene glycol, some molecules will weigh more, some less, than the stated molecular weight) for ease in handling and manufacturing. Other sizes may be used, depending on the desired therapeutic profile (e.g., the duration of sustained release desired, the effects, if any on biological activity, the ease in handling, the degree or lack of antigenicity and other known effects of the polyethylene glycol to a therapeutic protein or analog). For example, the polyethylene glycol may have an average molecular weight of about 200, 500, 1000, 1500, 2000, 2500, 3000, 3500, 4000, 4500, 5000, 5500, 6000, 6500, 7000, 7500, 8000, 8500, 9000, 9500, 10,000, 10,500, 11,000, 11,500, 12,000, 12,500, 13,000, 13,500, 14,000, 14,500, 15,000, 15,500, 16,000, 16,500, 17,000, 17,500, 18,000, 18,500, 19,000, 19,500, 20,000, 25,000, 30,000, 35,000, 40,000, 45,000, 50,000, 55,000, 60,000, 65,000, 70,000, 75,000, 80,000, 85,000, 90,000, 95,000, or 100,000 kDa.

[0268] As noted above, the polyethylene glycol may have a branched structure. Branched polyethylene glycols are described, for example, in U.S. Pat. No. 5,643,575; Morpurgo et al., Appl. Biochem. Biotechnol. 56:59-72 (1996); Vorobjev et al., Nucleosides Nucleotides 18:2745-2750 (1999); and Caliceti et al., Bioconjug. Chem. 10:638-646 (1999), the disclosures of each of which are incorporated herein by reference.

[0269] The polyethylene glycol molecules (or other chemical moieties) should be attached to the protein with consideration of effects on functional or antigenic domains of the protein. There are a number of attachment methods available to those skilled in the art, such as, for example, the method disclosed in EP 0 401 384 (coupling PEG to G-CSF), herein incorporated by reference; see also Malik et al., Exp. Hematol. 20:1028-1035 (1992), reporting pegylation of GM-CSF using tresyl chloride. For example, polyethylene glycol may be covalently bound through amino acid residues via a reactive group, such as a free amino or carboxyl group. Reactive groups are those to which an activated polyethylene glycol molecule may be bound. The amino acid residues having a free amino group may include lysine residues and the N-terminal amino acid residues; those having a free carboxyl group may include aspartic acid residues glutamic acid residues and the C-terminal amino acid residue. Sulfhydryl groups may also be used as a reactive group for attaching the polyethylene glycol molecules. Preferred for therapeutic purposes is attachment at an amino group, such as attachment at the N-terminus or lysine group.

[0270] As suggested above, polyethylene glycol may be attached to proteins via linkage to any of a number of amino acid residues. For example, polyethylene glycol can be linked to proteins via covalent bonds to lysine, histidine, aspartic acid, glutamic acid, or cysteine residues. One or more reaction chemistries may be employed to attach polyethylene glycol to specific amino acid residues (e.g., lysine, histidine, aspartic acid, glutamic acid, or cysteine) of the protein or to more than one type of amino acid residue (e.g., lysine, histidine, aspartic acid, glutamic acid, cysteine and combinations thereof) of the protein.

[0271] One may specifically desire proteins chemically modified at the N-terminus. Using polyethylene glycol as an illustration of the present composition, one may select from a variety of polyethylene glycol molecules (by molecular weight, branching, etc.), the proportion of polyethylene glycol molecules to protein (polypeptide) molecules in the reaction mix, the type of pegylation reaction to be performed, and the method of obtaining the selected N-terminally pegylated protein. The method of obtaining the N-terminally pegylated preparation (i.e., separating this moiety from other monopegylated moieties if necessary) may be by purification of the N-terminally pegylated material from a population of pegylated protein molecules. Selective proteins chemically modified at the N-terminus modification may be accomplished by reductive alkylation that exploits differential reactivity of different types of primary amino groups (lysine versus the N-terminal) available for derivatization in a particular protein. Under the appropriate reaction conditions, substantially selective derivatization of the protein at the N-terminus with a carbonyl group containing polymer is achieved.

[0272] As indicated above, pegylation of the proteins of the invention may be accomplished by any number of means. For example, polyethylene glycol may be attached to the protein either directly or by an intervening linker. Linkerless systems for attaching polyethylene glycol to proteins are described in Delgado et al., Crit. Rev. Thera. Drug Carrier Sys. 9:249-304 (1992); Francis et al., Intern. J. of Hematol. 68:1-18 (1998); U.S. Pat. No. 4,002,531; U.S. Pat. No. 5,349,052; WO 95/06058; and WO 98/32466, the disclosures of each of which are incorporated herein by reference.

[0273] One system for attaching polyethylene glycol directly to amino acid residues of proteins without an intervening linker employs tresylated MPEG, which is produced by the modification of monmethoxy polyethylene glycol (MPEG) using tresylchloride (CISO₂CH₂CF₃). Upon reaction of protein with tresylated MPEG, polyethylene glycol is directly attached to amine groups of the protein. Thus, the invention includes protein-polyethylene glycol conjugates produced by reacting proteins of the invention with a polyethylene glycol molecule having a 2,2,2-trifluoreothane sulphonyl group.

[0274] Polyethylene glycol can also be attached to proteins using a number of different intervening linkers. For example, U.S. Pat. No. 5,612,460, the entire disclosure of which is incorporated herein by reference, discloses urethane linkers for connecting polyethylene glycol to proteins. Protein-polyethylene glycol conjugates wherein the polyethylene glycol is attached to the protein by a linker can also be produced by reaction of proteins with compounds such as MPEG-succinimidylsuccinate, MPEG activated with 1,1′-carbonyldiimidazole, MPEG-2,4,5-trichloropenylcarbonate, MPEG-p-nitrophenolcarbonate, and various MPEG-succinate derivatives. A number of additional polyethylene glycol derivatives and reaction chemistries for attaching polyethylene glycol to proteins are described in International Publication No. WO 98/32466, the entire disclosure of which is incorporated herein by reference. Pegylated protein products produced using the reaction chemistries set out herein are included within the scope of the invention.

[0275] The number of polyethylene glycol moieties attached to each protein of the invention (i.e., the degree of substitution) may also vary. For example, the pegylated proteins of the invention may be linked, on average, to 1, 2, 3, 4, 5, 6, 7, 8, 9, 10, 12, 15, 17, 20, or more polyethylene glycol molecules. Similarly, the average degree of substitution within ranges such as 1-3, 2-4, 3-5, 4-6, 5-7, 6-8, 7-9, 8-10, 9-11, 10-12, 11-13, 12-14, 13-15, 14-16, 15-17, 16-18, 17-19, or 18-20 polyethylene glycol moieties per protein molecule. Methods for determining the degree of substitution are discussed, for example, in Delgado et al., Crit. Rev. Thera. Drug Carrier Sys. 9:249-304 (1992).

[0276] The polypeptides of the invention can be recovered and purified from chemical synthesis and recombinant cell cultures by standard methods which include, but are not limited to, ammonium sulfate or ethanol precipitation, acid extraction, anion or cation exchange chromatography, phosphocellulose chromatography, hydrophobic interaction chromatography, affinity chromatography, hydroxylapatite chromatography and lectin chromatography. Most preferably, high performance liquid chromatography (“HPLC”) is employed for purification. Well known techniques for refolding protein may be employed to regenerate active conformation when the polypeptide is denatured during isolation and/or purification.

[0277] The polypeptides of the invention may be in monomers or multimers (i.e., dimers, trimers, tetramers and higher multimers). Accordingly, the present invention relates to monomers and multimers of the polypeptides of the invention, their preparation, and compositions (preferably, Therapeutics) containing them. In specific embodiments, the polypeptides of the invention are monomers, dimers, trimers or tetramers. In additional embodiments, the multimers of the invention are at least dimers, at least trimers, or at least tetramers.

[0278] Multimers encompassed by the invention may be homomers or heteromers. As used herein, the term homomer refers to a multimer containing only polypeptides corresponding to a protein of the invention (e.g., the amino acid sequence of SEQ ID NO:Y, an amino acid sequence encoded by SEQ ID NO:X or the complement of SEQ ID NO:X, the amino acid sequence encoded by the portion of SEQ ID NO:X as defined in columns 8 and 9 of Table 2, and/or an amino acid sequence encoded by cDNA contained in ATCC Deposit No:Z (including fragments, variants, splice variants, and fusion proteins, corresponding to these as described herein)). These homomers may contain polypeptides having identical or different amino acid sequences. In a specific embodiment, a homomer of the invention is a multimer containing only polypeptides having an identical amino acid sequence. In another specific embodiment, a homomer of the invention is a multimer containing polypeptides having different amino acid sequences. In specific embodiments, the multimer of the invention is a homodimer (e.g., containing two polypeptides having identical or different amino acid sequences) or a homotrimer (e.g., containing three polypeptides having identical and/or different amino acid sequences). In additional embodiments, the homomeric multimer of the invention is at least a homodimer, at least a homotrimer, or at least a homotetramer.

[0279] As used herein, the term heteromer refers to a multimer containing one or more heterologous polypeptides (i.e., polypeptides of different proteins) in addition to the polypeptides of the invention. In a specific embodiment, the multimer of the invention is a heterodimer, a heterotrimer, or a heterotetramer. In additional embodiments, the heteromeric multimer of the invention is at least a heterodimer, at least a heterotrimer, or at least a heterotetramer.

[0280] Multimers of the invention may be the result of hydrophobic, hydrophilic, ionic and/or covalent associations and/or may be indirectly linked by, for example, liposome formation. Thus, in one embodiment, multimers of the invention, such as, for example, homodimers or homotrimers, are formed when polypeptides of the invention contact one another in solution. In another embodiment, heteromultimers of the invention, such as, for example, heterotrimers or heterotetramers, are formed when polypeptides of the invention contact antibodies to the polypeptides of the invention (including antibodies to the heterologous polypeptide sequence in a fusion protein of the invention) in solution. In other embodiments, multimers of the invention are formed by covalent associations with and/or between the polypeptides of the invention. Such covalent associations may involve one or more amino acid residues contained in the polypeptide sequence (e.g., that recited in SEQ ID NO:Y, encoded by the portion of SEQ ID NO:X as defined in columns 8 and 9 of Table 2, and/or encoded by the cDNA contained in ATCC Deposit No:Z). In one instance, the covalent associations are cross-linking between cysteine residues located within the polypeptide sequences which interact in the native (i.e., naturally occurring) polypeptide. In another instance, the covalent associations are the consequence of chemical or recombinant manipulation. Alternatively, such covalent associations may involve one or more amino acid residues contained in the heterologous polypeptide sequence in a fusion protein. In one example, covalent associations are between the heterologous sequence contained in a fusion protein of the invention (see, e.g., U.S. Pat. No. 5,478,925). In a specific example, the covalent associations are between the heterologous sequence contained in a Fc fusion protein of the invention (as described herein). In another specific example, covalent associations of fusion proteins of the invention are between heterologous polypeptide sequence from another protein that is capable of forming covalently associated multimers, such as for example, osteoprotegerin (see, e.g., International Publication NO: WO 98/49305, the contents of which are herein incorporated by reference in its entirety). In another embodiment, two or more polypeptides of the invention are joined through peptide linkers. Examples include those peptide linkers described in U.S. Pat. No. 5,073,627 (hereby incorporated by reference). Proteins comprising multiple polypeptides of the invention separated by peptide linkers may be produced using conventional recombinant DNA technology.

[0281] Another method for preparing multimer polypeptides of the invention involves use of polypeptides of the invention fused to a leucine zipper or isoleucine zipper polypeptide sequence. Leucine zipper and isoleucine zipper domains are polypeptides that promote multimerization of the proteins in which they are found. Leucine zippers were originally identified in several DNA-binding proteins (Landschulz et al., Science 240:1759, (1988)), and have since been found in a variety of different proteins. Among the known leucine zippers are naturally occurring peptides and derivatives thereof that dimerize or trimerize. Examples of leucine zipper domains suitable for producing soluble multimeric proteins of the invention are those described in PCT application WO 94/10308, hereby incorporated by reference. Recombinant fusion proteins comprising a polypeptide of the invention fused to a polypeptide sequence that dimerizes or trimerizes in solution are expressed in suitable host cells, and the resulting soluble multimeric fusion protein is recovered from the culture supernatant using techniques known in the art.

[0282] Trimeric polypeptides of the invention may offer the advantage of enhanced biological activity. Preferred leucine zipper moieties and isoleucine moieties are those that preferentially form trimers. One example is a leucine zipper derived from lung surfactant protein D (SPD), as described in Hoppe et al. (FEBS Letters 344:191, (1994)) and in U.S. patent application Ser. No. 08/446,922, hereby incorporated by reference. Other peptides derived from naturally occurring trimeric proteins may be employed in preparing trimeric polypeptides of the invention.

[0283] In another example, proteins of the invention are associated by interactions between Flag® polypeptide sequence contained in fusion proteins of the invention containing Flag® polypeptide sequence. In a further embodiment, proteins of the invention are associated by interactions between heterologous polypeptide sequence contained in Flag® fusion proteins of the invention and anti-Flag® antibody.

[0284] The multimers of the invention may be generated using chemical techniques known in the art. For example, polypeptides desired to be contained in the multimers of the invention may be chemically cross-linked using linker molecules and linker molecule length optimization techniques known in the art (see, e.g., U.S. Pat. No. 5,478,925, which is herein incorporated by reference in its entirety). Additionally, multimers of the invention may be generated using techniques known in the art to form one or more inter-molecule cross-links between the cysteine residues located within the sequence of the polypeptides desired to be contained in the multimer (see, e.g., U.S. Pat. No. 5,478,925, which is herein incorporated by reference in its entirety). Further, polypeptides of the invention may be routinely modified by the addition of cysteine or biotin to the C-terminus or N-terminus of the polypeptide and techniques known in the art may be applied to generate multimers containing one or more of these modified polypeptides (see, e.g., U.S. Pat. No. 5,478,925, which is herein incorporated by reference in its entirety). Additionally, techniques known in the art may be applied to generate liposomes containing the polypeptide components desired to be contained in the multimer of the invention (see, e.g., U.S. Pat. No. 5,478,925, which is herein incorporated by reference in its entirety).

[0285] Alternatively, multimers of the invention may be generated using genetic engineering techniques known in the art. In one embodiment, polypeptides contained in multimers of the invention are produced recombinantly using fusion protein technology described herein or otherwise known in the art (see, e.g., U.S. Pat. No. 5,478,925, which is herein incorporated by reference in its entirety). In a specific embodiment, polynucleotides coding for a homodimer of the invention are generated by ligating a polynucleotide sequence encoding a polypeptide of the invention to a sequence encoding a linker polypeptide and then further to a synthetic polynucleotide encoding the translated product of the polypeptide in the reverse orientation from the original C-terminus to the N-terminus (lacking the leader sequence) (see, e.g., U.S. Pat. No. 5,478,925, which is herein incorporated by reference in its entirety). In another embodiment, recombinant techniques described herein or otherwise known in the art are applied to generate recombinant polypeptides of the invention which contain a transmembrane domain (or hydrophobic or signal peptide) and which can be incorporated by membrane reconstitution techniques into liposomes (see, e.g., U.S. Pat. No. 5,478,925, which is herein incorporated by reference in its entirety).

Antibodies

[0286] Further polypeptides of the invention relate to antibodies and T-cell antigen receptors (TCR) which immunospecifically bind a polypeptide, polypeptide fragment, or variant of the invention (e.g., a polypeptide or fragment or variant of the amino acid sequence of SEQ ID NO:Y or a polypeptide encoded by the cDNA contained in ATCC Deposit No:Z, and/or an epitope, of the present invention) as determined by immunoassays well known in the art for assaying specific antibody-antigen binding. Antibodies of the invention include, but are not limited to, polyclonal, monoclonal, multispecific, human, humanized or chimeric antibodies, single chain antibodies, Fab fragments, F(ab′) fragments, fragments produced by a Fab expression library, anti-idiotypic (anti-Id) antibodies (including, e.g., anti-Id antibodies to antibodies of the invention), intracellularly-made antibodies (i.e., intrabodies), and epitope-binding fragments of any of the above. The term “antibody,” as used herein, refers to immunoglobulin molecules and immunologically active portions of immunoglobulin molecules, i.e., molecules that contain an antigen binding site that immunospecifically binds an antigen. The immunoglobulin molecules of the invention can be of any type (e.g., IgG, IgE, IgM, IgD, IgA and IgY), class (e.g., IgG1, IgG2, IgG3, IgG4, IgA1 and IgA2) or subclass of immunoglobulin molecule. In preferred embodiments, the immunoglobulin molecules of the invention are IgG1. In other preferred embodiments, the immunoglobulin molecules of the invention are IgG4.

[0287] Most preferably the antibodies are human antigen-binding antibody fragments of the present invention and include, but are not limited to, Fab, Fab′ and F(ab′)2, Fd, single-chain Fvs (scFv), single-chain antibodies, disulfide-linked Fvs (sdFv) and fragments comprising either a VL or VH domain. Antigen-binding antibody fragments, including single-chain antibodies, may comprise the variable region(s) alone or in combination with the entirety or a portion of the following: hinge region, CH1, CH2, and CH3 domains. Also included in the invention are antigen-binding fragments also comprising any combination of variable region(s) with a hinge region, CH1, CH2, and CH3 domains. The antibodies of the invention may be from any animal origin including birds and mammals. Preferably, the antibodies are human, murine (e.g., mouse and rat), donkey, ship rabbit, goat, guinea pig, camel, horse, or chicken. As used herein, “human” antibodies include antibodies having the amino acid sequence of a human immunoglobulin and include antibodies isolated from human immunoglobulin libraries or from animals transgenic for one or more human immunoglobulin and that do not express endogenous immunoglobulins, as described infra and, for example in, U.S. Pat. No. 5,939,598 by Kucherlapati et al.

[0288] The antibodies of the present invention may be monospecific, bispecific, trispecific or of greater multispecificity. Multispecific antibodies may be specific for different epitopes of a polypeptide of the present invention or may be specific for both a polypeptide of the present invention as well as for a heterologous epitope, such as a heterologous polypeptide or solid support material. See, e.g., PCT publications WO 93/17715; WO 92/08802; WO 91/00360; WO 92/05793; Tutt, et al., J. Immunol. 147:60-69 (1991); U.S. Pat. Nos. 4,474,893; 4,714,681; 4,925,648; 5,573,920; 5,601,819; Kostelny et al., J. Immunol. 148:1547-1553 (1992).

[0289] Antibodies of the present invention may be described or specified in terms of the epitope(s) or portion(s) of a polypeptide of the present invention which they recognize or specifically bind. The epitope(s) or polypeptide portion(s) may be specified as described herein, e.g., by N-terminal and C-terminal positions, or by size in contiguous amino acid residues, or listed in the Tables and Figures. Preferred epitopes of the invention include the predicted epitopes shown in Table 1B, as well as polynucleotides that encode these epitopes. Antibodies which specifically bind any epitope or polypeptide of the present invention may also be excluded. Therefore, the present invention includes antibodies that specifically bind polypeptides of the present invention, and allows for the exclusion of the same.

[0290] Antibodies of the present invention may also be described or specified in terms of their cross-reactivity. Antibodies that do not bind any other analog, ortholog, or homolog of a polypeptide of the present invention are included. Antibodies that bind polypeptides with at least 95%, at least 90%, at least 85%, at least 80%, at least 75%, at least 70%, at least 65%, at least 60%, at least 55%, and at least 50% identity (as calculated using methods known in the art and described herein) to a polypeptide of the present invention are also included in the present invention. In specific embodiments, antibodies of the present invention cross-react with murine, rat and/or rabbit homologs of human proteins and the corresponding epitopes thereof. Antibodies that do not bind polypeptides with less than 95%, less than 90%, less than 85%, less than 80%, less than 75%, less than 70%, less than 65%, less than 60%, less than 55%, and less than 50% identity (as calculated using methods known in the art and described herein) to a polypeptide of the present invention are also included in the present invention. In a specific embodiment, the above-described cross-reactivity is with respect to any single specific antigenic or immunogenic polypeptide, or combination(s) of 2, 3, 4, 5, or more of the specific antigenic and/or immunogenic polypeptides disclosed herein. Further included in the present invention are antibodies which bind polypeptides encoded by polynucleotides which hybridize to a polynucleotide of the present invention under stringent hybridization conditions (as described herein). Antibodies of the present invention may also be described or specified in terms of their binding affinity to a polypeptide of the invention. Preferred binding affinities include those with a dissociation constant or Kd less than 5×10⁻²M, 10⁻²M, 5×10⁻³ M, 10⁻³ M, 5×10⁻⁴ M, 10⁻⁴ M, 5×10⁻⁵ M, 10⁻⁻⁵ M, 5×10⁻⁶ M, 10⁻⁶M, 5×10⁻⁷ M, 10⁻⁷ M, 5×10⁻⁸ M, 10⁻⁻⁸ M, 5×10⁻⁹ M, 10⁻⁹ M, 5×10⁻¹⁰ M, 10⁻¹⁰ M, 5×10⁻¹¹ M, 10⁻¹¹ M, 5×10⁻¹² M, 10⁻¹² M, 5×10⁻¹³ M, 10⁻¹³ M, 5×10⁻¹⁴ M, 10⁻¹⁴ M, 5×10⁻¹⁵ M, or 10⁻¹⁵ M.

[0291] The invention also provides antibodies that competitively inhibit binding of an antibody to an epitope of the invention as determined by any method known in the art for determining competitive binding, for example, the immunoassays described herein. In preferred embodiments, the antibody competitively inhibits binding to the epitope by at least 95%, at least 90%, at least 85%, at least 80%, at least 75%, at least 70%, at least 60%, or at least 50%.

[0292] Antibodies of the present invention may act as agonists or antagonists of the polypeptides of the present invention. For example, the present invention includes antibodies which disrupt the receptor/ligand interactions with the polypeptides of the invention either partially or fully. Preferably, antibodies of the present invention bind an antigenic epitope disclosed herein, or a portion thereof. The invention features both receptor-specific antibodies and ligand-specific antibodies. The invention also features receptor-specific antibodies which do not prevent ligand binding but prevent receptor activation. Receptor activation (i.e., signaling) may be determined by techniques described herein or otherwise known in the art. For example, receptor activation can be determined by detecting the phosphorylation (e.g., tyrosine or serine/threonine) of the receptor or its substrate by immunoprecipitation followed by western blot analysis (for example, as described supra). In specific embodiments, antibodies are provided that inhibit ligand activity or receptor activity by at least 95%, at least 90%, at least 85%, at least 80%, at least 75%, at least 70%, at least 60%, or at least 50% of the activity in absence of the antibody.

[0293] The invention also features receptor-specific antibodies which both prevent ligand binding and receptor activation as well as antibodies that recognize the receptor-ligand complex, and, preferably, do not specifically recognize the unbound receptor or the unbound ligand. Likewise, included in the invention are neutralizing antibodies which bind the ligand and prevent binding of the ligand to the receptor, as well as antibodies which bind the ligand, thereby preventing receptor activation, but do not prevent the ligand from binding the receptor. Further included in the invention are antibodies which activate the receptor. These antibodies may act as receptor agonists, i.e., potentiate or activate either all or a subset of the biological activities of the ligand-mediated receptor activation, for example, by inducing dimerization of the receptor. The antibodies may be specified as agonists, antagonists or inverse agonists for biological activities comprising the specific biological activities of the peptides of the invention disclosed herein. The above antibody agonists can be made using methods known in the art. See, e.g., PCT publication WO 96/40281; U.S. Pat. No. 5,811,097; Deng et al., Blood 92(6): 1981-1988 (1998); Chen et al., Cancer Res. 58(16):3668-3678 (1998); Harrop et al., J. Immunol. 161(4):1786-1794 (1998); Zhu et al., Cancer Res. 58(15):3209-3214 (1998); Yoon et al., J. Immunol. 160(7):3170-3179 (1998); Prat et al., J. Cell. Sci. 111(Pt2):237-247 (1998); Pitard et al., J. Immunol. Methods 205(2):177-190 (1997); Liautard et al., Cytokine 9(4):233-241 (1997); Carlson et al., J. Biol. Chem. 272(17):11295-11301 (1997); Taryman et al., Neuron 14(4):755-762 (1995); Muller et al., Structure 6(9):1153-1167 (1998); Bartunek et al., Cytokine 8(1):14-20 (1996) (which are all incorporated by reference herein in their entireties).

[0294] Antibodies of the present invention may be used, for example, to purify, detect, and target the polypeptides of the present invention, including both in vitro and in vivo diagnostic and therapeutic methods. For example, the antibodies have utility in immunoassays for qualitatively and quantitatively measuring levels of the polypeptides of the present invention in biological samples. See, e.g., Harlow et al., Antibodies: A Laboratory Manual, (Cold Spring Harbor Laboratory Press, 2nd ed. 1988); incorporated by reference herein in its entirety.

[0295] As discussed in more detail below, the antibodies of the present invention may be used either alone or in combination with other compositions. The antibodies may further be recombinantly fused to a heterologous polypeptide at the N- or C-terminus or chemically conjugated (including covalent and non-covalent conjugations) to polypeptides or other compositions. For example, antibodies of the present invention may be recombinantly fused or conjugated to molecules useful as labels in detection assays and effector molecules such as heterologous polypeptides, drugs, radionuclides, or toxins. See, e.g., PCT publications WO 92/08495; WO 91/14438; WO 89/12624; U.S. Pat. No. 5,314,995; and EP 396,387; the disclosures of which are incorporated herein by reference in their entireties.

[0296] The antibodies of the invention include derivatives that are modified, i.e, by the covalent attachment of any type of molecule to the antibody such that covalent attachment does not prevent the antibody from generating an anti-idiotypic response. For example, but not by way of limitation, the antibody derivatives include antibodies that have been modified, e.g., by glycosylation, acetylation, pegylation, phosphylation, amidation, derivatization by known protecting/blocking groups, proteolytic cleavage, linkage to a cellular ligand or other protein, etc.

[0297] Any of numerous chemical modifications may be carried out by known techniques, including, but not limited to specific chemical cleavage, acetylation, formylation, metabolic synthesis of tunicamycin, etc. Additionally, the derivative may contain one or more non-classical amino acids. The antibodies of the present invention may be generated by any suitable method known in the art. Polyclonal antibodies to an antigen-of-interest can be produced by various procedures well known in the art. For example, a polypeptide of the invention can be administered to various host animals including, but not limited to, rabbits, mice, rats, etc. to induce the production of sera containing polyclonal antibodies specific for the antigen. Various adjuvants may be used to increase the immunological response, depending on the host species, and include but are not limited to, Freund's (complete and incomplete), mineral gels such as aluminum hydroxide, surface active substances such as lysolecithin, pluronic polyols, polyanions, peptides, oil emulsions, keyhole limpet hemocyanins, dinitrophenol, and potentially useful human adjuvants such as BCG (bacille Calmette-Guerin) and corynebacterium parvum. Such adjuvants are also well known in the art.

[0298] Monoclonal antibodies can be prepared using a wide variety of techniques known in the art including the use of hybridoma, recombinant, and phage display technologies, or a combination thereof. For example, monoclonal antibodies can be produced using hybridoma techniques including those known in the art and taught, for example, in Harlow et al., Antibodies: A Laboratory Manual, (Cold Spring Harbor Laboratory Press, 2nd ed. 1988); Hammerling, et al., in: Monoclonal Antibodies and T-Cell Hybridomas 563-681 (Elsevier, N.Y., 1981) (said references incorporated by reference in their entireties). The term “monoclonal antibody” as used herein is not limited to antibodies produced through hybridoma technology. The term “monoclonal antibody” refers to an antibody that is derived from a single clone, including any eukaryotic, prokaryotic, or phage clone, and not the method by which it is produced.

[0299] Methods for producing and screening for specific antibodies using hybridoma technology are routine and well known in the art and are discussed in detail in the Examples. In a non-limiting example, mice can be immunized with a polypeptide of the invention or a cell expressing such peptide. Once an immune response is detected, e.g., antibodies specific for the antigen are detected in the mouse serum, the mouse spleen is harvested and splenocytes isolated. The splenocytes are then fused by well known techniques to any suitable myeloma cells, for example cells from cell line SP20 available from the ATCC. Hybridomas are selected and cloned by limited dilution. The hybridoma clones are then assayed by methods known in the art for cells that secrete antibodies capable of binding a polypeptide of the invention. Ascites fluid, which generally contains high levels of antibodies, can be generated by immunizing mice with positive hybridoma clones.

[0300] Accordingly, the present invention provides methods of generating monoclonal antibodies as well as antibodies produced by the method comprising culturing a hybridoma cell secreting an antibody of the invention wherein, preferably, the hybridoma is generated by fusing splenocytes isolated from a mouse immunized with an antigen of the invention with myeloma cells and then screening the hybridomas resulting from the fusion for hybridoma clones that secrete an antibody able to bind a polypeptide of the invention.

[0301] Another well known method for producing both polyclonal and monoclonal human B cell lines is transformation using Epstein Barr Virus (EBV). Protocols for generating EBV-transformed B cell lines are commonly known in the art, such as, for example, the protocol outlined in Chapter 7.22 of Current Protocols in Immunology, Coligan et al., Eds., 1994, John Wiley & Sons, NY, which is hereby incorporated in its entirety by reference. The source of B cells for transformation is commonly human peripheral blood, but B cells for transformation may also be derived from other sources including, but not limited to, lymph nodes, tonsil, spleen, tumor tissue, and infected tissues. Tissues are generally made into single cell suspensions prior to EBV transformation. Additionally, steps may be taken to either physically remove or inactivate T cells (e.g., by treatment with cyclosporin A) in B cell-containing samples, because T cells from individuals seropositive for anti-EBV antibodies can suppress B cell immortalization by EBV.

[0302] In general, the sample containing human B cells is innoculated with EBV, and cultured for 3-4 weeks. A typical source of EBV is the culture supernatant of the B95-8 cell line (ATCC #VR-1492). Physical signs of EBV transformation can generally be seen towards the end of the 3-4 week culture period. By phase-contrast microscopy, transformed cells may appear large, clear, hairy and tend to aggregate in tight clusters of cells. Initially, EBV lines are generally polyclonal. However, over prolonged periods of cell cultures, EBV lines may become monoclonal or polyclonal as a result of the selective outgrowth of particular B cell clones. Alternatively, polyclonal EBV transformed lines may be subcloned (e.g., by limiting dilution culture) or fused with a suitable fusion partner and plated at limiting dilution to obtain monoclonal B cell lines. Suitable fusion partners for EBV transformed cell lines include mouse myeloma cell lines (e.g., SP2/0, X63-Ag8.653), heteromyeloma cell lines (human×mouse; e.g, SPAM-8, SBC-R20, and CB-F7), and human cell lines (e.g., GM 1500, SKO-007, RPMI 8226, and KR-4). Thus, the present invention also provides a method of generating polyclonal or monoclonal human antibodies against polypeptides of the invention or fragments thereof, comprising EBV-transformation of human B cells.

[0303] Antibody fragments which recognize specific epitopes may be generated by known techniques. For example, Fab and F(ab′)2 fragments of the invention may be produced by proteolytic cleavage of immunoglobulin molecules, using enzymes such as papain (to produce Fab fragments) or pepsin (to produce F(ab′)2 fragments). F(ab′)2 fragments contain the variable region, the light chain constant region and the CH1 domain of the heavy chain.

[0304] For example, the antibodies of the present invention can also be generated using various phage display methods known in the art. In phage display methods, functional antibody domains are displayed on the surface of phage particles which carry the polynucleotide sequences encoding them. In a particular embodiment, such phage can be utilized to display antigen binding domains expressed from a repertoire or combinatorial antibody library (e.g., human or murine). Phage expressing an antigen binding domain that binds the antigen of interest can be selected or identified with antigen, e.g., using labeled antigen or antigen bound or captured to a solid surface or bead. Phage used in these methods are typically filamentous phage including fd and M13 binding domains expressed from phage with Fab, Fv or disulfide stabilized Fv antibody domains recombinantly fused to either the phage gene III or gene VIII protein. Examples of phage display methods that can be used to make the antibodies of the present invention include those disclosed in Brinkman et al., J. Immunol. Methods 182:41-50 (1995); Ames et al., J. Immunol. Methods 184:177-186 (1995); Kettleborough et al., Eur. J. Immunol. 24:952-958 (1994); Persic et al., Gene 187 9-18 (1997); Burton et al., Advances in Immunology 57:191-280 (1994); PCT application No. PCT/GB91/01134; PCT publications WO 90/02809; WO 91/10737; WO 92/01047; WO 92/18619; WO 93/11236; WO 95/15982; WO 95/20401; and U.S. Pat. Nos. 5,698,426; 5,223,409; 5,403,484; 5,580,717; 5,427,908; 5,750,753; 5,821,047; 5,571,698; 5,427,908; 5,516,637; 5,780,225; 5,658,727; 5,733,743 and 5,969,108; each of which is incorporated herein by reference in its entirety.

[0305] As described in the above references, after phage selection, the antibody coding regions from the phage can be isolated and used to generate whole antibodies, including human antibodies, or any other desired antigen binding fragment, and expressed in any desired host, including mammalian cells, insect cells, plant cells, yeast, and bacteria, e.g., as described in detail below. For example, techniques to recombinantly produce Fab, Fab′ and F(ab′)2 fragments can also be employed using methods known in the art such as those disclosed in PCT publication WO 92/22324; Mullinax et al., BioTechniques 12(6):864-869 (1992); and Sawai et al., AJRI 34:26-34 (1995); and Better et al., Science 240:1041-1043 (1988) (said references incorporated by reference in their entireties).

[0306] Examples of techniques which can be used to produce single-chain Fvs and antibodies include those described in U.S. Pat. Nos. 4,946,778 and 5,258,498; Huston et al., Methods in Enzymology 203:46-88 (1991); Shu et al., PNAS 90:7995-7999 (1993); and Skerra et al., Science 240:1038-1040 (1988). For some uses, including in vivo use of antibodies in humans and in vitro detection assays, it may be preferable to use chimeric, humanized, or human antibodies. A chimeric antibody is a molecule in which different portions of the antibody are derived from different animal species, such as antibodies having a variable region derived from a murine monoclonal antibody and a human immunoglobulin constant region. Methods for producing chimeric antibodies are known in the art. See e.g., Morrison, Science 229:1202 (1985); Oi et al., BioTechniques 4:214 (1986); Gillies et al., (1989) J. Immunol. Methods 125:191-202; U.S. Pat. Nos. 5,807,715; 4,816,567; and 4,816,397, which are incorporated herein by reference in their entirety. Humanized antibodies are antibody molecules from non-human species antibody that binds the desired antigen having one or more complementarity determining regions (CDRs) from the non-human species and a framework region from a human immunoglobulin molecule. Often, framework residues in the human framework regions will be substituted with the corresponding residue from the CDR donor antibody to alter, preferably improve, antigen binding. These framework substitutions are identified by methods well known in the art, e.g., by modeling of the interactions of the CDR and framework residues to identify framework residues important for antigen binding and sequence comparison to identify unusual framework residues at particular positions. (See, e.g., Queen et al., U.S. Pat. No. 5,585,089; Riechmann et al., Nature 332:323 (1988), which are incorporated herein by reference in their entireties.) Antibodies can be humanized using a variety of techniques known in the art including, for example, CDR-grafting (EP 239,400; PCT publication WO 91/09967; U.S. Pat. Nos. 5,225,539; 5,530,101; and 5,585,089), veneering or resurfacing (EP 592,106; EP 519,596; Padlan, Molecular Immunology 28(4/5):489-498 (1991); Studnicka et al., Protein Engineering 7(6):805-814 (1994); Roguska. et al., PNAS 91:969-973 (1994)), and chain shuffling (U.S. Pat. No. 5,565,332).

[0307] Completely human antibodies are particularly desirable for therapeutic treatment of human patients. Human antibodies can be made by a variety of methods known in the art including phage display methods described above using antibody libraries derived from human immunoglobulin sequences. See also, U.S. Pat. Nos. 4,444,887 and 4,716,111; and PCT publications WO 98/46645, WO 98/50433, WO 98/24893, WO 98/16654, WO 96/34096, WO 96/33735, and WO 91/10741; each of which is incorporated herein by reference in its entirety.

[0308] Human antibodies can also be produced using transgenic mice which are incapable of expressing functional endogenous immunoglobulins, but which can express human immunoglobulin genes. For example, the human heavy and light chain immunoglobulin gene complexes may be introduced randomly or by homologous recombination into mouse embryonic stem cells. Alternatively, the human variable region, constant region, and diversity region may be introduced into mouse embryonic stem cells in addition to the human heavy and light chain genes. The mouse heavy and light chain immunoglobulin genes may be rendered non-functional separately or simultaneously with the introduction of human immunoglobulin loci by homologous recombination. In particular, homozygous deletion of the JH region prevents endogenous antibody production. The modified embryonic stem cells are expanded and microinjected into blastocysts to produce chimeric mice. The chimeric mice are then bred to produce homozygous offspring which express human antibodies. The transgenic mice are immunized in the normal fashion with a selected antigen, e.g., all or a portion of a polypeptide of the invention. Monoclonal antibodies directed against the antigen can be obtained from the immunized, transgenic mice using conventional hybridoma technology. The human immunoglobulin transgenes harbored by the transgenic mice rearrange during B cell differentiation, and subsequently undergo class switching and somatic mutation. Thus, using such a technique, it is possible to produce therapeutically useful IgG, IgA, IgM and IgE antibodies. For an overview of this technology for producing human antibodies, see Lonberg and Huszar, Int. Rev. Immunol. 13:65-93 (1995). For a detailed discussion of this technology for producing human antibodies and human monoclonal antibodies and protocols for producing such antibodies, see, e.g., PCT publications WO 98/24893; WO 92/01047; WO 96/34096; WO 96/33735; European Patent No. 0 598 877; U.S. Pat. Nos. 5,413,923; 5,625,126; 5,633,425; 5,569,825; 5,661,016; 5,545,806; 5,814,318; 5,885,793; 5,916,771; 5,939,598; 6,075,181; and 6,114,598, which are incorporated by reference herein in their entirety. In addition, companies such as Abgenix, Inc. (Freemont, Calif.) and Genpharm (San Jose, Calif.) can be engaged to provide human antibodies directed against a selected antigen using technology similar to that described above.

[0309] Completely human antibodies which recognize a selected epitope can be generated using a technique referred to as “guided selection.” In this approach a selected non-human monoclonal antibody, e.g., a mouse antibody, is used to guide the selection of a completely human antibody recognizing the same epitope. (Jespers et al., Bio/technology 12:899-903 (1988)).

[0310] Further, antibodies to the polypeptides of the invention can, in turn, be utilized to generate anti-idiotype antibodies that “mimic” polypeptides of the invention using techniques well known to those skilled in the art. (See, e.g., Greenspan & Bona, FASEB J. 7(5):437-444; (1989) and Nissinoff, J. Immunol. 147(8):2429-2438 (1991)). For example, antibodies which bind to and competitively inhibit polypeptide multimerization and/or binding of a polypeptide of the invention to a ligand can be used to generate anti-idiotypes that “mimic” the polypeptide multimerization and/or binding domain and, as a consequence, bind to and neutralize polypeptide and/or its ligand. Such neutralizing anti-idiotypes or Fab fragments of such anti-idiotypes can be used in therapeutic regimens to neutralize polypeptide ligand(s)/receptor(s). For example, such anti-idiotypic antibodies can be used to bind a polypeptide of the invention and/or to bind its ligand(s)/receptor(s), and thereby block its biological activity. Alternatively, antibodies which bind to and enhance polypeptide multimerization and/or binding, and/or receptor/ligand multimerization, binding and/or signaling can be used to generate anti-idiotypes that function as agonists of a polypeptide of the invention and/or its ligand/receptor. Such agonistic anti-idiotypes or Fab fragments of such anti-idiotypes can be used in therapeutic regimens as agonists of the polypeptides of the invention or its ligand(s)/receptor(s). For example, such anti-idiotypic antibodies can be used to bind a polypeptide of the invention and/or to bind its ligand(s)/receptor(s), and thereby promote or enhance its biological activity.

[0311] Intrabodies of the invention can be produced using methods known in the art, such as those disclosed and reviewed in Chen et al., Hum. Gene Ther. 5:595-601 (1994); Marasco, W. A., Gene Ther. 4:11-15 (1997); Rondon and Marasco, Annu. Rev. Microbiol. 51:257-283 (1997); Proba et al., J. Mol. Biol. 275:245-253 (1998); Cohen et al., Oncogene 17:2445-2456 (1998); Ohage and Steipe, J. Mol. Biol. 291:1119-1128 (1999); Ohage et al., J. Mol. Biol. 291:1129-1134 (1999); Wirtz and Steipe, Protein Sci. 8:2245-2250 (1999); Zhu et al., J. Immunol. Methods 231:207-222 (1999); and references cited therein.

Polynucleotides Encoding Antibodies

[0312] The invention further provides polynucleotides comprising a nucleotide sequence encoding an antibody of the invention and fragments thereof. The invention also encompasses polynucleotides that hybridize under stringent or alternatively, under lower stringency hybridization conditions, e.g., as defined supra, to polynucleotides that encode an antibody, preferably, that specifically binds to a polypeptide of the invention, preferably, an antibody that binds to a polypeptide having the amino acid sequence of SEQ ID NO:Y, to a polypeptide encoded by a portion of SEQ ID NO:X as defined in columns 8 and 9 of Table 2, and/or to a polypeptide encoded by the cDNA contained in ATCC Deposit No:Z.

[0313] The polynucleotides may be obtained, and the nucleotide sequence of the polynucleotides determined, by any method known in the art. For example, if the nucleotide sequence of the antibody is known, a polynucleotide encoding the antibody may be assembled from chemically synthesized oligonucleotides (e.g., as described in Kutmeier et al., BioTechniques 17:242 (1994)), which, briefly, involves the synthesis of overlapping oligonucleotides containing portions of the sequence encoding the antibody, annealing and ligating of those oligonucleotides, and then amplification of the ligated oligonucleotides by PCR.

[0314] Alternatively, a polynucleotide encoding an antibody may be generated from nucleic acid from a suitable source. If a clone containing a nucleic acid encoding a particular antibody is not available, but the sequence of the antibody molecule is known, a nucleic acid encoding the immunoglobulin may be chemically synthesized or obtained from a suitable source (e.g., an antibody cDNA library, or a cDNA library generated from, or nucleic acid, preferably poly A+ RNA, isolated from, any tissue or cells expressing the antibody, such as hybridoma cells selected to express an antibody of the invention) by PCR amplification using synthetic primers hybridizable to the 3′ and 5′ ends of the sequence or by cloning using an oligonucleotide probe specific for the particular gene sequence to identify, e.g., a cDNA clone from a cDNA library that encodes the antibody. Amplified nucleic acids generated by PCR may then be cloned into replicable cloning vectors using any method well known in the art.

[0315] Once the nucleotide sequence and corresponding amino acid sequence of the antibody is determined, the nucleotide sequence of the antibody may be manipulated using methods well known in the art for the manipulation of nucleotide sequences, e.g., recombinant DNA techniques, site directed mutagenesis, PCR, etc. (see, for example, the techniques described in Sambrook et al., 1990, Molecular Cloning, A Laboratory Manual, 2d Ed., Cold Spring Harbor Laboratory, Cold Spring Harbor, N.Y. and Ausubel et al., eds., 1998, Current Protocols in Molecular Biology, John Wiley & Sons, NY, which are both incorporated by reference herein in their entireties), to generate antibodies having a different amino acid sequence, for example to create amino acid substitutions, deletions, and/or insertions.

[0316] In a specific embodiment, the amino acid sequence of the heavy and/or light chain variable domains may be inspected to identify the sequences of the complementarity determining regions (CDRs) by methods that are well know in the art, e.g., by comparison to known amino acid sequences of other heavy and light chain variable regions to determine the regions of sequence hypervariability. Using routine recombinant DNA techniques, one or more of the CDRs may be inserted within framework regions, e.g., into human framework regions to humanize a non-human antibody, as described supra. The framework regions may be naturally occurring or consensus framework regions, and preferably human framework regions (see, e.g., Chothia et al., J. Mol. Biol. 278: 457-479 (1998) for a listing of human framework regions). Preferably, the polynucleotide generated by the combination of the framework regions and CDRs encodes an antibody that specifically binds a polypeptide of the invention. Preferably, as discussed supra, one or more amino acid substitutions may be made within the framework regions, and, preferably, the amino acid substitutions improve binding of the antibody to its antigen. Additionally, such methods may be used to make amino acid substitutions or deletions of one or more variable region cysteine residues participating in an intrachain disulfide bond to generate antibody molecules lacking one or more intrachain disulfide bonds. Other alterations to the polynucleotide are encompassed by the present invention and within the skill of the art.

[0317] In addition, techniques developed for the production of “chimeric antibodies” (Morrison et al., Proc. Natl. Acad. Sci. 81:851-855 (1984); Neuberger et al., Nature 312:604-608 (1984); Takeda et al., Nature 314:452-454 (1985)) by splicing genes from a mouse antibody molecule of appropriate antigen specificity together with genes from a human antibody molecule of appropriate biological activity can be used. As described supra, a chimeric antibody is a molecule in which different portions are derived from different animal species, such as those having a variable region derived from a murine mAb and a human immunoglobulin constant region, e.g., humanized antibodies.

[0318] Alternatively, techniques described for the production of single chain antibodies (U.S. Pat. No. 4,946,778; Bird, Science 242:423-42 (1988); Huston et al., Proc. Natl. Acad. Sci. USA 85:5879-5883 (1988); and Ward et al., Nature 334:544-54 (1989)) can be adapted to produce single chain antibodies. Single chain antibodies are formed by linking the heavy and light chain fragments of the Fv region via an amino acid bridge, resulting in a single chain polypeptide. Techniques for the assembly of functional Fv fragments in E. coli may also be used (Skerra et al., Science 242:1038-1041 (1988)).

Methods of Producing Antibodies

[0319] The antibodies of the invention can be produced by any method known in the art for the synthesis of antibodies, in particular, by chemical synthesis or preferably, by recombinant expression techniques. Methods of producing antibodies include, but are not limited to, hybridoma technology, EBV transformation, and other methods discussed herein as well as through the use recombinant DNA technology, as discussed below.

[0320] Recombinant expression of an antibody of the invention, or fragment, derivative or analog thereof, (e.g., a heavy or light chain of an antibody of the invention or a single chain antibody of the invention), requires construction of an expression vector containing a polynucleotide that encodes the antibody. Once a polynucleotide encoding an antibody molecule or a heavy or light chain of an antibody, or portion thereof (preferably containing the heavy or light chain variable domain), of the invention has been obtained, the vector for the production of the antibody molecule may be produced by recombinant DNA technology using techniques well known in the art. Thus, methods for preparing a protein by expressing a polynucleotide containing an antibody encoding nucleotide sequence are described herein. Methods which are well known to those skilled in the art can be used to construct expression vectors containing antibody coding sequences and appropriate transcriptional and translational control signals. These methods include, for example, in vitro recombinant DNA techniques, synthetic techniques, and in vivo genetic recombination. The invention, thus, provides replicable vectors comprising a nucleotide sequence encoding an antibody molecule of the invention, or a heavy or light chain thereof, or a heavy or light chain variable domain, operably linked to a promoter. Such vectors may include the nucleotide sequence encoding the constant region of the antibody molecule (see, e.g., PCT Publication WO 86/05807; PCT Publication WO 89/01036; and U.S. Pat. No. 5,122,464) and the variable domain of the antibody may be cloned into such a vector for expression of the entire heavy or light chain.

[0321] The expression vector is transferred to a host cell by conventional techniques and the transfected cells are then cultured by conventional techniques to produce an antibody of the invention. Thus, the invention includes host cells containing a polynucleotide encoding an antibody of the invention, or a heavy or light chain thereof, or a single chain antibody of the invention, operably linked to a heterologous promoter. In preferred embodiments for the expression of double-chained antibodies, vectors encoding both the heavy and light chains may be co-expressed in the host cell for expression of the entire immunoglobulin molecule, as detailed below.

[0322] A variety of host-expression vector systems may be utilized to express the antibody molecules of the invention. Such host-expression systems represent vehicles by which the coding sequences of interest may be produced and subsequently purified, but also represent cells which may, when transformed or transfected with the appropriate nucleotide coding sequences, express an antibody molecule of the invention in situ. These include but are not limited to microorganisms such as bacteria (e.g., E. coli, B. subtilis) transformed with recombinant bacteriophage DNA, plasmid DNA or cosmid DNA expression vectors containing antibody coding sequences; yeast (e.g., Saccharomyces, Pichia) transformed with recombinant yeast expression vectors containing antibody coding sequences; insect cell systems infected with recombinant virus expression vectors (e.g., baculovirus) containing antibody coding sequences; plant cell systems infected with recombinant virus expression vectors (e.g., cauliflower mosaic virus, CaMV; tobacco mosaic virus, TMV) or transformed with recombinant plasmid expression vectors (e.g., Ti plasmid) containing antibody coding sequences; or mammalian cell systems (e.g., COS, CHO, BHK, 293, 3T3 cells) harboring recombinant expression constructs containing promoters derived from the genome of mammalian cells (e.g., metallothionein promoter) or from mammalian viruses (e.g., the adenovirus late promoter; the vaccinia virus 7.5K promoter). Preferably, bacterial cells such as Escherichia coli, and more preferably, eukaryotic cells, especially for the expression of whole recombinant antibody molecule, are used for the expression of a recombinant antibody molecule. For example, mammalian cells such as Chinese hamster ovary cells (CHO), in conjunction with a vector such as the major intermediate early gene promoter element from human cytomegalovirus is an effective expression system for antibodies (Foecking et al., Gene 45:101 (1986); Cockett et al., Bio/Technology 8:2 (1990)).

[0323] In bacterial systems, a number of expression vectors may be advantageously selected depending upon the use intended for the antibody molecule being expressed. For example, when a large quantity of such a protein is to be produced, for the generation of pharmaceutical compositions of an antibody molecule, vectors which direct the expression of high levels of fusion protein products that are readily purified may be desirable. Such vectors include, but are not limited, to the E. coli expression vector pUR278 (Ruther et al., EMBO J. 2:1791 (1983)), in which the antibody coding sequence may be ligated individually into the vector in frame with the lac Z coding region so that a fusion protein is produced; pIN vectors (Inouye & Inouye, Nucleic Acids Res. 13:3101-3109 (1985); Van Heeke & Schuster, J. Biol. Chem. 24:5503-5509 (1989)); and the like. pGEX vectors may also be used to express foreign polypeptides as fusion proteins with glutathione S-transferase (GST). In general, such fusion proteins are soluble and can easily be purified from lysed cells by adsorption and binding to matrix glutathione-agarose beads followed by elution in the presence of free glutathione. The pGEX vectors are designed to include thrombin or factor Xa protease cleavage sites so that the cloned target gene product can be released from the GST moiety.

[0324] In an insect system, Autographa californica nuclear polyhedrosis virus (AcNPV) is used as a vector to express foreign genes. The virus grows in Spodoptera frugiperda cells. The antibody coding sequence may be cloned individually into non-essential regions (for example the polyhedrin gene) of the virus and placed under control of an AcNPV promoter (for example the polyhedrin promoter).

[0325] In mammalian host cells, a number of viral-based expression systems may be utilized. In cases where an adenovirus is used as an expression vector, the antibody coding sequence of interest may be ligated to an adenovirus transcription/translation control complex, e.g., the late promoter and tripartite leader sequence. This chimeric gene may then be inserted in the adenovirus genome by in vitro or in vivo recombination. Insertion in a non-essential region of the viral genome (e.g., region E1 or E3) will result in a recombinant virus that is viable and capable of expressing the antibody molecule in infected hosts. (e.g., see Logan & Shenk, Proc. Natl. Acad. Sci. USA 81:355-359 (1984)). Specific initiation signals may also be required for efficient translation of inserted antibody coding sequences. These signals include the ATG initiation codon and adjacent sequences. Furthermore, the initiation codon must be in phase with the reading frame of the desired coding sequence to ensure translation of the entire insert. These exogenous translational control signals and initiation codons can be of a variety of origins, both natural and synthetic. The efficiency of expression may be enhanced by the inclusion of appropriate transcription enhancer elements, transcription terminators, etc. (see Bittner et al., Methods in Enzymol. 153:51-544(1987)).

[0326] In addition, a host cell strain may be chosen which modulates the expression of the inserted sequences, or modifies and processes the gene product in the specific fashion desired. Such modifications (e.g., glycosylation) and processing (e.g., cleavage) of protein products may be important for the function of the protein. Different host cells have characteristic and specific mechanisms for the post-translational processing and modification of proteins and gene products. Appropriate cell lines or host systems can be chosen to ensure the correct modification and processing of the foreign protein expressed. To this end, eukaryotic host cells which possess the cellular machinery for proper processing of the primary transcript, glycosylation, and phosphorylation of the gene product may be used. Such mammalian host cells include but are not limited to CHO, VERY, BHK, Hela, COS, MDCK, 293, 3T3, WI38, and in particular, breast cancer cell lines such as, for example, BT483, Hs578T, HTB2, BT20 and T47D, and normal mammary gland cell line such as, for example, CRL7030 and Hs578Bst.

[0327] For long-term, high-yield production of recombinant proteins, stable expression is preferred. For example, cell lines which stably express the antibody molecule may be engineered. Rather than using expression vectors which contain viral origins of replication, host cells can be transformed with DNA controlled by appropriate expression control elements (e.g., promoter, enhancer, sequences, transcription terminators, polyadenylation sites, etc.), and a selectable marker. Following the introduction of the foreign DNA, engineered cells may be allowed to grow for 1-2 days in an enriched media, and then are switched to a selective media. The selectable marker in the recombinant plasmid confers resistance to the selection and allows cells to stably integrate the plasmid into their chromosomes and grow to form foci that in turn can be cloned and expanded into cell lines. This method may advantageously be used to engineer cell lines which express the antibody molecule. Such engineered cell lines may be particularly useful in screening and evaluation of compounds that interact directly or indirectly with the antibody molecule.

[0328] A number of selection systems may be used, including but not limited to the herpes simplex virus thymidine kinase (Wigler et al., Cell 11:223 (1977)), hypoxanthine-guanine phosphoribosyltransferase (Szybalska & Szybalski, Proc. Natl. Acad. Sci. USA 48:202 (1992)), and adenine phosphoribosyltransferase (Lowy et al., Cell 22:817 (1980)) genes can be employed in tk−, hgprt− or aprt− cells, respectively. Also, antimetabolite resistance can be used as the basis of selection for the following genes: dhfr, which confers resistance to methotrexate (Wigler et al., Natl. Acad. Sci. USA 77:357 (1980); O'Hare et al., Proc. Natl. Acad. Sci. USA 78:1527 (1981)); gpt, which confers resistance to mycophenolic acid (Mulligan & Berg, Proc. Natl. Acad. Sci. USA 78:2072 (1981)); neo, which confers resistance to the aminoglycoside G-418 Clinical Pharmacy 12:488-505; Wu and Wu, Biotherapy 3:87-95 (1991); Tolstoshev, Ann. Rev. Pharmacol. Toxicol. 32:573-596 (1993); Mulligan, Science 260:926-932 (1993); and Morgan and Anderson, Ann. Rev. Biochem. 62:191-217 (1993); May, 1993, TIB TECH 11(5):155-215 (1993)); and hygro, which confers resistance to hygromycin (Santerre et al., Gene 30:147 (1984)). Methods commonly known in the art of recombinant DNA technology may be routinely applied to select the desired recombinant clone, and such methods are described, for example, in Ausubel et al. (eds.), Current Protocols in Molecular Biology, John Wiley & Sons, NY (1993); Kriegler, Gene Transfer and Expression, A Laboratory Manual, Stockton Press, NY (1990); and in Chapters 12 and 13, Dracopoli et al. (eds), Current Protocols in Human Genetics, John Wiley & Sons, NY (1994); Colberre-Garapin et al., J. Mol. Biol. 150:1 (1981), which are incorporated by reference herein in their entireties.

[0329] The expression levels of an antibody molecule can be increased by vector amplification (for a review, see Bebbington and Hentschel, The use of vectors based on gene amplification for the expression of cloned genes in mammalian cells in DNA cloning, Vol. 3. (Academic Press, New York, 1987)). When a marker in the vector system expressing antibody is amplifiable, increase in the level of inhibitor present in culture of host cell will increase the number of copies of the marker gene. Since the amplified region is associated with the antibody gene, production of the antibody will also increase (Crouse et al., Mol. Cell. Biol. 3:257 (1983)).

[0330] Vectors which use glutamine synthase (GS) or DHFR as the selectable markers can be amplified in the presence of the drugs methionine sulphoximine or methotrexate, respectively. An advantage of glutamine synthase based vectors are the availabilty of cell lines (e.g., the murine myeloma cell line, NS0) which are glutamine synthase negative. Glutamine synthase expression systems can also function in glutamine synthase expressing cells (e.g. Chinese Hamster Ovary (CHO) cells) by providing additional inhibitor to prevent the functioning of the endogenous gene. A glutamine synthase expression system and components thereof are detailed in PCT publications: WO87/04462; WO86/05807; WO89/01036; WO89/10404; and WO91/06657 which are incorporated in their entireties by reference herein. Additionally, glutamine synthase expression vectors that may be used according to the present invention are commercially available from suplliers, including, for example Lonza Biologics, Inc. (Portsmouth, N.H.). Expression and production of monoclonal antibodies using a GS expression system in murine myeloma cells is described in Bebbington et al., Bio/technology 10:169(1992) and in Biblia and Robinson Biotechnol. Prog. 11:1 (1995) which are incorporated in their entirities by reference herein.

[0331] The host cell may be co-transfected with two expression vectors of the invention, the first vector encoding a heavy chain derived polypeptide and the second vector encoding a light chain derived polypeptide. The two vectors may contain identical selectable markers which enable equal expression of heavy and light chain polypeptides. Alternatively, a single vector may be used which encodes, and is capable of expressing, both heavy and light chain polypeptides. In such situations, the light chain should be placed before the heavy chain to avoid an excess of toxic free heavy chain (Proudfoot, Nature 322:52 (1986); Kohler, Proc. Natl. Acad. Sci. USA 77:2197 (1980)). The coding sequences for the heavy and light chains may comprise cDNA or genomic DNA.

[0332] Once an antibody molecule of the invention has been produced by an animal, chemically synthesized, or recombinantly expressed, it may be purified by any method known in the art for purification of an immunoglobulin molecule, for example, by chromatography (e.g., ion exchange, affinity, particularly by affinity for the specific antigen after Protein A, and sizing column chromatography), centrifugation, differential solubility, or by any other standard technique for the purification of proteins. In addition, the antibodies of the present invention or fragments thereof can be fused to heterologous polypeptide sequences described herein or otherwise known in the art, to facilitate purification.

[0333] The present invention encompasses antibodies recombinantly fused or chemically conjugated (including both covalently and non-covalently conjugations) to a polypeptide (or portion thereof, preferably at least 10, 20, 30, 40, 50, 60, 70, 80, 90 or 100 amino acids of the polypeptide) of the present invention to generate fusion proteins. The fusion does not necessarily need to be direct, but may occur through linker sequences. The antibodies may be specific for antigens other than polypeptides (or portion thereof, preferably at least 10, 20, 30, 40, 50, 60, 70, 80, 90 or 100 amino acids of the polypeptide) of the present invention. For example, antibodies may be used to target the polypeptides of the present invention to particular cell types, either in vitro or in vivo, by fusing or conjugating the polypeptides of the present invention to antibodies specific for particular cell surface receptors. Antibodies fused or conjugated to the polypeptides of the present invention may also be used in in vitro immunoassays and purification methods using methods known in the art. See e.g., Harbor et al., supra, and PCT publication WO 93/21232; EP 439,095; Naramura et al., Immunol. Lett. 39:91-99 (1994); U.S. Pat. No. 5,474,981; Gillies et al., PNAS 89:1428-1432 (1992); Fell et al., J. Immunol. 146:2446-2452 (1991), which are incorporated by reference in their entireties.

[0334] The present invention further includes compositions comprising the polypeptides of the present invention fused or conjugated to antibody domains other than the variable regions. For example, the polypeptides of the present invention may be fused or conjugated to an antibody Fc region, or portion thereof. The antibody portion fused to a polypeptide of the present invention may comprise the constant region, hinge region, CH1 domain, CH2 domain, and CH3 domain or any combination of whole domains or portions thereof. The polypeptides may also be fused or conjugated to the above antibody portions to form multimers. For example, Fc portions fused to the polypeptides of the present invention can form dimers through disulfide bonding between the Fc portions. Higher multimeric forms can be made by fusing the polypeptides to portions of IgA and IgM. Methods for fusing or conjugating the polypeptides of the present invention to antibody portions are known in the art. See, e.g., U.S. Pat. Nos. 5,336,603; 5,622,929; 5,359,046; 5,349,053; 5,447,851; 5,112,946; EP 307,434; EP 367,166; PCT publications WO 96/04388; WO 91/06570; Ashkenazi et al., Proc. Natl. Acad. Sci. USA 88:10535-10539 (1991); Zheng et al., J. Immunol. 154:5590-5600 (1995); and Vil et al., Proc. Natl. Acad. Sci. USA 89:11337-11341 (1992) (said references incorporated by reference in their entireties).

[0335] As discussed, supra, the polypeptides corresponding to a polypeptide, polypeptide fragment, or a variant of SEQ ID NO:Y may be fused or conjugated to the above antibody portions to increase the in vivo half life of the polypeptides or for use in immunoassays using methods known in the art. Further, the polypeptides corresponding to SEQ ID NO:Y may be fused or conjugated to the above antibody portions to facilitate purification. One reported example describes chimeric proteins consisting of the first two domains of the human CD4-polypeptide and various domains of the constant regions of the heavy or light chains of mammalian immunoglobulins. See EP 394,827; and Traunecker et al., Nature 331:84-86 (1988). The polypeptides of the present invention fused or conjugated to an antibody having disulfide-linked dimeric structures (due to the IgG) may also be more efficient in binding and neutralizing other molecules, than the monomeric secreted protein or protein fragment alone. See, for example, Fountoulakis et al., J. Biochem. 270:3958-3964 (1995). In many cases, the Fc part in a fusion protein is beneficial in therapy and diagnosis, and thus can result in, for example, improved pharmacokinetic properties. See, for example, EP A 232,262. Alternatively, deleting the Fc part after the fusion protein has been expressed, detected, and purified, would be desired. For example, the Fc portion may hinder therapy and diagnosis if the fusion protein is used as an antigen for immunizations. In drug discovery, for example, human proteins, such as hIL-5, have been fused with Fc portions for the purpose of high-throughput screening assays to identify antagonists of hIL-5. (See, Bennett et al., J. Molecular Recognition 8:52-58 (1995); Johanson et al., J. Biol. Chem. 270:9459-9471 (1995)).

[0336] Moreover, the antibodies or fragments thereof of the present invention can be fused to marker sequences, such as a peptide to facilitate purification. In preferred embodiments, the marker amino acid sequence is a hexa-histidine peptide, such as the tag provided in a pQE vector (QIAGEN, Inc., 9259 Eton Avenue, Chatsworth, Calif., 91311), among others, many of which are commercially available. As described in Gentz et al., Proc. Natl. Acad. Sci. USA 86:821-824 (1989), for instance, hexa-histidine provides for convenient purification of the fusion protein. Other peptide tags useful for purification include, but are not limited to, the “HA” tag, which corresponds to an epitope derived from the influenza hemagglutinin protein (Wilson et al., Cell 37:767 (1984)) and the “flag” tag.

[0337] The present invention further encompasses antibodies or fragments thereof conjugated to a diagnostic or therapeutic agent. The antibodies can be used diagnostically to, for example, monitor the development or progression of a tumor as part of a clinical testing procedure to, e.g., determine the efficacy of a given treatment regimen. Detection can be facilitated by coupling the antibody to a detectable substance. Examples of detectable substances include various enzymes, prosthetic groups, fluorescent materials, luminescent materials, bioluminescent materials, radioactive materials, positron emitting metals using various positron emission tomographies, and nonradioactive paramagnetic metal ions. The detectable substance may be coupled or conjugated either directly to the antibody (or fragment thereof) or indirectly, through an intermediate (such as, for example, a linker known in the art) using techniques known in the art. See, for example, U.S. Pat. No. 4,741,900 for metal ions which can be conjugated to antibodies for use as diagnostics according to the present invention. Examples of suitable enzymes include horseradish peroxidase, alkaline phosphatase, beta-galactosidase, or acetylcholinesterase; examples of suitable prosthetic group complexes include streptavidin/biotin and avidin/biotin; examples of suitable fluorescent materials include umbelliferone, fluorescein, fluorescein isothiocyanate, rhodamine, dichlorotriazinylamine fluorescein, dansyl chloride or phycoerythrin; an example of a luminescent material includes luminol; examples of bioluminescent materials include luciferase, luciferin, and aequorin; and examples of suitable radioactive material include 125I, 131I, 111In or 99Tc.

[0338] Further, an antibody or fragment thereof may be conjugated to a therapeutic moiety such as a cytotoxin, e.g., a cytostatic or cytocidal agent, a therapeutic agent or a radioactive metal ion, e.g., alpha-emitters such as, for example, 213Bi. A cytotoxin or cytotoxic agent includes any agent that is detrimental to cells. Examples include paclitaxol, cytochalasin B, gramicidin D, ethidium bromide, emetine, mitomycin, etoposide, tenoposide, vincristine, vinblastine, colchicin, doxorubicin, daunorubicin, dihydroxy anthracin dione, mitoxantrone, mithramycin, actinomycin D, 1-dehydrotestosterone, glucocorticoids, procaine, tetracaine, lidocaine, propranolol, and puromycin and analogs or homologs thereof. Therapeutic agents include, but are not limited to, antimetabolites (e.g., methotrexate, 6-mercaptopurine, 6-thioguanine, cytarabine, 5-fluorouracil decarbazine), alkylating agents (e.g., mechlorethamine, thioepa chlorambucil, melphalan, carmustine (BSNU) and lomustine (CCNU), cyclothosphamide, busulfan, dibromomannitol, streptozotocin, mitomycin C, and cis-dichlorodiamine platinum (II) (DDP) cisplatin), anthracyclines (e.g., daunorubicin (formerly daunomycin) and doxorubicin), antibiotics (e.g., dactinomycin (formerly actinomycin), bleomycin, mithramycin, and anthramycin (AMC)), and anti-mitotic agents (e.g., vincristine and vinblastine).

[0339] The conjugates of the invention can be used for modifying a given biological response, the therapeutic agent or drug moiety is not to be construed as limited to classical chemical therapeutic agents. For example, the drug moiety may be a protein or polypeptide possessing a desired biological activity. Such proteins may include, for example, a toxin such as abrin, ricin A, pseudomonas exotoxin, or diphtheria toxin; a protein such as tumor necrosis factor, a-interferon, β-interferon, nerve growth factor, platelet derived growth factor, tissue plasminogen activator, an apoptotic agent, e.g., TNF-alpha, TNF-beta, AIM I (See, International Publication No. WO 97/33899), AIM II (See, International Publication No. WO 97/34911), Fas Ligand (Takahashi et al., Int. Immunol., 6:1567-1574 (1994)), VEGI (See, International Publication No. WO 99/23105), a thrombotic agent or an anti-angiogenic agent, e.g., angiostatin or endostatin; or, biological response modifiers such as, for example, lymphokines, interleukin-1 (“IL-1”), interleukin-2 (“IL-2”), interleukin-6 (“IL-6”), granulocyte macrophage colony stimulating factor (“GM-CSF”), granulocyte colony stimulating factor (“G-CSF”), or other growth factors.

[0340] Antibodies may also be attached to solid supports, which are particularly useful for immunoassays or purification of the target antigen. Such solid supports include, but are not limited to, glass, cellulose, polyacrylamide, nylon, polystyrene, polyvinyl chloride or polypropylene.

[0341] Techniques for conjugating such therapeutic moiety to antibodies are well known. See, for example, Arnon et al., “Monoclonal Antibodies For Immunotargeting Of Drugs In Cancer Therapy”, in Monoclonal Antibodies And Cancer Therapy, Reisfeld et al. (eds.), pp. 243-56 (Alan R. Liss, Inc. 1985); Hellstrom et al., “Antibodies For Drug Delivery”, in Controlled Drug Delivery (2nd Ed.), Robinson et al. (eds.), pp. 623-53 (Marcel Dekker, Inc. 1987); Thorpe, “Antibody Carriers Of Cytotoxic Agents In Cancer Therapy: A Review”, in Monoclonal Antibodies '84: Biological And Clinical Applications, Pinchera et al. (eds.), pp. 475-506 (1985); “Analysis, Results, And Future Prospective Of The Therapeutic Use Of Radiolabeled Antibody In Cancer Therapy”, in Monoclonal Antibodies For Cancer Detection And Therapy, Baldwin et al. (eds.), pp. 303-16 (Academic Press 1985), and Thorpe et al., “The Preparation And Cytotoxic Properties Of Antibody-Toxin Conjugates”, Immunol. Rev. 62:119-58 (1982).

[0342] Alternatively, an antibody can be conjugated to a second antibody to form an antibody heteroconjugate as described by Segal in U.S. Pat. No. 4,676,980, which is incorporated herein by reference in its entirety.

[0343] An antibody, with or without a therapeutic moiety conjugated to it, administered alone or in combination with cytotoxic factor(s) and/or cytokine(s) can be used as a therapeutic.

Immunophenotyping

[0344] The antibodies of the invention may be utilized for immunophenotyping of cell lines and biological samples. Translation products of the gene of the present invention may be useful as cell-specific markers, or more specifically as cellular markers that are differentially expressed at various stages of differentiation and/or maturation of particular cell types. Monoclonal antibodies directed against a specific epitope, or combination of epitopes, will allow for the screening of cellular populations expressing the marker. Various techniques can be utilized using monoclonal antibodies to screen for cellular populations expressing the marker(s), and include magnetic separation using antibody-coated magnetic beads, “panning” with antibody attached to a solid matrix (i.e., plate), and flow cytometry (See, e.g., U.S. Pat. No. 5,985,660; and Morrison et al., Cell, 96:737-49 (1999)).

[0345] These techniques allow for the screening of particular populations of cells, such as might be found with hematological malignancies (i.e. minimal residual disease (MRD) in acute leukemic patients) and “non-self” cells in transplantations to prevent Graft-versus-Host Disease (GVHD). Alternatively, these techniques allow for the screening of hematopoietic stem and progenitor cells capable of undergoing proliferation and/or differentiation, as might be found in human umbilical cord blood.

Assays For Antibody Binding

[0346] The antibodies of the invention may be assayed for immunospecific binding by any method known in the art. The immunoassays which can be used include but are not limited to competitive and non-competitive assay systems using techniques such as western blots, radioimmunoassays, ELISA (enzyme linked immunosorbent assay), “sandwich” immunoassays, immunoprecipitation assays, precipitin reactions, gel diffusion precipitin reactions, immunodiffusion assays, agglutination assays, complement-fixation assays, immunoradiometric assays, fluorescent immunoassays, and protein A immunoassays, to name but a few. Such assays are routine and well known in the art (see, e.g., Ausubel et al, eds, 1994, Current Protocols in Molecular Biology, Vol. 1, John Wiley & Sons, Inc., New York, which is incorporated by reference herein in its entirety). Exemplary immunoassays are described briefly below (but are not intended by way of limitation).

[0347] Immunoprecipitation protocols generally comprise lysing a population of cells in a lysis buffer such as RIPA buffer (1% NP-40 or Triton X-100, 1% sodium deoxycholate, 0.1% SDS, 0.15 M NaCl, 0.01 M sodium phosphate at pH 7.2, 1% Trasylol) supplemented with protein phosphatase and/or protease inhibitors (e.g., EDTA, PMSF, aprotinin, sodium vanadate), adding the antibody of interest to the cell lysate, incubating for a period of time (e.g., 1-4 hours) at 4° C., adding protein A and/or protein G sepharose beads to the cell lysate, incubating for about an hour or more at 4° C., washing the beads in lysis buffer and resuspending the beads in SDS/sample buffer. The ability of the antibody of interest to immunoprecipitate a particular antigen can be assessed by, e.g., western blot analysis. One of skill in the art would be knowledgeable as to the parameters that can be modified to increase the binding of the antibody to an antigen and decrease the background (e.g., pre-clearing the cell lysate with sepharose beads). For further discussion regarding immunoprecipitation protocols see, e.g., Ausubel et al., eds., (1994), Current Protocols in Molecular Biology, Vol. 1, John Wiley & Sons, Inc., New York, section 10.16.1.

[0348] Western blot analysis generally comprises preparing protein samples, electrophoresis of the protein samples in a polyacrylamide gel (e.g., 8%-20% SDS-PAGE depending on the molecular weight of the antigen), transferring the protein sample from the polyacrylamide gel to a membrane such as nitrocellulose, PVDF or nylon, blocking the membrane in blocking solution (e.g., PBS with 3% BSA or non-fat milk), washing the membrane in washing buffer (e.g., PBS-Tween 20), blocking the membrane with primary antibody (the antibody of interest) diluted in blocking buffer, washing the membrane in washing buffer, blocking the membrane with a secondary antibody (which recognizes the primary antibody, e.g., an anti-human antibody) conjugated to an enzymatic substrate (e.g., horseradish peroxidase or alkaline phosphatase) or radioactive molecule (e.g., 32P or 125I) diluted in blocking buffer, washing the membrane in wash buffer, and detecting the presence of the antigen. One of skill in the art would be knowledgeable as to the parameters that can be modified to increase the signal detected and to reduce the background noise. For further discussion regarding western blot protocols see, e.g., Ausubel et al, eds, (1994), Current Protocols in Molecular Biology, Vol. 1, John Wiley & Sons, Inc., New York, section 10.8.1.

[0349] ELISAs comprise preparing antigen, coating the well of a 96 well microtiter plate with the antigen, adding the antibody of interest conjugated to a detectable compound such as an enzymatic substrate (e.g., horseradish peroxidase or alkaline phosphatase) to the well and incubating for a period of time, and detecting the presence of the antigen. In ELISAs the antibody of interest does not have to be conjugated to a detectable compound; instead, a second antibody (which recognizes the antibody of interest) conjugated to a detectable compound may be added to the well. Further, instead of coating the well with the antigen, the antibody may be coated to the well. In this case, a second antibody conjugated to a detectable compound may be added following the addition of the antigen of interest to the coated well. One of skill in the art would be knowledgeable as to the parameters that can be modified to increase the signal detected as well as other variations of ELISAs known in the art. For further discussion regarding ELISAs see, e.g., Ausubel et al, eds, (1994), Current Protocols in Molecular Biology, Vol. 1, John Wiley & Sons, Inc., New York, section 11.2.1.

[0350] The binding affinity of an antibody to an antigen and the off-rate of an antibody-antigen interaction can be determined by competitive binding assays. One example of a competitive binding assay is a radioimmunoassay comprising the incubation of labeled antigen (e.g., 3H or 125I) with the antibody of interest in the presence of increasing amounts of unlabeled antigen, and the detection of the antibody bound to the labeled antigen. The affinity of the antibody of interest for a particular antigen and the binding off-rates can be determined from the data by scatchard plot analysis. Competition with a second antibody can also be determined using radioimmunoassays. In this case, the antigen is incubated with antibody of interest conjugated to a labeled compound (e.g., 3H or 125I) in the presence of increasing amounts of an unlabeled second antibody.

[0351] Antibodies of the invention may be characterized using immunocytochemisty methods on cells (e.g., mammalian cells, such as CHO cells) transfected with a vector enabling the expression of an antigen or with vector alone using techniques commonly known in the art.

[0352] Antibodies that bind antigen transfected cells, but not vector-only transfected cells, are antigen specific.

Therapeutic Uses

[0353] Table 1D also provides information regarding biological activities and preferred therapeutic uses (i.e. see, “Preferred Indications” column) for polynucleotides and polypeptides of the invention (including antibodies, agonists, and/or antagonists thereof). Table 1D also provides information regarding assays which may be used to test polynucleotides and polypeptides of the invention (including antibodies, agonists, and/or antagonists thereof) for the corresponding biological activities. The first column (“Gene No.”) provides the gene number in the application for each clone identifier. The second column (“cDNA ATCC Deposit No:Z”) provides the unique clone identifier for each clone as previously described and indicated in Table 1A, Table 1B, and Table 1C. The third column (“AA SEQ ID NO:Y”) indicates the Sequence Listing SEQ ID Number for polypeptide sequences encoded by the corresponding cDNA clones (also as indicated in Table 1A, Table 1B, and Table 2). The fourth column (“Biological Activity”) indicates a biological activity corresponding to the indicated polypeptides (or polynucleotides encoding said polypeptides). The fifth column (“Exemplary Activity Assay”) further describes the corresponding biological activity and also provides information pertaining to the various types of assays which may be performed to test, demonstrate, or quantify the corresponding biological activity.

[0354] The present invention is further directed to antibody-based therapies which involve administering antibodies of the invention to an animal, preferably a mammal, and most preferably a human, patient for treating one or more of the disclosed diseases, disorders, or conditions. Therapeutic compounds of the invention include, but are not limited to, antibodies of the invention (including fragments, analogs and derivatives thereof as described herein) and nucleic acids encoding antibodies of the invention (including fragments, analogs and derivatives thereof and anti-idiotypic antibodies as described herein). The antibodies of the invention can be used to detect, prevent, diagnose, prognosticate, treat, and/or ameliorate diseases, disorders or conditions associated with aberrant expression and/or activity of a polypeptide of the invention, including, but not limited to, immune diseases and disorders. The treatment and/or prevention of immune diseases and disorders associated with aberrant expression and/or activity of a polypeptide of the invention includes, but is not limited to, alleviating symptoms associated with immune diseases and disorders. Antibodies of the invention may be provided in pharmaceutically acceptable compositions as known in the art or as described herein.

[0355] In a specific and preferred embodiment, the present invention is directed to antibody-based therapies which involve administering antibodies of the invention to an animal, preferably a mammal, and most preferably a human, patient for treating immune diseases and disorders. Therapeutic compounds of the invention include, but are not limited to, antibodies of the invention (e.g., antibodies directed to the full length protein expressed on the cell surface of a mammalian cell; antibodies directed to an epitope of a polypeptide of the invention (such as, for example, a predicted linear epitope shown in Table 1B; or a conformational epitope, including fragments, analogs and derivatives thereof as described herein) and nucleic acids encoding antibodies of the invention (including fragments, analogs and derivatives thereof and anti-idiotypic antibodies as described herein). The antibodies of the invention can be used to detect, diagnose, prevent, treat, prognosticate, and/or ameliorate immune diseases, disorders or conditions associated with aberrant expression and/or activity of a polypeptide of the invention. The treatment and/or prevention of immune diseases, disorders, or conditions associated with aberrant expression and/or activity of a polypeptide of the invention includes, but is not limited to, alleviating symptoms associated with those diseases, disorders or conditions. Antibodies of the invention may be provided in pharmaceutically acceptable compositions as known in the art or as described herein.

[0356] A summary of the ways in which the antibodies of the present invention may be used therapeutically includes binding polynucleotides or polypeptides of the present invention locally or systemically in the body or by direct cytotoxicity of the antibody, e.g. as mediated by complement (CDC) or by effector cells (ADCC). Some of these approaches are described in more detail below. Armed with the teachings provided herein, one of ordinary skill in the art will know how to use the antibodies of the present invention for diagnostic, monitoring or therapeutic purposes without undue experimentation.

[0357] The antibodies of this invention may be advantageously utilized in combination with other monoclonal or chimeric antibodies, or with lymphokines or hematopoietic growth factors (such as, e.g., IL-2, IL-3 and IL-7), for example, which serve to increase the number or activity of effector cells which interact with the antibodies.

[0358] The antibodies of the invention may be administered alone or in combination with other types of treatments (e.g., radiation therapy, chemotherapy, hormonal therapy, immunotherapy and anti-tumor agents). Generally, administration of products of a species origin or species reactivity (in the case of antibodies) that is the same species as that of the patient is preferred. Thus, in a preferred embodiment, human antibodies, fragments derivatives, analogs, or nucleic acids, are administered to a human patient for therapy or prophylaxis.

[0359] It is preferred to use high affinity and/or potent in vivo inhibiting and/or neutralizing antibodies against polypeptides or polynucleotides of the present invention, fragments or regions thereof, for both immunoassays directed to and therapy of immune diseases and disorders related to polynucleotides or polypeptides, including fragments thereof, of the present invention. Such antibodies, fragments, or regions, will preferably have an affinity for polynucleotides or polypeptides of the invention, including fragments thereof. Preferred binding affinities include those with a dissociation constant or Kd less than 5×10⁻² M, 10⁻² M, 5×10⁻³ M, 10⁻⁻³ M, 5×10⁻⁴ M, 10⁻⁴ M, 5×10⁻⁵ M, 10⁻⁻⁵ M, 5×10⁻⁶ M, 10⁻⁶ M, 5×10⁻⁷ M, 10⁻⁷ M, 5×10⁻⁸ M, 10⁻⁸ M, 5×10⁻⁹ M, 10⁻⁹ M, 5×10⁻¹⁰ M, 10⁻¹⁰ M, 5×10⁻¹¹ M, 10⁻¹¹ M, 5×10⁻¹² M, 10⁻¹² M, 5×10⁻¹³ M, 10⁻¹³ M, 5×10⁻¹⁴ M, 10⁻¹⁴ M, 5×10⁻¹⁵ M, and 10⁻¹⁵ M.

Gene Therapy

[0360] In a specific embodiment, nucleic acids comprising sequences encoding antibodies or functional derivatives thereof, are administered to treat, inhibit or prevent a immune disease or disorder associated with aberrant expression and/or activity of a polypeptide of the invention, by way of gene therapy. Gene therapy refers to therapy performed by the administration to a subject of an expressed or expressible nucleic acid. In this embodiment of the invention, the nucleic acids produce their encoded protein that mediates a therapeutic effect.

[0361] Any of the methods for gene therapy available in the art can be used according to the present invention. Exemplary methods are described below.

[0362] For general reviews of the methods of gene therapy, see Goldspiel et al., Clinical Pharmacy 12:488-505 (1993); Wu and Wu, Biotherapy 3:87-95 (1991); Tolstoshev, Ann. Rev. Pharmacol. Toxicol. 32:573-596 (1993); Mulligan, Science 260:926-932 (1993); and Morgan and Anderson, Ann. Rev. Biochem. 62:191-217 (1993); May, TIBTECH 11(5):155-215 (1993). Methods commonly known in the art of recombinant DNA technology which can be used are described in Ausubel et al. (eds.), Current Protocols in Molecular Biology, John Wiley & Sons, NY (1993); and Kriegler, Gene Transfer and Expression, A Laboratory Manual, Stockton Press, NY (1990).

[0363] In a preferred embodiment, the compound comprises nucleic acid sequences encoding an antibody, said nucleic acid sequences being part of expression vectors that express the antibody or fragments or chimeric proteins or heavy or light chains thereof in a suitable host. In particular, such nucleic acid sequences have promoters operably linked to the antibody coding region, said promoter being inducible or constitutive, and, optionally, tissue-specific. In another particular embodiment, nucleic acid molecules are used in which the antibody coding sequences and any other desired sequences are flanked by regions that promote homologous recombination at a desired site in the genome, thus providing for intrachromosomal expression of the antibody encoding nucleic acids (Koller and Smithies, Proc. Natl. Acad. Sci. USA 86:8932-8935 (1989); Zijlstra et al., Nature 342:435-438 (1989). In specific embodiments, the expressed antibody molecule is a single chain antibody; alternatively, the nucleic acid sequences include sequences encoding both the heavy and light chains, or fragments thereof, of the antibody.

[0364] Delivery of the nucleic acids into a patient may be either direct, in which case the patient is directly exposed to the nucleic acid or nucleic acid-carrying vectors, or indirect, in which case, cells are first transformed with the nucleic acids in vitro, then transplanted into the patient. These two approaches are known, respectively, as in vivo or ex vivo gene therapy.

[0365] In a specific embodiment, the nucleic acid sequences are directly administered in vivo, where it is expressed to produce the encoded product. This can be accomplished by any of numerous methods known in the art, e.g., by constructing them as part of an appropriate nucleic acid expression vector and administering it so that they become intracellular, e.g., by infection using defective or attenuated retrovirals or other viral vectors (see U.S. Pat. No. 4,980,286), or by direct injection of naked DNA, or by use of microparticle bombardment (e.g., a gene gun; Biolistic, Dupont), or coating with lipids or cell-surface receptors or transfecting agents, encapsulation in liposomes, microparticles, or microcapsules, or by administering them in linkage to a peptide which is known to enter the nucleus, by administering it in linkage to a ligand subject to receptor-mediated endocytosis (see, e.g., Wu and Wu, J. Biol. Chem. 262:4429-4432 (1987)) (which can be used to target cell types specifically expressing the receptors), etc. In another embodiment, nucleic acid-ligand complexes can be formed in which the ligand comprises a fusogenic viral peptide to disrupt endosomes, allowing the nucleic acid to avoid lysosomal degradation. In yet another embodiment, the nucleic acid can be targeted in vivo for cell specific uptake and expression, by targeting a specific receptor (see, e.g., PCT Publications WO 92/06180; WO 92/22635; WO92/20316; WO93/14188, WO 93/20221). Alternatively, the nucleic acid can be introduced intracellularly and incorporated within host cell DNA for expression, by homologous recombination (Koller and Smithies, Proc. Natl. Acad. Sci. USA 86:8932-8935 (1989); Zijlstra et al., Nature 342:435-438 (1989)).

[0366] In a specific embodiment, viral vectors which contain nucleic acid sequences encoding an antibody of the invention are used. For example, a retroviral vector can be used (see Miller et al., Meth. Enzymol. 217:581-599 (1993)). These retroviral vectors contain the components necessary for the correct packaging of the viral genome and integration into the host cell DNA. The nucleic acid sequences encoding the antibody to be used in gene therapy are cloned into one or more vectors, which facilitates delivery of the gene into a patient. More detail about retroviral vectors can be found in Boesen et al., Biotherapy 6:291-302 (1994), which describes the use of a retroviral vector to deliver the mdr1 gene to hematopoietic stem cells in order to make the stem cells more resistant to chemotherapy. Other references illustrating the use of retroviral vectors in gene therapy are: Clowes et al., J. Clin. Invest. 93:644-651 (1994); Kiem et al., Blood 83:1467-1473 (1994); Salmons and Gunzberg, Human Gene Therapy 4:129-141 (1993); and Grossman and Wilson, Curr. Opin. in Genetics and Devel. 3:110-114 (1993).

[0367] Adenoviruses are other viral vectors that can be used in gene therapy. Adenoviruses are especially attractive vehicles for delivering genes to respiratory epithelia. Adenoviruses naturally infect respiratory epithelia where they cause a mild disease. Other targets for adenovirus-based delivery systems are liver, the central nervous system, endothelial cells, and muscle. Adenoviruses have the advantage of being capable of infecting non-dividing cells. Kozarsky and Wilson, Current Opinion in Genetics and Development 3:499-503 (1993) present a review of adenovirus-based gene therapy. Bout et al., Human Gene Therapy 5:3-10 (1994) demonstrated the use of adenovirus vectors to transfer genes to the respiratory epithelia of rhesus monkeys. Other instances of the use of adenoviruses in gene therapy can be found in Rosenfeld et al., Science 252:431-434 (1991); Rosenfeld et al., Cell 68:143-155 (1992); Mastrangeli et al., J. Clin. Invest. 91:225-234 (1993); PCT Publication WO94/12649; and Wang, et al., Gene Therapy 2:775-783 (1995). In a preferred embodiment, adenovirus vectors are used.

[0368] Adeno-associated virus (AAV) has also been proposed for use in gene therapy (Walsh et al., Proc. Soc. Exp. Biol. Med. 204:289-300 (1993); U.S. Pat. No. 5,436,146).

[0369] Another approach to gene therapy involves transferring a gene to cells in tissue culture by such methods as electroporation, lipofection, calcium phosphate mediated transfection, or viral infection. Usually, the method of transfer includes the transfer of a selectable marker to the cells. The cells are then placed under selection to isolate those cells that have taken up and are expressing the transferred gene. Those cells are then delivered to a patient.

[0370] In this embodiment, the nucleic acid is introduced into a cell prior to administration in vivo of the resulting recombinant cell. Such introduction can be carried out by any method known in the art, including but not limited to transfection, electroporation, microinjection, infection with a viral or bacteriophage vector containing the nucleic acid sequences, cell fusion, chromosome-mediated gene transfer, microcell-mediated gene transfer, spheroplast fusion, etc. Numerous techniques are known in the art for the introduction of foreign genes into cells (see, e.g., Loeffler and Behr, Meth. Enzymol. 217:599-618 (1993); Cohen et al., Meth. Enzymol. 217:618-644 (1993); Cline, Pharmac. Ther. 29:69-92m (1985) and may be used in accordance with the present invention, provided that the necessary developmental and physiological functions of the recipient cells are not disrupted. The technique should provide for the stable transfer of the nucleic acid to the cell, so that the nucleic acid is expressible by the cell and preferably heritable and expressible by its cell progeny.

[0371] The resulting recombinant cells can be delivered to a patient by various methods known in the art. Recombinant blood cells (e.g., hematopoietic stem or progenitor cells) are preferably administered intravenously. The amount of cells envisioned for use depends on the desired effect, patient state, etc., and can be determined by one skilled in the art.

[0372] Cells into which a nucleic acid can be introduced for purposes of gene therapy encompass any desired, available cell type, and include but are not limited to epithelial cells, endothelial cells, keratinocytes, fibroblasts, muscle cells, hepatocytes; blood cells such as T lymphocytes, B lymphocytes, monocytes, macrophages, neutrophils, eosinophils, megakaryocytes, granulocytes; various stem or progenitor cells, in particular hematopoietic stem or progenitor cells, e.g., as obtained from bone marrow, umbilical cord blood, peripheral blood, fetal liver, etc.

[0373] In a preferred embodiment, the cell used for gene therapy is autologous to the patient.

[0374] In an embodiment in which recombinant cells are used in gene therapy, nucleic acid sequences encoding an antibody are introduced into the cells such that they are expressible by the cells or their progeny, and the recombinant cells are then administered in vivo for therapeutic effect. In a specific embodiment, stem or progenitor cells are used. Any stem and/or progenitor cells which can be isolated and maintained in vitro can potentially be used in accordance with this embodiment of the present invention (see e.g. PCT Publication WO 94/08598; Stemple and Anderson, Cell 71:973-985 (1992); Rheinwald, Meth. Cell Bio. 21A:229 (1980); and Pittelkow and Scott, Mayo Clinic Proc. 61:771 (1986)).

[0375] In a specific embodiment, the nucleic acid to be introduced for purposes of gene therapy comprises an inducible promoter operably linked to the coding region, such that expression of the nucleic acid is controllable by the presence or absence of an appropriate inducer of transcription.

Demonstration of Therapeutic or Prophylactic Activity

[0376] The compounds or pharmaceutical compositions of the invention are preferably tested in vitro, and then in vivo for the desired therapeutic or prophylactic activity, prior to use in humans. For example, in vitro assays to demonstrate the therapeutic or prophylactic utility of a compound or pharmaceutical composition include, the effect of a compound on a cell line or a patient tissue sample. The effect of the compound or composition on the cell line and/or tissue sample can be determined utilizing techniques known to those of skill in the art including, but not limited to, rosette formation assays and cell lysis assays. In accordance with the invention, in vitro assays which can be used to determine whether administration of a specific compound is indicated, include in vitro cell culture assays in which a patient tissue sample is grown in culture, and exposed to or otherwise administered a compound, and the effect of such compound upon the tissue sample is observed.

Therapeutic/Prophylactic Administration and Composition

[0377] The invention provides methods of treatment, inhibition and prophylaxis by administration to a subject of an effective amount of a compound or pharmaceutical composition of the invention, preferably a polypeptide or antibody of the invention. In a preferred embodiment, the compound is substantially purified (e.g., substantially free from substances that limit its effect or produce undesired side-effects). The subject is preferably an animal, including but not limited to animals such as cows, pigs, horses, chickens, cats, dogs, etc., and is preferably a mammal, and most preferably human.

[0378] Formulations and methods of administration that can be employed when the compound comprises a nucleic acid or an immunoglobulin are described above; additional appropriate formulations and routes of administration can be selected from among those described herein below.

[0379] Various delivery systems are known and can be used to administer a compound of the invention, e.g., encapsulation in liposomes, microparticles, microcapsules, recombinant cells capable of expressing the compound, receptor-mediated endocytosis (see, e.g., Wu and Wu, J. Biol. Chem. 262:4429-4432 (1987)), construction of a nucleic acid as part of a retroviral or other vector, etc. Methods of introduction include but are not limited to intradermal, intramuscular, intraperitoneal, intravenous, subcutaneous, intranasal, epidural, and oral routes. The compounds or compositions may be administered by any convenient route, for example by infusion or bolus injection, by absorption through epithelial or mucocutaneous linings (e.g., oral mucosa, rectal and intestinal mucosa, etc.) and may be administered together with other biologically active agents. Administration can be systemic or local. In addition, it may be desirable to introduce the pharmaceutical compounds or compositions of the invention into the central nervous system by any suitable route, including intraventricular and intrathecal injection; intraventricular injection may be facilitated by an intraventricular catheter, for example, attached to a reservoir, such as an Ommaya reservoir. Pulmonary administration can also be employed, e.g., by use of an inhaler or nebulizer, and formulation with an aerosolizing agent.

[0380] In a specific embodiment, it may be desirable to administer the pharmaceutical compounds or compositions of the invention locally to the area in need of treatment; this may be achieved by, for example, and not by way of limitation, local infusion during surgery, topical application, e.g., in conjunction with a wound dressing after surgery, by injection, by means of a catheter, by means of a suppository, or by means of an implant, said implant being of a porous, non-porous, or gelatinous material, including membranes, such as sialastic membranes, or fibers. Preferably, when administering a protein, including an antibody, of the invention, care must be taken to use materials to which the protein does not absorb.

[0381] In another embodiment, the compound or composition can be delivered in a vesicle, in particular a liposome (see Langer, Science 249:1527-1533 (1990); Treat et al., in Liposomes in the Therapy of Infectious Disease and Cancer, Lopez-Berestein and Fidler (eds.), Liss, New York, pp. 353-365 (1989); Lopez-Berestein, ibid., pp. 317-327; see generally ibid.)

[0382] In yet another embodiment, the compound or composition can be delivered in a controlled release system. In one embodiment, a pump may be used (see Langer, supra; Sefton, CRC Crit. Ref. Biomed. Eng. 14:201 (1987); Buchwald et al., Surgery 88:507 (1980); Saudek et al., N. Engl. J. Med. 321:574 (1989)). In another embodiment, polymeric materials can be used (see Medical Applications of Controlled Release, Langer and Wise (eds.), CRC Pres., Boca Raton, Fla. (1974); Controlled Drug Bioavailability, Drug Product Design and Performance, Smolen and Ball (eds.), Wiley, New York (1984); Ranger and Peppas, J., Macromol. Sci. Rev. Macromol. Chem. 23:61 (1983); see also Levy et al., Science 228:190 (1985); During et al., Ann. Neurol. 25:351 (1989); Howard et al., J. Neurosurg. 71:105 (1989)). In yet another embodiment, a controlled release system can be placed in proximity of the therapeutic target, e.g., the brain, thus requiring only a fraction of the systemic dose (see, e.g., Goodson, in Medical Applications of Controlled Release, supra, vol. 2, pp. 115-138 (1984)).

[0383] Other controlled release systems are discussed in the review by Langer (Science 249:1527-1533 (1990)).

[0384] In a specific embodiment where the compound of the invention is a nucleic acid encoding a protein, the nucleic acid can be administered in vivo to promote expression of its encoded protein, by constructing it as part of an appropriate nucleic acid expression vector and administering it so that it becomes intracellular, e.g., by use of a retroviral vector (see U.S. Pat. No. 4,980,286), or by direct injection, or by use of microparticle bombardment (e.g., a gene gun; Biolistic, Dupont), or coating with lipids or cell-surface receptors or transfecting agents, or by administering it in linkage to a homeobox-like peptide which is known to enter the nucleus (see e.g., Joliot et al., Proc. Natl. Acad. Sci. USA 88:1864-1868 (1991)), etc. Alternatively, a nucleic acid can be introduced intracellularly and incorporated within host cell DNA for expression, by homologous recombination.

[0385] The present invention also provides pharmaceutical compositions. Such compositions comprise a therapeutically effective amount of a compound, and a pharmaceutically acceptable carrier. In a specific embodiment, the term “pharmaceutically acceptable” means approved by a regulatory agency of the Federal or a state government or listed in the U.S. Pharmacopeia or other generally recognized pharmacopeia for use in animals, and more particularly in humans. The term “carrier” refers to a diluent, adjuvant, excipient, or vehicle with which the therapeutic is administered. Such pharmaceutical carriers can be sterile liquids, such as water and oils, including those of petroleum, animal, vegetable or synthetic origin, such as peanut oil, soybean oil, mineral oil, sesame oil and the like. Water is a preferred carrier when the pharmaceutical composition is administered intravenously. Saline solutions and aqueous dextrose and glycerol solutions can also be employed as liquid carriers, particularly for injectable solutions. Suitable pharmaceutical excipients include starch, glucose, lactose, sucrose, gelatin, malt, rice, flour, chalk, silica gel, sodium stearate, glycerol monostearate, talc, sodium chloride, dried skim milk, glycerol, propylene, glycol, water, ethanol and the like. The composition, if desired, can also contain minor amounts of wetting or emulsifying agents, or pH buffering agents. These compositions can take the form of solutions, suspensions, emulsion, tablets, pills, capsules, powders, sustained-release formulations and the like. The composition can be formulated as a suppository, with traditional binders and carriers such as triglycerides. Oral formulation can include standard carriers such as pharmaceutical grades of mannitol, lactose, starch, magnesium stearate, sodium saccharine, cellulose, magnesium carbonate, etc. Examples of suitable pharmaceutical carriers are described in “Remington's Pharmaceutical Sciences” by E. W. Martin. Such compositions will contain a therapeutically effective amount of the compound, preferably in purified form, together with a suitable amount of carrier so as to provide the form for proper administration to the patient. The formulation should suit the mode of administration.

[0386] In a preferred embodiment, the composition is formulated in accordance with routine procedures as a pharmaceutical composition adapted for intravenous administration to human beings. Typically, compositions for intravenous administration are solutions in sterile isotonic aqueous buffer. Where necessary, the composition may also include a solubilizing agent and a local anesthetic such as lignocaine to ease pain at the site of the injection. Generally, the ingredients are supplied either separately or mixed together in unit dosage form, for example, as a dry lyophilized powder or water free concentrate in a hermetically sealed container such as an ampoule or sachette indicating the quantity of active agent. Where the composition is to be administered by infusion, it can be dispensed with an infusion bottle containing sterile pharmaceutical grade water or saline. Where the composition is administered by injection, an ampoule of sterile water for injection or saline can be provided so that the ingredients may be mixed prior to administration.

[0387] The compounds of the invention can be formulated as neutral or salt forms. Pharmaceutically acceptable salts include those formed with anions such as those derived from hydrochloric, phosphoric, acetic, oxalic, tartaric acids, etc., and those formed with cations such as those derived from sodium, potassium, ammonium, calcium, ferric hydroxides, isopropylamine, triethylamine, 2-ethylamino ethanol, histidine, procaine, etc.

[0388] The amount of the compound of the invention which will be effective in the treatment, inhibition and prevention of a disease or disorder associated with aberrant expression and/or activity of a polypeptide of the invention can be determined by standard clinical techniques. In addition, in vitro assays may optionally be employed to help identify optimal dosage ranges. The precise dose to be employed in the formulation will also depend on the route of administration, and the seriousness of the disease or disorder, and should be decided according to the judgment of the practitioner and each patient's circumstances. Effective doses may be extrapolated from dose-response curves derived from in vitro or animal model test systems.

[0389] For antibodies, the dosage administered to a patient is typically 0.1 mg/kg to 100 mg/kg of the patient's body weight. Preferably, the dosage administered to a patient is between 0.1 mg/kg and 20 mg/kg of the patient's body weight, more preferably 1 mg/kg to 10 mg/kg of the patient's body weight. Generally, human antibodies have a longer half-life within the human body than antibodies from other species due to the immune response to the foreign polypeptides. Thus, lower dosages of human antibodies and less frequent administration is often possible. Further, the dosage and frequency of administration of antibodies of the invention may be reduced by enhancing uptake and tissue penetration (e.g., into the brain) of the antibodies by modifications such as, for example, lipidation.

[0390] The invention also provides a pharmaceutical pack or kit comprising one or more containers filled with one or more of the ingredients of the pharmaceutical compositions of the invention. Optionally associated with such container(s) can be a notice in the form prescribed by a governmental agency regulating the manufacture, use or sale of pharmaceuticals or biological products, which notice reflects approval by the agency of manufacture, use or sale for human administration.

Diagnosis and Imaging

[0391] Labeled antibodies, and derivatives and analogs thereof, which specifically bind to a polypeptide of interest can be used for diagnostic purposes to detect, diagnose, prognosticate, or monitor immune diseases, disorders, and/or conditions associated with the aberrant expression and/or activity of a polypeptide of the invention. The invention provides for the detection of aberrant expression of a polypeptide of interest, comprising (a) assaying the expression of the polypeptide of interest in cells or body fluid of an individual using one or more antibodies specific to the polypeptide interest and (b) comparing the level of gene expression with a standard gene expression level, whereby an increase or decrease in the assayed polypeptide gene expression level compared to the standard expression level is indicative of aberrant expression.

[0392] The invention provides a diagnostic assay for diagnosing an immune disease or disorder, comprising (a) assaying the expression of the polypeptide of interest in cells or body fluid of an individual using one or more antibodies specific to the polypeptide interest and (b) comparing the level of gene expression with a standard gene expression level, whereby an increase or decrease in the assayed polypeptide gene expression level compared to the standard expression level is indicative of a particular immune disease or disorder. With respect to immunogenic cancers, the presence of a relatively high amount of transcript in biopsied tissue from an individual may indicate a predisposition for the development of the disease, or may provide a means for detecting the disease prior to the appearance of actual clinical symptoms. A more definitive diagnosis of this type may allow health professionals to employ preventative measures or aggressive treatment earlier thereby preventing the development or further progression of the immunogenic cancer.

[0393] Antibodies of the invention can be used to assay protein levels in a biological sample using classical immunohistological methods known to those of skill in the art (e.g., see Jalkanen et al., J. Cell. Biol. 101:976-985 (1985); Jalkanen et al., J. Cell. Biol. 105:3087-3096 (1987)). Other antibody-based methods useful for detecting protein gene expression include immunoassays, such as the enzyme linked immunosorbent assay (ELISA) and the radioimmunoassay (RIA). Suitable antibody assay labels are known in the art and include enzyme labels, such as, glucose oxidase; radioisotopes, such as iodine (125I, 121I), carbon (14C), sulfur (35S), tritium (3H), indium (112In), and technetium (99Tc); luminescent labels, such as luminol; and fluorescent labels, such as fluorescein and rhodamine, and biotin.

[0394] One facet of the invention is the detection and diagnosis of a disease or disorder associated with aberrant expression of a polypeptide of interest in an animal, preferably a mammal and most preferably a human. In one embodiment, diagnosis comprises: a) administering (for example, parenterally, subcutaneously, or intraperitoneally) to a subject an effective amount of a labeled molecule which specifically binds to the polypeptide of interest; b) waiting for a time interval following the administering for permitting the labeled molecule to preferentially concentrate at sites in the subject where the polypeptide is expressed (and for unbound labeled molecule to be cleared to background level); c) determining background level; and d) detecting the labeled molecule in the subject, such that detection of labeled molecule above the background level indicates that the subject has a particular disease or disorder associated with aberrant expression of the polypeptide of interest. Background level can be determined by various methods including, comparing the amount of labeled molecule detected to a standard value previously determined for a particular system.

[0395] It will be understood in the art that the size of the subject and the imaging system used will determine the quantity of imaging moiety needed to produce diagnostic images. In the case of a radioisotope moiety, for a human subject, the quantity of radioactivity injected will normally range from about 5 to 20 millicuries of 99 mTc. The labeled antibody or antibody fragment will then preferentially accumulate at the location of cells which contain the specific protein. In vivo tumor imaging is described in S. W. Burchiel et al., “Immunopharmacokinetics of Radiolabeled Antibodies and Their Fragments.” (Chapter 13 in Tumor Imaging: The Radiochemical Detection of Cancer, S. W. Burchiel and B. A. Rhodes, eds., Masson Publishing Inc. (1982)).

[0396] Depending on several variables, including the type of label used and the mode of administration, the time interval following the administration for permitting the labeled molecule to preferentially concentrate at sites in the subject and for unbound labeled molecule to be cleared to background level is 6 to 48 hours or 6 to 24 hours or 6 to 12 hours. In another embodiment the time interval following administration is 5 to 20 days or 5 to 10 days.

[0397] In an embodiment, monitoring of the disease or disorder is carried out by repeating the method for diagnosing the disease or disease, for example, one month after initial diagnosis, six months after initial diagnosis, one year after initial diagnosis, etc.

[0398] Presence of the labeled molecule can be detected in the patient using methods known in the art for in vivo scanning. These methods depend upon the type of label used. Skilled artisans will be able to determine the appropriate method for detecting a particular label. Methods and devices that may be used in the diagnostic methods of the invention include, but are not limited to, computed tomography (CT), whole body scan such as position emission tomography (PET), magnetic resonance imaging (MRI), and sonography.

[0399] In a specific embodiment, the molecule is labeled with a radioisotope and is detected in the patient using a radiation responsive surgical instrument (Thurston et al., U.S. Pat. No. 5,441,050). In another embodiment, the molecule is labeled with a fluorescent compound and is detected in the patient using a fluorescence responsive scanning instrument. In another embodiment, the molecule is labeled with a positron emitting metal and is detected in the patent using positron emission-tomography. In yet another embodiment, the molecule is labeled with a paramagnetic label and is detected in a patient using magnetic resonance imaging (MRI).

Kits

[0400] The present invention provides kits that can be used in the above methods. In one embodiment, a kit comprises an antibody of the invention, preferably a purified antibody, in one or more containers. In a specific embodiment, the kits of the present invention contain a substantially isolated polypeptide comprising an epitope that is specifically immunoreactive with an antibody included in the kit. Preferably, the kits of the present invention further comprise a control antibody that does not react with the polypeptide of interest. In another specific embodiment, the kits of the present invention contain a means for detecting the binding of an antibody to a polypeptide of interest (e.g., the antibody may be conjugated to a detectable substrate such as a fluorescent compound, an enzymatic substrate, a radioactive compound or a luminescent compound, or a second antibody which recognizes the first antibody may be conjugated to a detectable substrate).

[0401] In another specific embodiment of the present invention, the kit is a diagnostic kit for use in screening serum containing antibodies specific against proliferative and/or cancerous polynucleotides and polypeptides. Such a kit may include a control antibody that does not react with the polypeptide of interest. Such a kit may include a substantially isolated polypeptide antigen comprising an epitope that is specifically immunoreactive with at least one anti-polypeptide antigen antibody. Further, such a kit includes means for detecting the binding of said antibody to the antigen (e.g., the antibody may be conjugated to a fluorescent compound such as fluorescein or rhodamine which can be detected by flow cytometry). In specific embodiments, the kit may include a recombinantly produced or chemically synthesized polypeptide antigen. The polypeptide antigen of the kit may also be attached to a solid support.

[0402] In a more specific embodiment the detecting means of the above-described kit includes a solid support to which said polypeptide antigen is attached. Such a kit may also include a non-attached reporter-labeled anti-human antibody. In this embodiment, binding of the antibody to the polypeptide antigen can be detected by binding of the said reporter-labeled antibody.

[0403] In an additional embodiment, the invention includes a diagnostic kit for use in screening serum containing antigens of the polypeptide of the invention. The diagnostic kit includes a substantially isolated antibody specifically immunoreactive with polypeptide or polynucleotide antigens, and means for detecting the binding of the polynucleotide or polypeptide antigen to the antibody. In one embodiment, the antibody is attached to a solid support. In a specific embodiment, the antibody may be a monoclonal antibody. The detecting means of the kit may include a second, labeled monoclonal antibody. Alternatively, or in addition, the detecting means may include a labeled, competing antigen.

[0404] In one diagnostic configuration, test serum is reacted with a solid phase reagent having a surface-bound antigen obtained by the methods of the present invention. After binding with specific antigen antibody to the reagent and removing unbound serum components by washing, the reagent is reacted with reporter-labeled anti-human antibody to bind reporter to the reagent in proportion to the amount of bound anti-antigen antibody on the solid support. The reagent is again washed to remove unbound labeled antibody, and the amount of reporter associated with the reagent is determined. Typically, the reporter is an enzyme which is detected by incubating the solid phase in the presence of a suitable fluorometric, luminescent or calorimetric substrate (Sigma, St. Louis, Mo.).

[0405] The solid surface reagent in the above assay is prepared by known techniques for attaching protein material to solid support material, such as polymeric beads, dip sticks, 96-well plate or filter material. These attachment methods generally include non-specific adsorption of the protein to the support or covalent attachment of the protein, typically through a free amine group, to a chemically reactive group on the solid support, such as an activated carboxyl, hydroxyl, or aldehyde group. Alternatively, streptavidin coated plates can be used in conjunction with biotinylated antigen(s).

[0406] Thus, the invention provides an assay system or kit for carrying out this diagnostic method. The kit generally includes a support with surface-bound recombinant antigens, and a reporter-labeled anti-human antibody for detecting surface-bound anti-antigen antibody.

Uses of the Polynucleotides

[0407] Each of the polynucleotides identified herein can be used in numerous ways as reagents. The following description should be considered exemplary and utilizes known techniques.

[0408] The polynucleotides of the present invention are useful for chromosome identification. There exists an ongoing need to identify new chromosome markers, since few chromosome marking reagents, based on actual sequence data (repeat polymorphisms), are presently available. Each sequence is specifically targeted to and can hybridize with a particular location on an individual human chromosome, thus each polynucleotide of the present invention can routinely be used as a chromosome marker using techniques known in the art. Table 1B.1, column 8 provides the chromosome location of some of the polynucleotides of the invention.

[0409] Briefly, sequences can be mapped to chromosomes by preparing PCR primers (preferably at least 15 bp (e.g., 15-25 bp) from the sequences shown in SEQ ID NO:X. Primers can optionally be selected using computer analysis so that primers do not span more than one predicted exon in the genomic DNA. These primers are then used for PCR screening of somatic cell hybrids containing individual human chromosomes. Only those hybrids containing the human gene corresponding to SEQ ID NO:X will yield an amplified fragment.

[0410] Similarly, somatic hybrids provide a rapid method of PCR mapping the polynucleotides to particular chromosomes. Three or more clones can be assigned per day using a single thermal cycler. Moreover, sublocalization of the polynucleotides can be achieved with panels of specific chromosome fragments. Other gene mapping strategies that can be used include in situ hybridization, prescreening with labeled flow-sorted chromosomes, preselection by hybridization to construct chromosome specific-cDNA libraries, and computer mapping techniques (See, e.g., Shuler, Trends Biotechnol 16:456-459 (1998) which is hereby incorporated by reference in its entirety).

[0411] Precise chromosomal location of the polynucleotides can also be achieved using fluorescence in situ hybridization (FISH) of a metaphase chromosomal spread. This technique uses polynucleotides as short as 500 or 600 bases; however, polynucleotides 2,000 bp are preferred. For a review of this technique, see Verma et al., “Human Chromosomes: a Manual of Basic Techniques,” Pergamon Press, New York (1988).

[0412] For chromosome mapping, the polynucleotides can be used individually (to mark a single chromosome or a single site on that chromosome) or in panels (for marking multiple sites and/or multiple chromosomes).

[0413] Thus, the present invention also provides a method for chromosomal localization which involves (a) preparing PCR primers from the polynucleotide sequences in Table 1B and/or Table 2 and SEQ ID NO:X and (b) screening somatic cell hybrids containing individual chromosomes.

[0414] The polynucleotides of the present invention would likewise be useful for radiation hybrid mapping, HAPPY mapping, and long range restriction mapping. For a review of these techniques and others known in the art, see, e.g. Dear, “Genome Mapping: A Practical Approach,” IRL Press at Oxford University Press, London (1997); Aydin, J. Mol. Med. 77:691-694 (1999); Hacia et al., Mol. Psychiatry 3:483-492 (1998); Herrick et al., Chromosome Res. 7:409-423 (1999); Hamilton et al., Methods Cell Biol. 62:265-280 (2000); and/or Ott, J. Hered. 90:68-70 (1999) each of which is hereby incorporated by reference in its entirety.

[0415] Once a polynucleotide has been mapped to a precise chromosomal location, the physical position of the polynucleotide can be used in linkage analysis. Linkage analysis establishes coinheritance between a chromosomal location and presentation of a particular disease. (Disease mapping data are found, for example, in V. McKusick, Mendelian Inheritance in Man (available on line through Johns Hopkins University Welch Medical Library)). Column 9 of Table 1B. 1 provides an OMIM reference identification number of diseases associated with the cytologic band disclosed in column 8 of Table 1B.1, as determined using techniques described herein and by reference to Table 5. Assuming 1 megabase mapping resolution and one gene per 20 kb, a cDNA precisely localized to a chromosomal region associated with the disease could be one of 50-500 potential causative genes.

[0416] Thus, once coinheritance is established, differences in a polynucleotide of the invention and the corresponding gene between affected and unaffected individuals can be examined. First, visible structural alterations in the chromosomes, such as deletions or translocations, are examined in chromosome spreads or by PCR. If no structural alterations exist, the presence of point mutations are ascertained. Mutations observed in some or all affected individuals, but not in normal individuals, indicates that the mutation may cause the disease. However, complete sequencing of the polypeptide and the corresponding gene from several normal individuals is required to distinguish the mutation from a polymorphism. If a new polymorphism is identified, this polymorphic polypeptide can be used for further linkage analysis.

[0417] Furthermore, increased or decreased expression of the gene in affected individuals as compared to unaffected individuals can be assessed using the polynucleotides of the invention. Any of these alterations (altered expression, chromosomal rearrangement, or mutation) can be used as a diagnostic or prognostic marker. Diagnostic and prognostic methods, kits and reagents encompassed by the present invention are briefly described below and more thoroughly elsewhere herein (see e.g., the sections labeled “Antibodies”, “Diagnostic Assays”, and “Methods for Detecting Diseases”).

[0418] Thus, the invention also provides a diagnostic method useful during diagnosis of a disorder, involving measuring the expression level of polynucleotides of the present invention in cells or body fluid from an individual and comparing the measured gene expression level with a standard level of polynucleotide expression level, whereby an increase or decrease in the gene expression level compared to the standard is indicative of a disorder. Additional non-limiting examples of diagnostic methods encompassed by the present invention are more thoroughly described elsewhere herein (see, e.g., Example 12).

[0419] In still another embodiment, the invention includes a kit for analyzing samples for the presence of proliferative and/or cancerous polynucleotides derived from a test subject. In a general embodiment, the kit includes at least one polynucleotide probe containing a nucleotide sequence that will specifically hybridize with a polynucleotide of the invention and a suitable container. In a specific embodiment, the kit includes two polynucleotide probes defining an internal region of the polynucleotide of the invention, where each probe has one strand containing a 31′mer-end internal to the region. In a further embodiment, the probes may be useful as primers for polymerase chain reaction amplification.

[0420] Where a diagnosis of a related disorder, including, for example, diagnosis of a tumor, has already been made according to conventional methods, the present invention is useful as a prognostic indicator, whereby patients exhibiting enhanced or depressed polynucleotide of the invention expression will experience a worse clinical outcome relative to patients expressing the gene at a level nearer the standard level.

[0421] By “measuring the expression level of polynucleotides of the invention” is intended qualitatively or quantitatively measuring or estimating the level of the polypeptide of the invention or the level of the mRNA encoding the polypeptide of the invention in a first biological sample either directly (e.g., by determining or estimating absolute protein level or mRNA level) or relatively (e.g., by comparing to the polypeptide level or mRNA level in a second biological sample). Preferably, the polypeptide level or mRNA level in the first biological sample is measured or estimated and compared to a standard polypeptide level or mRNA level, the standard being taken from a second biological sample obtained from an individual not having the related disorder or being determined by averaging levels from a population of individuals not having a related disorder. As will be appreciated in the art, once a standard polypeptide level or mRNA level is known, it can be used repeatedly as a standard for comparison.

[0422] By “biological sample” is intended any biological sample obtained from an individual, body fluid, cell line, tissue culture, or other source that contains polypeptide of the present invention or the corresponding mRNA. As indicated, biological samples include body fluids (such as semen, lymph, vaginal pool, sera, plasma, urine, synovial fluid and spinal fluid) which contain the polypeptide of the present invention, and tissue sources found to express the polypeptide of the present invention. Methods for obtaining tissue biopsies and body fluids from mammals are well known in the art. Where the biological sample is to include mRNA, a tissue biopsy is the preferred source.

[0423] The method(s) provided above may preferably be applied in a diagnostic method and/or kits in which polynucleotides and/or polypeptides of the invention are attached to a solid support. In one exemplary method, the support may be a “gene chip” or a “biological chip” as described in U.S. Pat. Nos. 5,837,832, 5,874,219, and 5,856,174. Further, such a gene chip with polynucleotides of the invention attached may be used to identify polymorphisms between the isolated polynucleotide sequences of the invention, with polynucleotides isolated from a test subject. The knowledge of such polymorphisms (i.e. their location, as well as, their existence) would be beneficial in identifying disease loci for many disorders, such as for example, in neural disorders, immune system disorders, muscular disorders, reproductive disorders, gastrointestinal disorders, pulmonary disorders, digestive disorders, metabolic disorders, cardiovascular disorders, renal disorders, proliferative disorders, and/or cancerous diseases and conditions. Such a method is described in U.S. Pat. Nos. 5,858,659 and 5,856,104. The US patents referenced supra are hereby incorporated by reference in their entirety herein.

[0424] The present invention encompasses polynucleotides of the present invention that are chemically synthesized, or reproduced as peptide nucleic acids (PNA), or according to other methods known in the art. The use of PNAs would serve as the preferred form if the polynucleotides of the invention are incorporated onto a solid support, or gene chip. For the purposes of the present invention, a peptide nucleic acid (PNA) is a polyamide type of DNA analog and the monomeric units for adenine, guanine, thymine and cytosine are available commercially (Perceptive Biosystems). Certain components of DNA, such as phosphorus, phosphorus oxides, or deoxyribose derivatives, are not present in PNAs. As disclosed by Nielsen et al., Science 254, 1497 (1991); and Egholm et al., Nature 365, 666 (1993), PNAs bind specifically and tightly to complementary DNA strands and are not degraded by nucleases. In fact, PNA binds more strongly to DNA than DNA itself does. This is probably because there is no electrostatic repulsion between the two strands, and also the polyamide backbone is more flexible. Because of this, PNA/DNA duplexes bind under a wider range of stringency conditions than DNA/DNA duplexes, making it easier to perform multiplex hybridization. Smaller probes can be used than with DNA due to the strong binding. In addition, it is more likely that single base mismatches can be determined with PNA/DNA hybridization because a single mismatch in a PNA/DNA 15-mer lowers the melting point (T.sub.m) by 8°-20° C., vs. 4°-16° C. for the DNA/DNA 15-mer duplex. Also, the absence of charge groups in PNA means that hybridization can be done at low ionic strengths and reduce possible interference by salt during the analysis.

[0425] The compounds of the present invention have uses which include, but are not limited to, detecting cancer in mammals. In particular the invention is useful during diagnosis of pathological cell proliferative neoplasias which include, but are not limited to: acute myelogenous leukemias including acute monocytic leukemia, acute myeloblastic leukemia, acute promyelocytic leukemia, acute myelomonocytic leukemia, acute erythroleukemia, acute megakaryocytic leukemia, and acute undifferentiated leukemia, etc.; and chronic myelogenous leukemias including chronic myelomonocytic leukemia, chronic granulocytic leukemia, etc. Preferred mammals include monkeys, apes, cats, dogs, cows, pigs, horses, rabbits and humans. Particularly preferred are humans.

[0426] Pathological cell proliferative disorders are often associated with inappropriate activation of proto-oncogenes. (Gelmann, E. P. et al., “The Etiology of Acute Leukemia: Molecular Genetics and Viral Oncology,” in Neoplastic Diseases of the Blood, Vol 1, Wiernik, P. H. et al. eds., 161-182 (1985)). Neoplasias are now believed to result from the qualitative alteration of a normal cellular gene product, or from the quantitative modification of gene expression by insertion into the chromosome of a viral sequence, by chromosomal translocation of a gene to a more actively transcribed region, or by some other mechanism. (Gelmann et al., supra) It is likely that mutated or altered expression of specific genes is involved in the pathogenesis of some leukemias, among other tissues and cell types. (Gelmann et al., supra) Indeed, the human counterparts of the oncogenes involved in some animal neoplasias have been amplified or translocated in some cases of human leukemia and carcinoma. (Gelmann et al., supra)

[0427] For example, c-myc expression is highly amplified in the non-lymphocytic leukemia cell line HL-60. When HL-60 cells are chemically induced to stop proliferation, the level of c-myc is found to be downregulated. (International Publication Number WO 91/15580). However, it has been shown that exposure of HL-60 cells to a DNA construct that is complementary to the 5′ end of c-myc or c-myb blocks translation of the corresponding mRNAs which down-regulates expression of the c-myc or c-myb proteins and causes arrest of cell proliferation and differentiation of the treated cells. (International Publication Number WO 91/15580; Wickstrom et al., Proc. Natl. Acad. Sci. 85:1028 (1988); Anfossi et al., Proc. Natl. Acad. Sci. 86:3379 (1989)). However, the skilled artisan would appreciate the present invention's usefulness is not be limited to treatment, prevention, and/or prognosis of proliferative disorders of cells and tissues of hematopoietic origin, in light of the numerous cells and cell types of varying origins which are known to exhibit proliferative phenotypes.

[0428] In addition to the foregoing, a polynucleotide of the present invention can be used to control gene expression through triple helix formation or through antisense DNA or RNA. Antisense techniques are discussed, for example, in Okano, J. Neurochem. 56: 560 (1991); “Oligodeoxynucleotides as Antisense Inhibitors of Gene Expression, CRC Press, Boca Raton, Fla. (1988). Triple helix formation is discussed in, for instance Lee et al., Nucleic Acids Research 6: 3073 (1979); Cooney et al., Science 241: 456 (1988); and Dervan et al., Science 251: 1360 (1991). Both methods rely on binding of the polynucleotide to a complementary DNA or RNA. For these techniques, preferred polynucleotides are usually oligonucleotides 20 to 40 bases in length and complementary to either the region of the gene involved in transcription (triple helix—see Lee et al., Nucl. Acids Res. 6:3073 (1979); Cooney et al., Science 241:456 (1988); and Dervan et al., Science 251:1360 (1991)) or to the mRNA itself (antisense—Okano, J. Neurochem. 56:560 (1991); Oligodeoxy-nucleotides as Antisense Inhibitors of Gene Expression, CRC Press, Boca Raton, Fla. (1988)). Triple helix formation optimally results in a shut-off of RNA transcription from DNA, while antisense RNA hybridization blocks translation of an mRNA molecule into polypeptide. The oligonucleotide described above can also be delivered to cells such that the antisense RNA or DNA may be expressed in vivo to inhibit production of polypeptide of the present invention antigens. Both techniques are effective in model systems, and the information disclosed herein can be used to design antisense or triple helix polynucleotides in an effort to treat disease, and in particular, for the treatment of proliferative diseases and/or conditions. Non-limiting antisense and triple helix methods encompassed by the present invention are more thoroughly described elsewhere herein (see, e.g., the section labeled “Antisense and Ribozyme (Antagonists)”).

[0429] Polynucleotides of the present invention are also useful in gene therapy. One goal of gene therapy is to insert a normal gene into an organism having a defective gene, in an effort to correct the genetic defect. The polynucleotides disclosed in the present invention offer a means of targeting such genetic defects in a highly accurate manner. Another goal is to insert a new gene that was not present in the host genome, thereby producing a new trait in the host cell. Additional non-limiting examples of gene therapy methods encompassed by the present invention are more thoroughly described elsewhere herein (see, e.g., the sections labeled “Gene Therapy Methods”, and Examples 16, 17 and 18).

[0430] The polynucleotides are also useful for identifying individuals from minute biological samples. The United States military, for example, is considering the use of restriction fragment length polymorphism (RFLP) for identification of its personnel. In this technique, an individual's genomic DNA is digested with one or more restriction enzymes, and probed on a Southern blot to yield unique bands for identifying personnel. This method does not suffer from the current limitations of “Dog Tags” which can be lost, switched, or stolen, making positive identification difficult. The polynucleotides of the present invention can be used as additional DNA markers for RFLP.

[0431] The polynucleotides of the present invention can also be used as an alternative to RFLP, by determining the actual base-by-base DNA sequence of selected portions of an individual's genome. These sequences can be used to prepare PCR primers for amplifying and isolating such selected DNA, which can then be sequenced. Using this technique, individuals can be identified because each individual will have a unique set of DNA sequences. Once an unique ID database is established for an individual, positive identification of that individual, living or dead, can be made from extremely small tissue samples.

[0432] Forensic biology also benefits from using DNA-based identification techniques as disclosed herein. DNA sequences taken from very small biological samples such as tissues, e.g., hair or skin, or body fluids, e.g., blood, saliva, semen, synovial fluid, amniotic fluid, breast milk, lymph, pulmonary sputum or surfactant, urine, fecal matter, etc., can be amplified using PCR. In one prior art technique, gene sequences amplified from polymorphic loci, such as DQa class II HLA gene, are used in forensic biology to identify individuals. (Erlich, H., PCR Technology, Freeman and Co. (1992)). Once these specific polymorphic loci are amplified, they are digested with one or more restriction enzymes, yielding an identifying set of bands on a Southern blot probed with DNA corresponding to the DQa class II HLA gene. Similarly, polynucleotides of the present invention can be used as polymorphic markers for forensic purposes.

[0433] There is also a need for reagents capable of identifying the source of a particular tissue. Such need arises, for example, in forensics when presented with tissue of unknown origin. Appropriate reagents can comprise, for example, DNA probes or primers prepared from the sequences of the present invention, specific to tissues, including but not limited to those shown in Table 1B. Panels of such reagents can identify tissue by species and/or by organ type. In a similar fashion, these reagents can be used to screen tissue cultures for contamination. Additional non-limiting examples of such uses are further described herein.

[0434] The polynucleotides of the present invention are also useful as hybridization probes for differential identification of the tissue(s) or cell type(s) present in a biological sample. Similarly, polypeptides and antibodies directed to polypeptides of the present invention are useful to provide immunological probes for differential identification of the tissue(s) (e.g., immunohistochemistry assays) or cell type(s) (e.g., immunocytochemistry assays). In addition, for a number of disorders of the above tissues or cells, significantly higher or lower levels of gene expression of the polynucleotides/polypeptides of the present invention may be detected in certain tissues (e.g., tissues expressing polypeptides and/or polynucleotides of the present invention, for example, those disclosed in Table 1B, and/or cancerous and/or wounded tissues) or bodily fluids (e.g., semen, lymph, vaginal pool, serum, plasma, urine, synovial fluid or spinal fluid) taken from an individual having such a disorder, relative to a “standard” gene expression level, i.e., the expression level in healthy tissue from an individual not having the disorder.

[0435] Thus, the invention provides a diagnostic method of a disorder, which involves: (a) assaying gene expression level in cells or body fluid of an individual; (b) comparing the gene expression level with a standard gene expression level, whereby an increase or decrease in the assayed gene expression level compared to the standard expression level is indicative of a disorder.

[0436] In the very least, the polynucleotides of the present invention can be used as molecular weight markers on Southern gels, as diagnostic probes for the presence of a specific mRNA in a particular cell type, as a probe to “subtract-out” known sequences in the process of discovering novel polynucleotides, for selecting and making oligomers for attachment to a “gene chip” or other support, to raise anti-DNA antibodies using DNA immunization techniques, and as an antigen to elicit an immune response.

Uses of the Polypeptides

[0437] Each of the polypeptides identified herein can be used in numerous ways. The following description should be considered exemplary and utilizes known techniques.

[0438] Polypeptides and antibodies directed to polypeptides of the present invention are useful to provide immunological probes for differential identification of the tissue(s) (e.g., immunohistochemistry assays such as, for example, ABC immunoperoxidase (Hsu et al., J. Histochem. Cytochem. 29:577-580 (1981)) or cell type(s) (e.g., immunocytochemistry assays).

[0439] Antibodies can be used to assay levels of polypeptides encoded by polynucleotides of the invention in a biological sample using classical immunohistological methods known to those of skill in the art (e.g., see Jalkanen, et al., J. Cell. Biol. 101:976-985 (1985); Jalkanen, et al., J. Cell. Biol. 105:3087-3096 (1987)). Other antibody-based methods useful for detecting protein gene expression include immunoassays, such as the enzyme linked immunosorbent assay (ELISA) and the radioimmunoassay (RIA). Suitable antibody assay labels are known in the art and include enzyme labels, such as, glucose oxidase; radioisotopes, such as iodine (¹³¹I, ¹²⁵I, ¹²³I, ¹²¹I), carbon (¹⁴C), sulfur (³⁵S), tritium (³H), indium (^{115m}In, ^{113m}In, ¹¹²In, ¹¹¹In), and technetium (⁹⁹Tc, ^{99m}Tc), thallium (²⁰¹Ti), gallium (⁶⁸Ga, ⁶⁷Ga), palladium (¹⁰³Pd), molybdenum (⁹⁹Mo), xenon (¹³³ Xe), fluorine (¹⁸ F), ¹⁵³Sm, ¹⁷⁷Lu, ¹⁵⁹Gd, ¹⁴⁹ Pm, ¹⁴⁰La, ¹⁷⁵Yb, ¹⁶⁶Ho, ⁹⁰Y, ⁴⁷Sc, ¹⁸⁶Re, ¹⁸⁸Re, ¹⁴²Pr, ¹⁰⁵Rh, ⁹⁷Ru; luminescent labels, such as luminol; and fluorescent labels, such as fluorescein and rhodamine, and biotin.

[0440] In addition to assaying levels of polypeptide of the present invention in a biological sample, proteins can also be detected in vivo by imaging. Antibody labels or markers for in vivo imaging of protein include those detectable by X-radiography, NMR or ESR. For X-radiography, suitable labels include radioisotopes such as barium or cesium, which emit detectable radiation but are not overtly harmful to the subject. Suitable markers for NMR and ESR include those with a detectable characteristic spin, such as deuterium, which may be incorporated into the antibody by labeling of nutrients for the relevant hybridoma.

[0441] A protein-specific antibody or antibody fragment which has been labeled with an appropriate detectable imaging moiety, such as a radioisotope (for example, ¹³¹I, ¹¹²In, ^{99m}Tc, (¹³¹I, ¹²⁵I, ¹²³I, ¹²¹I), carbon (¹⁴C), sulfur (³⁵S), tritium (³H), indium (^{115m}In, ^{113m}In, ¹¹²In, ¹¹¹In), and technetium (⁹⁹Tc, ^{99m}Tc), thallium (²⁰¹Ti), gallium (⁶⁸Ga, ⁶⁷Ga), palladium (¹⁰³Pd), molybdenum (⁹⁹Mo), xenon (¹³³Xe), fluorine (¹⁸F, ¹⁵³Sm, ¹⁷⁷Lu, ¹⁵⁹Gd, ¹⁴⁹ Pm, ¹⁴⁰La, ¹⁷⁵Yb, ¹⁶⁶Ho, ⁹⁰Y, ⁴⁷Sc, ¹⁸⁶Re, ¹⁸⁸Re, ¹⁴²Pr, ¹⁰⁵Rh, ⁹⁷Ru), a radio-opaque substance, or a material detectable by nuclear magnetic resonance, is introduced (for example, parenterally, subcutaneously or intraperitoneally) into the mammal to be examined for immune system disorder. It will be understood in the art that the size of the subject and the imaging system used will determine the quantity of imaging moiety needed to produce diagnostic images. In the case of a radioisotope moiety, for a human subject, the quantity of radioactivity injected will normally range from about 5 to 20 millicuries of ^{99m}Tc. The labeled antibody or antibody fragment will then preferentially accumulate at the location of cells which express the polypeptide encoded by a polynucleotide of the invention. In vivo tumor imaging is described in S. W. Burchiel et al., “Immunopharmacokinetics of Radiolabeled Antibodies and Their Fragments” (Chapter 13 in Tumor Imaging: The Radiochemical Detection of Cancer, S. W. Burchiel and B. A. Rhodes, eds., Masson Publishing Inc. (1982)).

[0442] In one embodiment, the invention provides a method for the specific delivery of compositions of the invention to cells by administering polypeptides of the invention (e.g., polypeptides encoded by polynucleotides of the invention and/or antibodies) that are associated with heterologous polypeptides or nucleic acids. In one example, the invention provides a method for delivering a therapeutic protein into the targeted cell. In another example, the invention provides a method for delivering a single stranded nucleic acid (e.g., antisense or ribozymes) or double stranded nucleic acid (e.g., DNA that can integrate into the cell's genome or replicate episomally and that can be transcribed) into the targeted cell.

[0443] In another embodiment, the invention provides a method for the specific destruction of cells (e.g., the destruction of tumor cells) by administering polypeptides of the invention in association with toxins or cytotoxic prodrugs.

[0444] By “toxin” is meant one or more compounds that bind and activate endogenous cytotoxic effector systems, radioisotopes, holotoxins, modified toxins, catalytic subunits of toxins, or any molecules or enzymes not normally present in or on the surface of a cell that under defined conditions cause the cell's death. Toxins that may be used according to the methods of the invention include, but are not limited to, radioisotopes known in the art, compounds such as, for example, antibodies (or complement fixing containing portions thereof) that bind an inherent or induced endogenous cytotoxic effector system, thymidine kinase, endonuclease, RNAse, alpha toxin, ricin, abrin, Pseudomonas exotoxin A, diphtheria toxin, saporin, momordin, gelonin, pokeweed antiviral protein, alpha-sarcin and cholera toxin. “Toxin” also includes a cytostatic or cytocidal agent, a therapeutic agent or a radioactive metal ion, e.g., alpha-emitters such as, for example, ²¹³Bi, or other radioisotopes such as, for example, ¹⁰³Pd, ¹³³Xe, ¹³¹I, ⁶⁸Ge, ⁵⁷Co, ⁶⁵Zn, ⁸⁵Sr, ³²P, ³⁵S, ⁹⁰Y, ¹⁵³Sm, ¹⁵³Gd, ¹⁶⁹Yb, ⁵¹Cr, ⁵⁴Mn, ⁷⁵Se, ¹¹³Sn, ⁹⁰Yttrium, ¹¹⁷Tin, ¹⁸⁶ Rhenium, ¹⁶⁶Holmium, and ¹⁸⁸Rhenium; luminescent labels, such as luminol; and fluorescent labels, such as fluorescein and rhodamine, and biotin. In a specific embodiment, the invention provides a method for the specific destruction of cells (e.g., the destruction of tumor cells) by administering polypeptides of the invention or antibodies of the invention in association with the radioisotope ⁹⁰Y. In another specific embodiment, the invention provides a method for the specific destruction of cells (e.g., the destruction of tumor cells) by administering polypeptides of the invention or antibodies of the invention in association with the radioisotope ¹¹¹In. In a further specific embodiment, the invention provides a method for the specific destruction of cells (e.g., the destruction of tumor cells) by administering polypeptides of the invention or antibodies of the invention in association with the radioisotope ¹³¹I.

[0445] Techniques known in the art may be applied to label polypeptides of the invention (including antibodies). Such techniques include, but are not limited to, the use of bifunctional conjugating agents (see e.g., U.S. Pat. Nos. 5,756,065; 5,714,631; 5,696,239; 5,652,361; 5,505,931; 5,489,425; 5,435,990; 5,428,139; 5,342,604; 5,274,119; 4,994,560; and 5,808,003; the contents of each of which are hereby incorporated by reference in its entirety).

[0446] Thus, the invention provides a diagnostic method of a disorder, which involves (a) assaying the expression level of a polypeptide of the present invention in cells or body fluid of an individual; and (b) comparing the assayed polypeptide expression level with a standard polypeptide expression level, whereby an increase or decrease in the assayed polypeptide expression level compared to the standard expression level is indicative of a disorder. With respect to cancer, the presence of a relatively high amount of transcript in biopsied tissue from an individual may indicate a predisposition for the development of the disease, or may provide a means for detecting the disease prior to the appearance of actual clinical symptoms. A more definitive diagnosis of this type may allow health professionals to employ preventative measures or aggressive treatment earlier thereby preventing the development or further progression of the cancer.

[0447] Moreover, polypeptides of the present invention can be used to treat or prevent diseases or conditions such as, for example, neural disorders, immune system disorders, muscular disorders, reproductive disorders, gastrointestinal disorders, pulmonary disorders, cardiovascular disorders, renal disorders, proliferative disorders, and/or cancerous diseases and conditions. For example, patients can be administered a polypeptide of the present invention in an effort to replace absent or decreased levels of the polypeptide (e.g., insulin), to supplement absent or decreased levels of a different polypeptide (e.g., hemoglobin S for hemoglobin B, SOD, catalase, DNA repair proteins), to inhibit the activity of a polypeptide (e.g., an oncogene or tumor supressor), to activate the activity of a polypeptide (e.g., by binding to a receptor), to reduce the activity of a membrane bound receptor by competing with it for free ligand (e.g., soluble TNF receptors used in reducing inflammation), or to bring about a desired response (e.g., blood vessel growth inhibition, enhancement of the immune response to proliferative cells or tissues).

[0448] Similarly, antibodies directed to a polypeptide of the present invention can also be used to treat disease (as described supra, and elsewhere herein). For example, administration of an antibody directed to a polypeptide of the present invention can bind, and/or neutralize the polypeptide, and/or reduce overproduction of the polypeptide. Similarly, administration of an antibody can activate the polypeptide, such as by binding to a polypeptide bound to a membrane (receptor).

[0449] At the very least, the polypeptides of the present invention can be used as molecular weight markers on SDS-PAGE gels or on molecular sieve gel filtration columns using methods well known to those of skill in the art. Polypeptides can also be used to raise antibodies, which in turn are used to measure protein expression from a recombinant cell, as a way of assessing transformation of the host cell. Moreover, the polypeptides of the present invention can be used to test the biological activities described herein.

Diagnostic Assays

[0450] The compounds of the present invention are useful for diagnosis, treatment, prevention and/or prognosis of various disorders in mammals, preferably humans. Such disorders include, but are not limited to, those related to biological activities described in Table 1D and, also as described herein under the section heading “Biological Activities”.

[0451] For a number of disorders, substantially altered (increased or decreased) levels of gene expression can be detected in tissues, cells or bodily fluids (e.g., sera, plasma, urine, semen, synovial fluid or spinal fluid) taken from an individual having such a disorder, relative to a “standard” gene expression level, that is, the expression level in tissues or bodily fluids from an individual not having the disorder. Thus, the invention provides a diagnostic method useful during diagnosis of a disorder, which involves measuring the expression level of the gene encoding the polypeptide in tissues, cells or body fluid from an individual and comparing the measured gene expression level with a standard gene expression level, whereby an increase or decrease in the gene expression level(s) compared to the standard is indicative of a disorder. These diagnostic assays may be performed in vivo or in vitro, such as, for example, on blood samples, biopsy tissue or autopsy tissue.

[0452] The present invention is also useful as a prognostic indicator, whereby patients exhibiting enhanced or depressed gene expression will experience a worse clinical outcome relative to patients expressing the gene at a level nearer the standard level.

[0453] In certain embodiments, a polypeptide of the invention, or polynucleotides, antibodies, agonists, or antagonists corresponding to that polypeptide, may be used to diagnose and/or prognosticate diseases and/or disorders associated with the tissue(s) in which the polypeptide of the invention is expressed, including one, two, three, four, five, or more tissues disclosed in Table 1B.2, column 5 (Tissue Distribution Library Code).

[0454] By “assaying the expression level of the gene encoding the polypeptide” is intended qualitatively or quantitatively measuring or estimating the level of the polypeptide of the invention or the level of the mRNA encoding the polypeptide of the invention in a first biological sample either directly (e.g., by determining or estimating absolute protein level or mRNA level) or relatively (e.g., by comparing to the polypeptide level or mRNA level in a second biological sample). Preferably, the polypeptide expression level or mRNA level in the first biological sample is measured or estimated and compared to a standard polypeptide level or mRNA level, the standard being taken from a second biological sample obtained from an individual not having the disorder or being determined by averaging levels from a population of individuals not having the disorder. As will be appreciated in the art, once a standard polypeptide level or mRNA level is known, it can be used repeatedly as a standard for comparison.

[0455] By “biological sample” is intended any biological sample obtained from an individual, cell line, tissue culture, or other source containing polypeptides of the invention (including portions thereof) or mRNA. As indicated, biological samples include body fluids (such as sera, plasma, urine, synovial fluid and spinal fluid) and tissue sources found to express the full length or fragments thereof of a polypeptide or mRNA. Methods for obtaining tissue biopsies and body fluids from mammals are well known in the art. Where the biological sample is to include mRNA, a tissue biopsy is the preferred source.

[0456] Total cellular RNA can be isolated from a biological sample using any suitable technique such as the single-step guanidinium-thiocyanate-phenol-chloroform method described in Chomczynski and Sacchi, Anal. Biochem. 162:156-159 (1987). Levels of mRNA encoding the polypeptides of the invention are then assayed using any appropriate method. These include Northern blot analysis, S1 nuclease mapping, the polymerase chain reaction (PCR), reverse transcription in combination with the polymerase chain reaction (RT-PCR), and reverse transcription in combination with the ligase chain reaction (RT-LCR).

[0457] The present invention also relates to diagnostic assays such as quantitative and diagnostic assays for detecting levels of polypeptides of the invention, in a biological sample (e.g., cells and tissues), including determination of normal and abnormal levels of polypeptides. Thus, for instance, a diagnostic assay in accordance with the invention for detecting over-expression of polypeptides of the invention compared to normal control tissue samples may be used to detect the presence of tumors. Assay techniques that can be used to determine levels of a polypeptide, such as a polypeptide of the present invention in a sample derived from a host are well-known to those of skill in the art. Such assay methods include radioimmunoassays, competitive-binding assays, Western Blot analysis and ELISA assays. Assaying polypeptide levels in a biological sample can occur using any art-known method.

[0458] Assaying polypeptide levels in a biological sample can occur using antibody-based techniques. For example, polypeptide expression in tissues can be studied with classical immunohistological methods (Jalkanen et al., J. Cell. Biol. 101:976-985 (1985); Jalkanen, M., et al., J. Cell. Biol. 105:3087-3096 (1987)). Other antibody-based methods useful for detecting polypeptide gene expression include immunoassays, such as the enzyme linked immunosorbent assay (ELISA) and the radioimmunoassay (RIA). Suitable antibody assay labels are known in the art and include enzyme labels, such as, glucose oxidase, and radioisotopes, such as iodine (125I, ¹²¹I), carbon (¹⁴C), sulfur (³⁵S), tritium (³H), indium (¹¹²In), and technetium (^{99m}Tc), and fluorescent labels, such as fluorescein and rhodamine, and biotin.

[0459] The tissue or cell type to be analyzed will generally include those which are known, or suspected, to express the gene of inteest (such as, for example, cancer). The protein isolation methods employed herein may, for example, be such as those described in Harlow and Lane (Harlow, E. and Lane, D., 1988, “Antibodies: A Laboratory Manual”, Cold Spring Harbor Laboratory Press, Cold Spring Harbor, N.Y.), which is incorporated herein by reference in its entirety. The isolated cells can be derived from cell culture or from a patient. The analysis of cells taken from culture may be a necessary step in the assessment of cells that could be used as part of a cell-based gene therapy technique or, alternatively, to test the effect of compounds on the expression of the gene.

[0460] For example, antibodies, or fragments of antibodies, such as those described herein, may be used to quantitatively or qualitatively detect the presence of gene products or conserved variants or peptide fragments thereof. This can be accomplished, for example, by immunofluorescence techniques employing a fluorescently labeled antibody coupled with light microscopic, flow cytometric, or fluorimetric detection.

[0461] In a preferred embodiment, antibodies, or fragments of antibodies directed to any one or all of the predicted epitope domains of the polypeptides of the invention (shown in Table 1B) may be used to quantitatively or qualitatively detect the presence of gene products or conserved variants or peptide fragments thereof. This can be accomplished, for example, by immunofluorescence techniques employing a fluorescently labeled antibody coupled with light microscopic, flow cytometric, or fluorimetric detection.

[0462] In an additional preferred embodiment, antibodies, or fragments of antibodies directed to a conformational epitope of a polypeptide of the invention may be used to quantitatively or qualitatively detect the presence of gene products or conserved variants or peptide fragments thereof. This can be accomplished, for example, by immunofluorescence techniques employing a fluorescently labeled antibody coupled with light microscopic, flow cytometric, or fluorimetric detection.

[0463] The antibodies (or fragments thereof), and/or polypeptides of the present invention may, additionally, be employed histologically, as in immunofluorescence, immunoelectron microscopy or non-immunological assays, for in situ detection of gene products or conserved variants or peptide fragments thereof. In situ detection may be accomplished by removing a histological specimen from a patient, and applying thereto a labeled antibody or polypeptide of the present invention. The antibody (or fragment thereof) or polypeptide is preferably applied by overlaying the labeled antibody (or fragment) onto a biological sample. Through the use of such a procedure, it is possible to determine not only the presence of the gene product, or conserved variants or peptide fragments, or polypeptide binding, but also its distribution in the examined tissue. Using the present invention, those of ordinary skill will readily perceive that any of a wide variety of histological methods (such as staining procedures) can be modified in order to achieve such in situ detection.

[0464] Immunoassays and non-immunoassays for gene products or conserved variants or peptide fragments thereof will typically comprise incubating a sample, such as a biological fluid, a tissue extract, freshly harvested cells, or lysates of cells which have been incubated in cell culture, in the presence of a detectably labeled antibody capable of binding gene products or conserved variants or peptide fragments thereof, and detecting the bound antibody by any of a number of techniques well-known in the art.

[0465] The biological sample may be brought in contact with and immobilized onto a solid phase support or carrier such as nitrocellulose, or other solid support that is capable of immobilizing cells, cell particles or soluble proteins. The support may then be washed with suitable buffers followed by treatment with the detectably labeled antibody or detectable polypeptide of the invention. The solid phase support may then be washed with the buffer a second time to remove unbound antibody or polypeptide. Optionally the antibody is subsequently labeled. The amount of bound label on solid support may then be detected by conventional means.

[0466] By “solid phase support or carrier” is intended any support capable of binding an antigen or an antibody. Well-known supports or carriers include glass, polystyrene, polypropylene, polyethylene, dextran, nylon, amylases, natural and modified celluloses, polyacrylamides, gabbros, and magnetite. The nature of the carrier can be either soluble to some extent or insoluble for the purposes of the present invention. The support material may have virtually any possible structural configuration so long as the coupled molecule is capable of binding to an antigen or antibody. Thus, the support configuration may be spherical, as in a bead, or cylindrical, as in the inside surface of a test tube, or the external surface of a rod. Alternatively, the surface may be flat such as a sheet, test strip, etc. Preferred supports include polystyrene beads. Those skilled in the art will know many other suitable carriers for binding antibody or antigen, or will be able to ascertain the same by use of routine experimentation.

[0467] The binding activity of a given lot of antibody or antigen polypeptide may be determined according to well known methods. Those skilled in the art will be able to determine operative and optimal assay conditions for each determination by employing routine experimentation.

[0468] In addition to assaying polypeptide levels or polynucleotide levels in a biological sample obtained from an individual, polypeptide or polynucleotide can also be detected in vivo by imaging. For example, in one embodiment of the invention, polypeptides and/or antibodies of the invention are used to image diseased cells, such as neoplasms. In another embodiment, polynucleotides of the invention (e.g., polynucleotides complementary to all or a portion of an mRNA) and/or antibodies (e.g., antibodies directed to any one or a combination of the epitopes of a polypeptide of the invention, antibodies directed to a conformational epitope of a polypeptide of the invention, or antibodies directed to the full length polypeptide expressed on the cell surface of a mammalian cell) are used to image diseased or neoplastic cells.

[0469] Antibody labels or markers for in vivo imaging of polypeptides of the invention include those detectable by X-radiography, NMR, MRI, CAT-scans or ESR. For X-radiography, suitable labels include radioisotopes such as barium or cesium, which emit detectable radiation but are not overtly harmful to the subject. Suitable markers for NMR and ESR include those with a detectable characteristic spin, such as deuterium, which may be incorporated into the antibody by labeling of nutrients for the relevant hybridoma. Where in vivo imaging is used to detect enhanced levels of polypeptides for diagnosis in humans, it may be preferable to use human antibodies or “humanized” chimeric monoclonal antibodies. Such antibodies can be produced using techniques described herein or otherwise known in the art. For example methods for producing chimeric antibodies are known in the art. See, for review, Morrison, Science 229:1202 (1985); Oi et al., BioTechniques 4:214 (1986); Cabilly et al., U.S. Pat. No. 4,816,567; Taniguchi et al., EP 171496; Morrison et al., EP 173494; Neuberger et al., WO 8601533; Robinson et al., WO 8702671; Boulianne et al., Nature 312:643 (1984); Neuberger et al., Nature 314:268 (1985).

[0470] Additionally, any polypeptides of the invention whose presence can be detected, can be administered. For example, polypeptides of the invention labeled with a radio-opaque or other appropriate compound can be administered and visualized in vivo, as discussed, above for labeled antibodies. Further, such polypeptides can be utilized for in vitro diagnostic procedures.

[0471] A polypeptide-specific antibody or antibody fragment that has been labeled with an appropriate detectable imaging moiety, such as a radioisotope (for example, ¹³¹I, ¹¹²In, ^{99m}Tc), a radio-opaque substance, or a material detectable by nuclear magnetic resonance, is introduced (for example, parenterally, subcutaneously or intraperitoneally) into the mammal to be examined for a disorder. It will be understood in the art that the size of the subject and the imaging system used will determine the quantity of imaging moiety needed to produce diagnostic images. In the case of a radioisotope moiety, for a human subject, the quantity of radioactivity injected will normally range from about 5 to 20 millicuries of ^{99m}Tc. The labeled antibody or antibody fragment will then preferentially accumulate at the location of cells which contain the antigenic protein. In vivo tumor imaging is described in S. W. Burchiel et al., “Immunopharmacokinetics of Radiolabeled Antibodies and Their Fragments” (Chapter 13 in Tumor Imaging: The Radiochemical Detection of Cancer, S. W. Burchiel and B. A. Rhodes, eds., Masson Publishing Inc. (1982)).

[0472] With respect to antibodies, one of the ways in which an antibody of the present invention can be detectably labeled is by linking the same to a reporter enzyme and using the linked product in an enzyme immunoassay (EIA) (Voller, A., “The Enzyme Linked Immunosorbent Assay (ELISA)”, 1978, Diagnostic Horizons 2:1-7, Microbiological Associates Quarterly Publication, Walkersville, Md.); Voller et al., J. Clin. Pathol. 31:507-520 (1978); Butler, J. E., Meth. Enzymol. 73:482-523 (1981); Maggio, E. (ed.), 1980, Enzyme Immunoassay, CRC Press, Boca Raton, Fla.,; Ishikawa, E. et al., (eds.), 1981, Enzyme Immunoassay, Kgaku Shoin, Tokyo). The reporter enzyme which is bound to the antibody will react with an appropriate substrate, preferably a chromogenic substrate, in such a manner as to produce a chemical moiety which can be detected, for example, by spectrophotometric, fluorimetric or by visual means. Reporter enzymes which can be used to detectably label the antibody include, but are not limited to, malate dehydrogenase, staphylococcal nuclease, delta-5-steroid isomerase, yeast alcohol dehydrogenase, alpha-glycerophosphate, dehydrogenase, triose phosphate isomerase, horseradish peroxidase, alkaline phosphatase, asparaginase, glucose oxidase, beta-galactosidase, ribonuclease, urease, catalase, glucose-6-phosphate dehydrogenase, glucoamylase and acetylcholinesterase. Additionally, the detection can be accomplished by colorimetric methods which employ a chromogenic substrate for the reporter enzyme. Detection may also be accomplished by visual comparison of the extent of enzymatic reaction of a substrate in comparison with similarly prepared standards.

[0473] Detection may also be accomplished using any of a variety of other immunoassays. For example, by radioactively labeling the antibodies or antibody fragments, it is possible to detect polypeptides through the use of a radioimmunoassay (RIA) (see, for example, Weintraub, B., Principles of Radioimmunoassays, Seventh Training Course on Radioligand Assay Techniques, The Endocrine Society, March, 1986, which is incorporated by reference herein). The radioactive isotope can be detected by means including, but not limited to, a gamma counter, a scintillation counter, or autoradiography.

[0474] It is also possible to label the antibody with a fluorescent compound. When the fluorescently labeled antibody is exposed to light of the proper wave length, its presence can then be detected due to fluorescence. Among the most commonly used fluorescent labeling compounds are fluorescein isothiocyanate, rhodamine, phycoerythrin, phycocyanin, allophycocyanin, ophthaldehyde and fluorescamine.

[0475] The antibody can also be detectably labeled using fluorescence emitting metals such as ¹⁵²Eu, or others of the lanthanide series. These metals can be attached to the antibody using such metal chelating groups as diethylenetriaminepentacetic acid (DTPA) or ethylenediaminetetraacetic acid (EDTA).

[0476] The antibody also can be detectably labeled by coupling it to a chemiluminescent compound. The presence of the chemiluminescent-tagged antibody is then determined by detecting the presence of luminescence that arises during the course of a chemical reaction. Examples of particularly useful chemiluminescent labeling compounds are luminol, isoluminol, theromatic acridinium ester, imidazole, acridinium salt and oxalate ester.

[0477] Likewise, a bioluminescent compound may be used to label the antibody of the present invention. Bioluminescence is a type of chemiluminescence found in biological systems in, which a catalytic protein increases the efficiency of the chemiluminescent reaction. The presence of a bioluminescent protein is determined by detecting the presence of luminescence. Important bioluminescent compounds for purposes of labeling are luciferin, luciferase and aequorin.

Methods for Detecting Diseases

[0478] In general, a disease may be detected in a patient based on the presence of one or more proteins of the invention and/or polynucleotides encoding such proteins in a biological sample (for example, blood, sera, urine, and/or tumor biopsies) obtained from the patient. In other words, such proteins may be used as markers to indicate the presence or absence of a disease or disorder, including cancer and/or as described elsewhere herein. In addition, such proteins may be useful for the detection of other diseases and cancers. The binding agents provided herein generally permit detection of the level of antigen that binds to the agent in the biological sample. Polynucleotide primers and probes may be used to detect the level of mRNA encoding polypeptides of the invention, which is also indicative of the presence or absence of a disease or disorder, including cancer. In general, polypeptides of the invention should be present at a level that is at least three fold higher in diseased tissue than in normal tissue.

[0479] There are a variety of assay formats known to those of ordinary skill in the art for using a binding agent to detect polypeptide markers in a sample. See, e.g., Harlow and Lane, supra. In general, the presence or absence of a disease in a patient may be determined by (a) contacting a biological sample obtained from a patient with a binding agent; (b) detecting in the sample a level of polypeptide that binds to the binding agent; and (c) comparing the level of polypeptide with a predetermined cut-off value.

[0480] In a preferred embodiment, the assay involves the use of a binding agent(s) immobilized on a solid support to bind to and remove the polypeptide of the invention from the remainder of the sample. The bound polypeptide may then be detected using a detection reagent that contains a reporter group and specifically binds to the binding agent/polypeptide complex. Such detection reagents may comprise, for example, a binding agent that specifically binds to the polypeptide or an antibody or other agent that specifically binds to the binding agent, such as an anti-immunoglobulin, protein G, protein A or a lectin. Alternatively, a competitive assay may be utilized, in which a polypeptide is labeled with a reporter group and allowed to bind to the immobilized binding agent after incubation of the binding agent with the sample. The extent to which components of the sample inhibit the binding of the labeled polypeptide to the binding agent is indicative of the reactivity of the sample with the immobilized binding agent. Suitable polypeptides for use within such assays include polypeptides of the invention and portions thereof, or antibodies, to which the binding agent binds, as described above.

[0481] The solid support may be any material known to those of skill in the art to which polypeptides of the invention may be attached. For example, the solid support may be a test well in a microtiter plate or a nitrocellulose or other suitable membrane. Alternatively, the support may be a bead or disc, such as glass fiberglass, latex or a plastic material such as polystyrene or polyvinylchloride. The support may also be a magnetic particle or a fiber optic sensor, such as those disclosed, for example, in U.S. Pat. No. 5,359,681. The binding agent may be immobilized on the solid support using a variety of techniques known to those of skill in the art, which are amply described in the patent and scientific literature. In the context of the present invention, the term “immobilization” refers to both noncovalent association, such as adsorption, and covalent attachment (which may be a direct linkage between the agent and functional groups on the support or may be a linkage by way of a cross-linking agent). Immobilization by adsorption to a well in a microtiter plate or to a membrane is preferred. In such cases, adsorption may be achieved by contacting the binding agent, in a suitable buffer, with the solid support for the suitable amount of time. The contact time varies with temperature, but is typically between about 1 hour and about 1 day. In general, contacting a well of plastic microtiter plate (such as polystyrene or polyvinylchloride) with an amount of binding agent ranging from about 10 ng to about 10 ug, and preferably about 100 ng to about 1 ug, is sufficient to immobilize an adequate amount of binding agent.

[0482] Covalent attachment of binding agent to a solid support may generally be achieved by first reacting the support with a bifunctional reagent that will react with both the support and a functional group, such as a hydroxyl or amino group, on the binding agent. For example, the binding agent may be covalently attached to supports having an appropriate polymer coating using benzoquinone or by condensation of an aldehyde group on the support with an amine and an active hydrogen on the binding partner (see, e.g., Pierce Immunotechnology Catalog and Handbook, 1991, at A12-A13).

Gene Therapy Methods

[0483] Also encompassed by the invention are gene therapy methods for treating or preventing disorders, diseases and conditions. The gene therapy methods relate to the introduction of nucleic acid (DNA, RNA and antisense DNA or RNA) sequences into an animal to achieve expression of the polypeptide of the present invention. This method requires a polynucleotide which codes for a polypeptide of the present invention operatively linked to a promoter and any other genetic elements necessary for the expression of the polypeptide by the target tissue. Such gene therapy and delivery techniques are known in the art, see, for example, WO90/11092, which is herein incorporated by reference.

[0484] Thus, for example, cells from a patient may be engineered with a polynucleotide (DNA or RNA) comprising a promoter operably linked to a polynucleotide of the present invention ex vivo, with the engineered cells then being provided to a patient to be treated with the polypeptide of the present invention. Such methods are well-known in the art. For example, see Belldegrun, A., et al., J. Natl. Cancer Inst. 85: 207-216 (1993); Ferrantini, M. et al., Cancer Research 53: 1107-1112 (1993); Ferrantini, M. et al., J. Immunology 153: 4604-4615 (1994); Kaido, T., et al., Int. J. Cancer 60: 221-229 (1995); Ogura, H., et al., Cancer Research 50: 5102-5106 (1990); Santodonato, L., et al., Human Gene Therapy 7:1-10 (1996); Santodonato, L., et al., Gene Therapy 4:1246-1255 (1997); and Zhang, J.-F. et al., Cancer Gene Therapy 3: 31-38 (1996)), which are herein incorporated by reference. In one embodiment, the cells which are engineered are arterial cells. The arterial cells may be reintroduced into the patient through direct injection to the artery, the tissues surrounding the artery, or through catheter injection.

[0485] As discussed in more detail below, the polynucleotide constructs can be delivered by any method that delivers injectable materials to the cells of an animal, such as, injection into the interstitial space of tissues (heart, muscle, skin, lung, liver, and the like). The polynucleotide constructs may be delivered in a pharmaceutically acceptable liquid or aqueous carrier.

[0486] In one embodiment, the polynucleotide of the present invention is delivered as a naked polynucleotide. The term “naked” polynucleotide, DNA or RNA refers to sequences that are free from any delivery vehicle that acts to assist, promote or facilitate entry into the cell, including viral sequences, viral particles, liposome formulations, lipofectin or precipitating agents and the like. However, the polynucleotide of the present invention can also be delivered in liposome formulations and lipofectin formulations and the like can be prepared by methods well known to those skilled in the art. Such methods are described, for example, in U.S. Pat. Nos. 5,593,972, 5,589,466, and 5,580,859, which are herein incorporated by reference.

[0487] The polynucleotide vector constructs used in the gene therapy method are preferably constructs that will not integrate into the host genome nor will they contain sequences that allow for replication. Appropriate vectors include pWLNEO, pSV2CAT, pOG44, pXT1 and pSG available from Stratagene; pSVK3, pBPV, pMSG and pSVL available from Pharmacia; and pEF1/5, pcDNA3.1, and pRc/CMV2 available from Invitrogen. Other suitable vectors will be readily apparent to the skilled artisan.

[0488] Any strong promoter known to those skilled in the art can be used for driving the expression of the polynucleotide sequence. Suitable promoters include adenoviral promoters, such as the adenoviral major late promoter; or heterologous promoters, such as the cytomegalovirus (CMV) promoter; the respiratory syncytial virus (RSV) promoter; inducible promoters, such as the MMT promoter, the metallothionein promoter; heat shock promoters; the albumin promoter; the ApoAI promoter; human globin promoters; viral thymidine kinase promoters, such as the Herpes Simplex thymidine kinase promoter; retroviral LTRs; the b-actin promoter; and human growth hormone promoters. The promoter also may be the native promoter for the polynucleotide of the present invention.

[0489] Unlike other gene therapy techniques, one major advantage of introducing naked nucleic acid sequences into target cells is the transitory nature of the polynucleotide synthesis in the cells. Studies have shown that non-replicating DNA sequences can be introduced into cells to provide production of the desired polypeptide for periods of up to six months.

[0490] The polynucleotide construct can be delivered to the interstitial space of tissues within the an animal, including of muscle, skin, brain, lung, liver, spleen, bone marrow, thymus, heart, lymph, blood, bone, cartilage, pancreas, kidney, gall bladder, stomach, intestine, testis, ovary, uterus, rectum, nervous system, eye, gland, and connective tissue. Interstitial space of the tissues comprises the intercellular, fluid, mucopolysaccharide matrix among the reticular fibers of organ tissues, elastic fibers in the walls of vessels or chambers, collagen fibers of fibrous tissues, or that same matrix within connective tissue ensheathing muscle cells or in the lacunae of bone. It is similarly the space occupied by the plasma of the circulation and the lymph fluid of the lymphatic channels. Delivery to the interstitial space of muscle tissue is preferred for the reasons discussed below. They may be conveniently delivered by injection into the tissues comprising these cells. They are preferably delivered to and expressed in persistent, non-dividing cells which are differentiated, although delivery and expression may be achieved in non-differentiated or less completely differentiated cells, such as, for example, stem cells of blood or skin fibroblasts. In vivo muscle cells are particularly competent in their ability to take up and express polynucleotides.

[0491] For the naked nucleic acid sequence injection, an effective dosage amount of DNA or RNA will be in the range of from about 0.05 mg/kg body weight to about 50 mg/kg body weight. Preferably the dosage will be from about 0.005 mg/kg to about 20 mg/kg and more preferably from about 0.05 mg/kg to about 5 mg/kg. Of course, as the artisan of ordinary skill will appreciate, this dosage will vary according to the tissue site of injection. The appropriate and effective dosage of nucleic acid sequence can readily be determined by those of ordinary skill in the art and may depend on the condition being treated and the route of administration.

[0492] The preferred route of administration is by the parenteral route of injection into the interstitial space of tissues. However, other parenteral routes may also be used, such as, inhalation of an aerosol formulation particularly for delivery to lungs or bronchial tissues, throat or mucous membranes of the nose. In addition, naked DNA constructs can be delivered to arteries during angioplasty by the catheter used in the procedure.

[0493] The naked polynucleotides are delivered by any method known in the art, including, but not limited to, direct needle injection at the delivery site, intravenous injection, topical administration, catheter infusion, and so-called “gene guns”. These delivery methods are known in the art.

[0494] The constructs may also be delivered with delivery vehicles such as viral sequences, viral particles, liposome formulations, lipofectin, precipitating agents, etc. Such methods of delivery are known in the art.

[0495] In certain embodiments, the polynucleotide constructs are complexed in a liposome preparation. Liposomal preparations for use in the instant invention include cationic (positively charged), anionic (negatively charged) and neutral preparations. However, cationic liposomes are particularly preferred because a tight charge complex can be formed between the cationic liposome and the polyanionic nucleic acid. Cationic liposomes have been shown to mediate intracellular delivery of plasmid DNA (Feigner et al., Proc. Natl. Acad. Sci. USA (1987) 84:7413-7416, which is herein incorporated by reference); mRNA (Malone et al., Proc. Natl. Acad. Sci. USA (1989) 86:6077-6081, which is herein incorporated by reference); and purified transcription factors (Debs et al., J. Biol. Chem. (1990) 265:10189-10192, which is herein incorporated by reference), in functional form.

[0496] Cationic liposomes are readily available. For example, N[1-2,3-dioleyloxy)propyl]-N,N,N-triethylammonium (DOTMA) liposomes are particularly useful and are available under the trademark Lipofectin, from GIBCO BRL, Grand Island, N.Y. (See, also, Felgner et al., Proc. Natl Acad. Sci. USA (1987) 84:7413-7416, which is herein incorporated by reference). Other commercially available liposomes include transfectace (DDAB/DOPE) and DOTAP/DOPE (Boehringer).

[0497] Other cationic liposomes can be prepared from readily available materials using techniques well known in the art. See, e.g. PCT Publication No. WO 90/11092 (which is herein incorporated by reference) for a description of the synthesis of DOTAP (1,2-bis(oleoyloxy)-3-(trimethylammonio)propane) liposomes. Preparation of DOTMA liposomes is explained in the literature, see, e.g., P. Felgner et al., Proc. Natl. Acad. Sci. USA 84:7413-7417, which is herein incorporated by reference. Similar methods can be used to prepare liposomes from other cationic lipid materials.

[0498] Similarly, anionic and neutral liposomes are readily available, such as from Avanti Polar Lipids (Birmingham, Ala.), or can be easily prepared using readily available materials. Such materials include phosphatidyl, choline, cholesterol, phosphatidyl ethanolamine, dioleoylphosphatidyl choline (DOPC), dioleoylphosphatidyl glycerol (DOPG), dioleoylphoshatidyl ethanolamine (DOPE), among others. These materials can also be mixed with the DOTMA and DOTAP starting materials in appropriate ratios. Methods for making liposomes using these materials are well known in the art.

[0499] For example, commercially dioleoylphosphatidyl choline (DOPC), dioleoylphosphatidyl glycerol (DOPG), and dioleoylphosphatidyl ethanolamine (DOPE) can be used in various combinations to make conventional liposomes, with or without the addition of cholesterol. Thus, for example, DOPG/DOPC vesicles can be prepared by drying 50 mg each of DOPG and DOPC under a stream of nitrogen gas into a sonication vial. The sample is placed under a vacuum pump overnight and is hydrated the following day with deionized water. The sample is then sonicated for 2 hours in a capped vial, using a Heat Systems model 350 sonicator equipped with an inverted cup (bath type) probe at the maximum setting while the bath is circulated at 15EC. Alternatively, negatively charged vesicles can be prepared without sonication to produce multilamellar vesicles or by extrusion through nucleopore membranes to produce unilamellar vesicles of discrete size. Other methods are known and available to those of skill in the art.

[0500] The liposomes can comprise multilamellar vesicles (MLVs), small unilamellar vesicles (SUVs), or large unilamellar vesicles (LUVs), with SUVs being preferred. The various liposome-nucleic acid complexes are prepared using methods well known in the art. See, e.g., Straubinger et al., Methods of Immunology (1983), 101:512-527, which is herein incorporated by reference. For example, MLVs containing nucleic acid can be prepared by depositing a thin film of phospholipid on the walls of a glass tube and subsequently hydrating with a solution of the material to be encapsulated. SUVs are prepared by extended sonication of MLVs to produce a homogeneous population of unilamellar liposomes. The material to be entrapped is added to a suspension of preformed MLVs and then sonicated. When using liposomes containing cationic lipids, the dried lipid film is resuspended in an appropriate solution such as sterile water or an isotonic buffer solution such as 10 mM Tris/NaCl, sonicated, and then the preformed liposomes are mixed directly with the DNA. The liposome and DNA form a very stable complex due to binding of the positively charged liposomes to the cationic DNA. SUVs find use with small nucleic acid fragments. LUVs are prepared by a number of methods, well known in the art. Commonly used methods include Ca²⁺-EDTA chelation (Papahadjopoulos et al., Biochim. Biophys. Acta (1975) 394:483; Wilson et al., Cell 17:77 (1979)); ether injection (Deamer, D. and Bangham, A., Biochim. Biophys. Acta 443:629 (1976); Ostro et al., Biochem. Biophys. Res. Commun. 76:836 (1977); Fraley et al., Proc. Natl. Acad. Sci. USA 76:3348 (1979)); detergent dialysis (Enoch, H. and Strittmatter, P., Proc. Natl. Acad. Sci. USA 76:145 (1979)); and reverse-phase evaporation (REV) (Fraley et al., J. Biol. Chem. 255:10431 (1980); Szoka, F. and Papahadjopoulos, D., Proc. Natl. Acad. Sci. USA 75:145 (1978); Schaefer-Ridder et al., Science 215:166 (1982)), which are herein incorporated by reference.

[0501] Generally, the ratio of DNA to liposomes will be from about 10:1 to about 1:10. Preferably, the ration will be from about 5:1 to about 1:5. More preferably, the ration will be about 3:1 to about 1:3. Still more preferably, the ratio will be about 1:1.

[0502] U.S. Pat. No. 5,676,954 (which is herein incorporated by reference) reports on the injection of genetic material, complexed with cationic liposomes carriers, into mice. U.S. Pat. Nos. 4,897,355, 4,946,787, 5,049,386, 5,459,127, 5,589,466, 5,693,622, 5,580,859, 5,703,055, and international publication no. WO 94/9469 (which are herein incorporated by reference) provide cationic lipids for use in transfecting DNA into cells and mammals. U.S. Pat. Nos. 5,589,466, 5,693,622, 5,580,859, 5,703,055, and international publication no. WO 94/9469 provide methods for delivering DNA-cationic lipid complexes to mammals.

[0503] In certain embodiments, cells are engineered, ex vivo or in vivo, using a retroviral particle containing RNA which comprises a sequence encoding a polypeptide of the present invention. Retroviruses from which the retroviral plasmid vectors may be derived include, but are not limited to, Moloney Murine Leukemia Virus, spleen necrosis virus, Rous sarcoma Virus, Harvey Sarcoma Virus, avian leukosis virus, gibbon ape leukemia virus, human immunodeficiency virus, Myeloproliferative Sarcoma Virus, and mammary tumor virus.

[0504] The retroviral plasmid vector is employed to transduce packaging cell lines to form producer cell lines. Examples of packaging cells which may be transfected include, but are not limited to, the PE501, PA317, R-2, R-AM, PA12, T19-14X, VT-19-17-H2, RCRE, RCRIP, GP+E-86, GP+envAm12, and DAN cell lines as described in Miller, Human Gene Therapy 1:5-14 (1990), which is incorporated herein by reference in its entirety. The vector may transduce the packaging cells through any means known in the art. Such means include, but are not limited to, electroporation, the use of liposomes, and CaPO₄ precipitation. In one alternative, the retroviral plasmid vector may be encapsulated into a liposome, or coupled to a lipid, and then administered to a host.

[0505] The producer cell line generates infectious retroviral vector particles which include polynucleotide encoding a polypeptide of the present invention. Such retroviral vector particles then may be employed, to transduce eukaryotic cells, either in vitro or in vivo. The transduced eukaryotic cells will express a polypeptide of the present invention.

[0506] In certain other embodiments, cells are engineered, ex vivo or in vivo, with polynucleotide contained in an adenovirus vector. Adenovirus can be manipulated such that it encodes and expresses a polypeptide of the present invention, and at the same time is inactivated in terms of its ability to replicate in a normal lytic viral life cycle. Adenovirus expression is achieved without integration of the viral DNA into the host cell chromosome, thereby alleviating concerns about insertional mutagenesis. Furthermore, adenoviruses have been used as live enteric vaccines for many years with an excellent safety profile (Schwartz et al. Am. Rev. Respir. Dis.109:233-238 (1974)). Finally, adenovirus mediated gene transfer has been demonstrated in a number of instances including transfer of alpha-1-antitrypsin and CFTR to the lungs of cotton rats (Rosenfeld, M. A. et al. (1991) Science 252:431-434; Rosenfeld et al., (1992) Cell 68:143-155). Furthermore, extensive studies to attempt to establish adenovirus as a causative agent in human cancer were uniformly negative (Green, M. et al. (1979) Proc. Natl. Acad. Sci. USA 76:6606).

[0507] Suitable adenoviral vectors useful in the present invention are described, for example, in Kozarsky and Wilson, Curr. Opin. Genet. Devel. 3:499-503 (1993); Rosenfeld et al., Cell 68:143-155 (1992); Engelhardt et al., Human Genet. Ther. 4:759-769 (1993); Yang et al., Nature Genet. 7:362-369 (1994); Wilson et al., Nature 365:691-692 (1993); and U.S. Pat. No. 5,652,224, which are herein incorporated by reference. For example, the adenovirus vector Ad2 is useful and can be grown in human 293 cells. These cells contain the E1 region of adenovirus and constitutively express E1a and E1b, which complement the defective adenoviruses by providing the products of the genes deleted from the vector. In addition to Ad2, other varieties of adenovirus (e.g., Ad3, Ad5, and Ad7) are also useful in the present invention.

[0508] Preferably, the adenoviruses used in the present invention are replication deficient. Replication deficient adenoviruses require the aid of a helper virus and/or packaging cell line to form infectious particles. The resulting virus is capable of infecting cells and can express a polynucleotide of interest that is operably linked to a promoter, but cannot replicate in most cells. Replication deficient adenoviruses may be deleted in one or more of all or a portion of the following genes: E1a, E1b, E3, E4, E2a, or L1 through L5.

[0509] In certain other embodiments, the cells are engineered, ex vivo or in vivo, using an adeno-associated virus (AAV). AAVs are naturally occurring defective viruses that require helper viruses to produce infectious particles (Muzyczka, N., Curr. Topics in Microbiol. Immunol. 158:97 (1992)). It is also one of the few viruses that may integrate its DNA into non-dividing cells. Vectors containing as little as 300 base pairs of AAV can be packaged and can integrate, but space for exogenous DNA is limited to about 4.5 kb. Methods for producing and using such AAVs are known in the art. See, for example, U.S. Pat. Nos. 5,139,941, 5,173,414, 5,354,678, 5,436,146, 5,474,935, 5,478,745, and 5,589,377.

[0510] For example, an appropriate AAV vector for use in the present invention will include all the sequences necessary for DNA replication, encapsidation, and host-cell integration. The polynucleotide construct is inserted into the AAV vector using standard cloning methods, such as those found in Sambrook et al., Molecular Cloning: A Laboratory Manual, Cold Spring Harbor Press (1989). The recombinant AAV vector is then transfected into packaging cells which are infected with a helper virus, using any standard technique, including lipofection, electroporation, calcium phosphate precipitation, etc. Appropriate helper viruses include adenoviruses, cytomegaloviruses, vaccinia viruses, or herpes viruses. Once the packaging cells are transfected and infected, they will produce infectious AAV viral particles which contain the polynucleotide construct. These viral particles are then used to transduce eukaryotic cells, either ex vivo or in vivo. The transduced cells will contain the polynucleotide construct integrated into its genome, and will express a polypeptide of the invention.

[0511] Another method of gene therapy involves operably associating heterologous control regions and endogenous polynucleotide sequences (e.g. encoding a polypeptide of the present invention) via homologous recombination (see, e.g., U.S. Pat. No. 5,641,670, issued Jun. 24, 1997; International Publication No. WO 96/29411, published Sep. 26, 1996; International Publication No. WO 94/12650, published Aug. 4, 1994; Koller et al., Proc. Natl. Acad. Sci. USA 86:8932-8935 (1989); and Zijlstra et al., Nature 342:435-438 (1989), which are herein encorporated by reference. This method involves the activation of a gene which is present in the target cells, but which is not normally expressed in the cells, or is expressed at a lower level than desired.

[0512] Polynucleotide constructs are made, using standard techniques known in the art, which contain the promoter with targeting sequences flanking the promoter. Suitable promoters are described herein. The targeting sequence is sufficiently complementary to an endogenous sequence to permit homologous recombination of the promoter-targeting sequence with the endogenous sequence. The targeting sequence will be sufficiently near the 5′ end of the desired endogenous polynucleotide sequence so the promoter will be operably linked to the endogenous sequence upon homologous recombination.

[0513] The promoter and the targeting sequences can be amplified using PCR. Preferably, the amplified promoter contains distinct restriction enzyme sites on the 5′ and 3′ ends. Preferably, the 3′ end of the first targeting sequence contains the same restriction enzyme site as the 5′ end of the amplified promoter and the 5′ end of the second targeting sequence contains the same restriction site as the 3′ end of the amplified promoter. The amplified promoter and targeting sequences are digested and ligated together.

[0514] The promoter-targeting sequence construct is delivered to the cells, either as naked polynucleotide, or in conjunction with transfection-facilitating agents, such as liposomes, viral sequences, viral particles, whole viruses, lipofection, precipitating agents, etc., described in more detail above. The P promoter-targeting sequence can be delivered by any method, included direct needle injection, intravenous injection, topical administration, catheter infusion, particle accelerators, etc. The methods are described in more detail below.

[0515] The promoter-targeting sequence construct is taken up by cells. Homologous recombination between the construct and the endogenous sequence takes place, such that an endogenous sequence is placed under the control of the promoter. The promoter then drives the expression of the endogenous sequence.

[0516] The polynucleotide encoding a polypeptide of the present invention may contain a secretory signal sequence that facilitates secretion of the protein. Typically, the signal sequence is positioned in the coding region of the polynucleotide to be expressed towards or at the 5′ end of the coding region. The signal sequence may be homologous or heterologous to the polynucleotide of interest and may be homologous or heterologous to the cells to be transfected. Additionally, the signal sequence may be chemically synthesized using methods known in the art.

[0517] Any mode of administration of any of the above-described polynucleotides constructs can be used so long as the mode results in the expression of one or more molecules in an amount sufficient to provide a therapeutic effect. This includes direct needle injection, systemic injection, catheter infusion, biolistic injectors, particle accelerators (i.e., “gene guns”), gelfoam sponge depots, other commercially available depot materials, osmotic pumps (e.g., Alza minipumps), oral or suppositorial solid (tablet or pill) pharmaceutical, and decanting or topical applications during surgery. For example, direct injection of naked calcium phosphate-precipitated plasmid into rat liver and rat spleen or a protein-coated plasmid into the portal vein has resulted in gene expression of the foreign gene in the rat livers (Kaneda et al., Science 243:375 (1989)).

[0518] A preferred method of local administration is by direct injection. Preferably, a recombinant molecule of the present invention complexed with a delivery vehicle is administered by direct injection into or locally within the area of arteries. Administration of a composition locally within the area of arteries refers to injecting the composition centimeters and preferably, millimeters within arteries.

[0519] Another method of local administration is to contact a polynucleotide construct of the present invention in or around a surgical wound. For example, a patient can undergo surgery and the polynucleotide construct can be coated on the surface of tissue inside the wound or the construct can be injected into areas of tissue inside the wound.

[0520] Therapeutic compositions useful in systemic administration include recombinant molecules of the present invention complexed to a targeted delivery vehicle of the present invention. Suitable delivery vehicles for use with systemic administration comprise liposomes comprising ligands for targeting the vehicle to a particular site. In specific embodiments, suitable delivery vehicles for use with systemic administration comprise liposomes comprising polypeptides of the invention for targeting the vehicle to a particular site.

[0521] Preferred methods of systemic administration, include intravenous injection, aerosol, oral and percutaneous (topical) delivery. Intravenous injections can be performed using methods standard in the art. Aerosol delivery can also be performed using methods standard in the art (see, for example, Stribling et al., Proc. Natl. Acad. Sci. USA 189:11277-11281, 1992, which is incorporated herein by reference). Oral delivery can be performed by complexing a polynucleotide construct of the present invention to a carrier capable of withstanding degradation by digestive enzymes in the gut of an animal. Examples of such carriers, include plastic capsules or tablets, such as those known in the art. Topical delivery can be performed by mixing a polynucleotide construct of the present invention with a lipophilic reagent (e.g., DMSO) that is capable of passing into the skin.

[0522] Determining an effective amount of substance to be delivered can depend upon a number of factors including, for example, the chemical structure and biological activity of the substance, the age and weight of the animal, the precise condition requiring treatment and its severity, and the route of administration. The frequency of treatments depends upon a number of factors, such as the amount of polynucleotide constructs administered per dose, as well as the health and history of the subject. The precise amount, number of doses, and timing of doses will be determined by the attending physician or veterinarian.

[0523] Therapeutic compositions of the present invention can be administered to any animal, preferably to mammals and birds. Preferred mammals include humans, dogs, cats, mice, rats, rabbits sheep, cattle, horses and pigs, with humans being particularly preferred.

Biological Activities

[0524] Polynucleotides or polypeptides, or agonists or antagonists of the present invention, can be used in assays to test for one or more biological activities. If these polynucleotides or polypeptides, or agonists or antagonists of the present invention, do exhibit activity in a particular assay, it is likely that these molecules may be involved in the diseases associated with the biological activity. Thus, the polynucleotides and polypeptides, and agonists or antagonists could be used to treat the associated disease.

[0525] Members of the secreted family of proteins are believed to be involved in biological activities associated with, for example, cellular signaling. Accordingly, compositions of the invention (including polynucleotides, polypeptides and antibodies of the invention, and fragments and variants thereof) may be used in diagnosis, prognosis, prevention and/or treatment of diseases and/or disorders associated with aberrant activity of secreted polypeptides.

[0526] In preferred embodiments, compositions of the invention (including polynucleotides, polypeptides and antibodies of the invention, and fragments and variants thereof) may be used in the diagnosis, prognosis, prevention, treatment, and/or amelioration of diseases and/or disorders relating to the gastrointestinal system (e.g., Crohn's disease, pancreatitis, gallstones, antibiotic-associated colitis, duodenitis, gastrointestinal neoplasms, and as described in the “Gastrointestinal Disorders” section below).

[0527] In certain embodiments, a polypeptide of the invention, or polynucleotides, antibodies, agonists, or antagonists corresponding to that polypeptide, may be used to diagnose and/or prognosticate diseases and/or disorders associated with the tissue(s) in which the polypeptide of the invention is expressed including one, two, three, four, five, or more tissues disclosed in Table 1B.2, column 5 (Tissue Distribution Library Code).

[0528] Thus, polynucleotides, translation products and antibodies of the invention are useful in the diagnosis, detection, prevention, prognistication, and/or treatment of diseases and/or disorders associated with activities that include, but are not limited to, prohormone activation, neurotransmitter activity, cellular signaling, cellular proliferation, cellular differentiation, and cell migration.

[0529] More generally, polynucleotides, translation products and antibodies corresponding to this gene may be useful for the diagnosis, prognosis, prevention, treatment and/or amelioration of diseases and/or disorders associated with the following system or systems.

Immune Activity

[0530] Polynucleotides, polypeptides, antibodies, and/or agonists or antagonists of the present invention may be useful in preventing, diagnosing, prognosticating, treating, and/or ameliorating diseases, disorders, and/or conditions of the immune system, by, for example, activating or inhibiting the proliferation, differentiation, or mobilization (chemotaxis) of immune cells. Immune cells develop through a process called hematopoiesis, producing myeloid (platelets, red blood cells, neutrophils, and macrophages) and lymphoid (B and T lymphocytes) cells from pluripotent stem cells. The etiology of these immune diseases, disorders, and/or conditions may be genetic, somatic, such as cancer and some autoimmune diseases, acquired (e.g., by chemotherapy or toxins), or infectious. Moreover, polynucleotides, polypeptides, antibodies, and/or agonists or antagonists of the present invention can be used as a marker or detector of a particular immune system disease or disorder.

[0531] In another embodiment, a polypeptide of the invention, or polynucleotides, antibodies, agonists, or antagonists corresponding to that polypeptide, may be used to treat diseases and disorders of the immune system and/or to inhibit or enhance an immune response generated by cells associated with the tissue(s) in which the polypeptide of the invention is expressed, including one, two, three, four, five, or more tissues disclosed in Table 1B.2, column 5 (Tissue Distribution Library Code).

[0532] Polynucleotides, polypeptides, antibodies, and/or agonists or antagonists of the present invention may be useful in preventing, diagnosing, prognosticating, treating and/or ameliorating immunodeficiencies, including both congenital and acquired immunodeficiencies. Examples of B cell immunodeficiencies in which immunoglobulin levels B cell function and/or B cell numbers are decreased include: X-linked agammaglobulinemia (Bruton's disease), X-linked infantile agammaglobulinemia, X-linked immunodeficiency with hyper IgM, non X-linked immunodeficiency with hyper IgM, X-linked lymphoproliferative syndrome (XLP), agammaglobulinemia including congenital and acquired agammaglobulinemia, adult onset agammaglobulinemia, late-onset agammaglobulinemia, dysgammaglobulinemia, hypogammaglobulinemia, unspecified hypogammaglobulinemia, recessive agammaglobulinemia (Swiss type), Selective IgM deficiency, selective IgA deficiency, selective IgG subclass deficiencies, IgG subclass deficiency (with or without IgA deficiency), Ig deficiency with increased IgM, IgG and IgA deficiency with increased IgM, antibody deficiency with normal or elevated Igs, Ig heavy chain deletions, kappa chain deficiency, B cell lymphoproliferative disorder (BLPD), common variable immunodeficiency (CVID), common variable immunodeficiency (CVI) (acquired), and transient hypogammaglobulinemia of infancy.

[0533] In specific embodiments, ataxia-telangiectasia or conditions associated with ataxia-telangiectasia are detected, prevented, diagnosed, prognosticated, treated, and/or ameliorated using the polypeptides or polynucleotides of the invention, and/or agonists or antagonists thereof.

[0534] Examples of congenital immunodeficiencies in which T cell and/or B cell function and/or number is decreased include, but are not limited to: DiGeorge anomaly, severe combined immunodeficiencies (SCID) (including, but not limited to, X-linked SCID, autosomal recessive SCID, adenosine deaminase deficiency, purine nucleoside phosphorylase (PNP) deficiency, Class II MHC deficiency (Bare lymphocyte syndrome), Wiskott-Aldrich syndrome, and ataxia telangiectasia), thymic hypoplasia, third and fourth pharyngeal pouch syndrome, 22q11.2 deletion, chronic mucocutaneous candidiasis, natural killer cell deficiency (NK), idiopathic CD4+ T-lymphocytopenia, immunodeficiency with predominant T cell defect (unspecified), and unspecified immunodeficiency of cell mediated immunity.

[0535] In specific embodiments, DiGeorge anomaly or conditions associated with DiGeorge anomaly are prevented, detected, diagnosed, prognosticated, treated and/or ameliorated using polypeptides or polynucleotides of the invention, or antagonists or agonists thereof.

[0536] Other immunodeficiencies that may be prevented, detected, diagnosed, prognosticated, treated and/or ameliorated using polypeptides or polynucleotides of the invention, and/or agonists or antagonists thereof, include, but are not limited to, chronic granulomatous disease, Chédiak-Higashi syndrome, myeloperoxidase deficiency, leukocyte glucose-6-phosphate dehydrogenase deficiency, X-linked lymphoproliferative syndrome (XLP), leukocyte adhesion deficiency, complement component deficiencies (including C1, C2, C3, C4, C5, C6, C7, C8 and/or C9 deficiencies), reticular dysgenesis, thymic alymphoplasia-aplasia, immunodeficiency with thymoma, severe congenital leukopenia, dysplasia with immunodeficiency, neonatal neutropenia, short limbed dwarfism, and Nezel of syndrome-combined immunodeficiency with Igs.

[0537] In a preferred embodiment, the immunodeficiencies and/or conditions associated with the immunodeficiencies recited above are prevented, detected, diagnosed, prognosticated, treated and/or ameliorated using polynucleotides, polypeptides, antibodies, and/or agonists or antagonists of the present invention.

[0538] In a preferred embodiment polynucleotides, polypeptides, antibodies, and/or agonists or antagonists of the present invention could be used as an agent to boost immunoresponsiveness among immunodeficient individuals. In specific embodiments, polynucleotides, polypeptides, antibodies, and/or agonists or antagonists of the present invention could be used as an agent to boost immunoresponsiveness among B cell and/or T cell immunodeficient individuals.

[0539] The polynucleotides, polypeptides, antibodies, and/or agonists or antagonists of the present invention may be useful in preventing, detecting, diagnosing, prognosticating, treating and/or ameliorating autoimmune disorders. Many autoimmune disorders result from inappropriate recognition of self as foreign material by immune cells. This inappropriate recognition results in an immune response leading to the destruction of the host tissue. Therefore, the administration of polynucleotides and polypeptides of the invention that can inhibit an immune response, particularly the proliferation, differentiation, or chemotaxis of T-cells, may be an effective therapy in preventing autoimmune disorders.

[0540] Autoimmune diseases or disorders that may be prevented, detected, diagnosed, prognosticated, treated, and/or ameliorated by polynucleotides, polypeptides, antibodies, and/or agonists or antagonists of the present invention include, but are not limited to, one or more of the following: systemic lupus erythematosus, rheumatoid arthritis, ankylosing spondylitis, multiple sclerosis, autoimmune thyroiditis, Hashimoto's thyroiditis, autoimmune hemolytic anemia, hemolytic anemia, thrombocytopenia, autoimmune thrombocytopenia purpura, autoimmune neonatal thrombocytopenia, idiopathic thrombocytopenia purpura, purpura (e.g., Henloch-Scoenlein purpura), autoimmunocytopenia, Goodpasture's syndrome, Pemphigus vulgaris, myasthenia gravis, Grave's disease (hyperthyroidism), and insulin-resistant diabetes mellitus.

[0541] Additional disorders that are likely to have an autoimmune component that may be prevented, detected, diagnosed, prognosticated, treated and/or ameliorated with the compositions of the invention include, but are not limited to, type II collagen-induced arthritis, antiphospholipid syndrome, dermatitis, allergic encephalomyelitis, myocarditis, relapsing polychondritis, rheumatic heart disease, neuritis, uveitis ophthalmia, polyendocrinopathies, Reiter's Disease, Stiff-Man Syndrome, autoimmune pulmonary inflammation, autism, Guillain-Barre Syndrome, insulin dependent diabetes mellitus, and autoimmune inflammatory eye disorders.

[0542] Additional disorders that are likely to have an autoimmune component that may be prevented, detected, diagnosed, prognosticated, treated and/or ameliorated with the compositions of the invention include, but are not limited to, scleroderma with anti-collagen antibodies (often characterized, e.g., by nucleolar and other nuclear antibodies), mixed connective tissue disease (often characterized, e.g., by antibodies to extractable nuclear antigens (e.g., ribonucleoprotein)), polymyositis (often characterized, e.g., by nonhistone ANA), pernicious anemia (often characterized, e.g., by antiparietal cell, microsomes, and intrinsic factor antibodies), idiopathic Addison's disease (often characterized, e.g., by humoral and cell-mediated adrenal cytotoxicity, infertility (often characterized, e.g., by antispermatozoal antibodies), glomerulonephritis (often characterized, e.g., by glomerular basement membrane antibodies or immune complexes), bullous pemphigoid (often characterized, e.g., by IgG and complement in basement membrane), Sjogren's syndrome (often characterized, e.g., by multiple tissue antibodies, and/or a specific nonhistone ANA (SS-B)), diabetes mellitus (often characterized, e.g., by cell-mediated and humoral islet cell antibodies), and adrenergic drug resistance (including adrenergic drug resistance with asthma or cystic fibrosis) (often characterized, e.g., by beta-adrenergic receptor antibodies).

[0543] Additional disorders that may have an autoimmune component that may be prevented, detected, diagnosed, prognosticated, treated and/or ameliorated with the compositions of the invention include, but are not limited to, chronic active hepatitis (often characterized, e.g., by smooth muscle antibodies), primary biliary cirrhosis (often characterized, e.g., by mitochondria antibodies), other endocrine gland failure (often characterized, e.g., by specific tissue antibodies in some cases), vitiligo (often characterized, e.g., by melanocyte antibodies), vasculitis (often characterized, e.g., by Ig and complement in vessel walls and/or low serum complement), post-MI (often characterized, e.g., by myocardial antibodies), cardiotomy syndrome (often characterized, e.g., by myocardial antibodies), urticaria (often characterized, e.g., by IgG and IgM antibodies to IgE), atopic dermatitis (often characterized, e.g., by IgG and IgM antibodies to IgE), asthma (often characterized, e.g., by IgG and IgM antibodies to IgE), and many other inflammatory, granulomatous, degenerative, and atrophic disorders.

[0544] In a preferred embodiment, the autoimmune diseases and disorders and/or conditions associated with the diseases and disorders recited above are prevented, detected, diagnosed, prognosticated, treated and/or ameliorated using for example, antagonists or agonists, polypeptides or polynucleotides, or antibodies of the present invention. In a specific preferred embodiment, rheumatoid arthritis is prevented, detected, diagnosed, prognosticated, treated and/or ameliorated using polynucleotides, polypeptides, antibodies, and/or agonists or antagonists of the present invention.

[0545] In another specific preferred embodiment, systemic lupus erythematosus is prevented, detected, diagnosed, prognosticated, treated and/or ameliorated using polynucleotides, polypeptides, antibodies, and/or agonists or antagonists of the present invention. In another specific preferred embodiment, idiopathic thrombocytopenia purpura is prevented, detected, diagnosed, prognosticated, treated and/or ameliorated using polynucleotides, polypeptides, antibodies, and/or agonists or antagonists of the present invention.

[0546] In another specific preferred embodiment IgA nephropathy is prevented, detected, diagnosed, prognosticated, treated and/or ameliorated using polynucleotides, polypeptides, antibodies, and/or agonists or antagonists of the present invention.

[0547] In a preferred embodiment, the autoimmune diseases and disorders and/or conditions associated with the diseases and disorders recited above are prevented, detected, diagnosed, prognosticated, treated and/or ameliorated using polynucleotides, polypeptides, antibodies, and/or agonists or antagonists of the present invention

[0548] In preferred embodiments, polypeptides, antibodies, polynucleotides and/or agonists or antagonists of the present invention are used as a immunosuppressive agent(s).

[0549] Polynucleotides, polypeptides, antibodies, and/or agonists or antagonists of the present invention may be useful in detecting, preventing, diagnosing, prognosticating, treating, and/or ameliorating diseases, disorders, and/or conditions of hematopoietic cells. Polynucleotides, polypeptides, antibodies, and/or agonists or antagonists of the present invention could be used to increase differentiation and proliferation of hematopoietic cells, including the pluripotent stem cells, in an effort to treat or prevent those diseases, disorders, and/or conditions associated with a decrease in certain (or many) types hematopoietic cells, including but not limited to, leukopenia, neutropenia, anemia, and thrombocytopenia. Alternatively, Polynucleotides, polypeptides, antibodies, and/or agonists or antagonists of the present invention could be used to increase differentiation and proliferation of hematopoietic cells, including the pluripotent stem cells, in an effort to treat or prevent those diseases, disorders, and/or conditions associated with an increase in certain (or many) types of hematopoietic cells, including but not limited to, histiocytosis.

[0550] Allergic reactions and conditions, such as asthma (particularly allergic asthma) or other respiratory problems, may also be detected, prevented, diagnosed, prognosticated, treated, and/or ameliorated using polypeptides, antibodies, or polynucleotides of the invention, and/or agonists or antagonists thereof. Moreover, these molecules can be used to treat, prevent, prognose, and/or diagnose anaphylaxis, hypersensitivity to an antigenic molecule, or blood group incompatibility.

[0551] Additionally, polypeptides or polynucleotides of the invention, and/or agonists or antagonists thereof, may be used to detect, prevent, diagnose, prognosticate, treat, and/or ameliorate IgE-mediated allergic reactions. Such allergic reactions include, but are not limited to, asthma, rhinitis, and eczema. In specific embodiments, polynucleotides, polypeptides, antibodies, and/or agonists or antagonists of the present invention may be used to modulate IgE concentrations in vitro or in vivo.

[0552] Moreover, polynucleotides, polypeptides, antibodies, and/or agonists or antagonists of the present invention have uses in the detection, prevention, diagnosis, prognostication, treatment, and/or amelioration of inflammatory conditions. For example, since polypeptides, antibodies, or polynucleotides of the invention, and/or agonists or antagonists of the invention may inhibit the activation, proliferation and/or differentiation of cells involved in an inflammatory response, these molecules can be used to prevent and/or treat chronic and acute inflammatory conditions. Such inflammatory conditions include, but are not limited to, for example, inflammation associated with infection (e.g., septic shock, sepsis, or systemic inflammatory response syndrome), ischemia-reperfusion injury, endotoxin lethality, complement-mediated hyperacute rejection, nephritis, cytokine or chemokine induced lung injury, inflammatory bowel disease, Crohn's disease, over production of cytokines (e.g., TNF or IL-1.), respiratory disorders (e.g., asthma and allergy); gastrointestinal disorders (e.g., inflammatory bowel disease); cancers (e.g., gastric, ovarian, lung, bladder, liver, and breast); CNS disorders (e.g., multiple sclerosis; ischemic brain injury and/or stroke, traumatic brain injury, neurodegenerative disorders (e.g., Parkinson's disease and Alzheimer's disease); AIDS-related dementia; and prion disease); cardiovascular disorders (e.g., atherosclerosis, myocarditis, cardiovascular disease, and cardiopulmonary bypass complications); as well as many additional diseases, conditions, and disorders that are characterized by inflammation (e.g., hepatitis, rheumatoid arthritis, gout, trauma, pancreatitis, sarcoidosis, dermatitis, renal ischemia-reperfusion injury, Grave's disease, systemic lupus erythematosus, diabetes mellitus, and allogenic transplant rejection).

[0553] Because inflammation is a fundamental defense mechanism, inflammatory disorders can effect virtually any tissue of the body. Accordingly, polynucleotides, polypeptides, and antibodies of the invention, as well as agonists or antagonists thereof, have uses in the treatment of tissue-specific inflammatory disorders, including, but not limited to, adrenalitis, alveolitis, angiocholecystitis, appendicitis, balanitis, blepharitis, bronchitis, bursitis, carditis, cellulitis, cervicitis, cholecystitis, chorditis, cochlitis, colitis, conjunctivitis, cystitis, dermatitis, diverticulitis, encephalitis, endocarditis, esophagitis, eustachitis, fibrositis, folliculitis, gastritis, gastroenteritis, gingivitis, glossitis, hepatosplenitis, keratitis, labyrinthitis, laryngitis, lymphangitis, mastitis, media otitis, meningitis, metritis, mucitis, myocarditis, myosititis, myringitis, nephritis, neuritis, orchitis, osteochondritis, otitis, pericarditis, peritendonitis, peritonitis, pharyngitis, phlebitis, poliomyelitis, prostatitis, pulpitis, retinitis, rhinitis, salpingitis, scleritis, sclerochoroiditis, scrotitis, sinusitis, spondylitis, steatitis, stomatitis, synovitis, syringitis, tendonitis, tonsillitis, urethritis, and vaginitis.

[0554] In specific embodiments, polypeptides, antibodies, or polynucleotides of the invention, and/or agonists or antagonists thereof, are useful to detect, prevent, diagnose, prognosticate, treat, and/or ameliorate organ transplant rejections and graft-versus-host disease. Organ rejection occurs by host immune cell destruction of the transplanted tissue through an immune response. Similarly, an immune response is also involved in GVHD, but, in this case, the foreign transplanted immune cells destroy the host tissues. Polypeptides, antibodies, or polynucleotides of the invention, and/or agonists or antagonists thereof, that inhibit an immune response, particularly the activation, proliferation, differentiation, or chemotaxis of T-cells, may be an effective therapy in preventing organ rejection or GVHD. In specific embodiments, polypeptides, antibodies, or polynucleotides of the invention, and/or agonists or antagonists thereof, that inhibit an immune response, particularly the activation, proliferation, differentiation, or chemotaxis of T-cells, may be an effective therapy in preventing experimental allergic and hyperacute xenograft rejection.

[0555] In other embodiments, polypeptides, antibodies, or polynucleotides of the invention, and/or agonists or antagonists thereof, are useful to detect, prevent, diagnose, prognosticate, treat, and/or ameliorate immune complex diseases, including, but not limited to, serum sickness, post streptococcal glomerulonephritis, polyarteritis nodosa, and immune complex-induced vasculitis.

[0556] Polypeptides, antibodies, polynucleotides and/or agonists or antagonists of the invention can be used to treat, detect, and/or prevent infectious agents. For example, by increasing the immune response, particularly increasing the proliferation activation and/or differentiation of B and/or T cells, infectious diseases may be treated, detected, and/or prevented. The immune response may be increased by either enhancing an existing immune response, or by initiating a new immune response. Alternatively, polynucleotides, polypeptides, antibodies, and/or agonists or antagonists of the present invention may also directly inhibit the infectious agent (refer to section of application listing infectious agents, etc), without necessarily eliciting an immune response.

[0557] In another embodiment, polypeptides, antibodies, polynucleotides and/or agonists or antagonists of the present invention are used as a vaccine adjuvant that enhances immune responsiveness to an antigen. In a specific embodiment, polypeptides, antibodies, polynucleotides and/or agonists or antagonists of the present invention are used as an adjuvant to enhance tumor-specific immune responses.

[0558] In another specific embodiment, polypeptides, antibodies, polynucleotides and/or agonists or antagonists of the present invention are used as an adjuvant to enhance anti-viral immune responses. Anti-viral immune responses that may be enhanced using the compositions of the invention as an adjuvant, include virus and virus associated diseases or symptoms described herein or otherwise known in the art. In specific embodiments, the compositions of the invention are used as an adjuvant to enhance an immune response to a virus, disease, or symptom selected from the group consisting of: AIDS, meningitis, Dengue, EBV, and hepatitis (e.g., hepatitis B). In another specific embodiment, the compositions of the invention are used as an adjuvant to enhance an immune response to a virus, disease, or symptom selected from the group consisting of: HIV/AIDS, respiratory syncytial virus, Dengue, rotavirus, Japanese B encephalitis, influenza A and B, parainfluenza, measles, cytomegalovirus, rabies, Junin, Chikungunya, Rift Valley Fever, herpes simplex, and yellow fever.

[0559] In another specific embodiment, polypeptides, antibodies, polynucleotides and/or agonists or antagonists of the present invention are used as an adjuvant to enhance anti-bacterial or anti-fungal immune responses. Anti-bacterial or anti-fungal immune responses that may be enhanced using the compositions of the invention as an adjuvant, include bacteria or fungus and bacteria or fungus associated diseases or symptoms described herein or otherwise known in the art.

[0560] In specific embodiments, the compositions of the invention are used as an adjuvant to enhance an immune response to a bacteria or fungus, disease, or symptom selected from the group consisting of: tetanus, Diphtheria, botulism, and meningitis type B.

[0561] In another specific embodiment, the compositions of the invention are used as an adjuvant to enhance an immune response to a bacteria or fungus, disease, or symptom selected from the group consisting of: Vibrio cholerae, Mycobacterium leprae, Salmonella typhi, Salmonella paratyphi, Meisseria meningitidis, Streptococcus pneumoniae, Group B streptococcus, Shigella spp., Enterotoxigenic Escherichia coli, Enterohemorrhagic E. coli, and Borrelia burgdorferi.

[0562] In another specific embodiment, polypeptides, antibodies, polynucleotides and/or agonists or antagonists of the present invention are used as an adjuvant to enhance anti-parasitic immune responses. Anti-parasitic immune responses that may be enhanced using the compositions of the invention as an adjuvant, include parasite and parasite associated diseases or symptoms described herein or otherwise known in the art. In specific embodiments, the compositions of the invention are used as an adjuvant to enhance an immune response to a parasite. In another specific embodiment, the compositions of the invention are used as an adjuvant to enhance an immune response to Plasmodium (malaria) or Leishmania.

[0563] In another specific embodiment, polypeptides, antibodies, polynucleotides and/or agonists or antagonists of the present invention may also be employed to treat infectious diseases including silicosis, sarcoidosis, and idiopathic pulmonary fibrosis; for example, by preventing the recruitment and activation of mononuclear phagocytes.

[0564] In another specific embodiment, polypeptides, antibodies, polynucleotides and/or agonists or antagonists of the present invention are used as an antigen for the generation of antibodies to inhibit or enhance immune mediated responses against polypeptides of the invention.

[0565] In one embodiment, polypeptides, antibodies, polynucleotides and/or agonists or antagonists of the present invention are administered to an animal (e.g., mouse, rat, rabbit, hamster, guinea pig, pigs, micro-pig, chicken, camel, goat, horse, cow, sheep, dog, cat, non-human primate, and human, most preferably human) to boost the immune system to produce increased quantities of one or more antibodies (e.g., IgG, IgA, IgM, and IgE), to induce higher affinity antibody production and immunoglobulin class switching (e.g., IgG, IgA, IgM, and IgE), and/or to increase an immune response.

[0566] In another specific embodiment, polypeptides, antibodies, polynucleotides and/or agonists or antagonists of the present invention are used as a stimulator of B cell responsiveness to pathogens.

[0567] In another specific embodiment, polypeptides, antibodies, polynucleotides and/or agonists or antagonists of the present invention are used as an activator of T cells.

[0568] In another specific embodiment, polypeptides, antibodies, polynucleotides and/or agonists or antagonists of the present invention are used as an agent that elevates the immune status of an individual prior to their receipt of immunosuppressive therapies.

[0569] In another specific embodiment, polypeptides, antibodies, polynucleotides and/or agonists or antagonists of the present invention are used as an agent to induce higher affinity antibodies.

[0570] In another specific embodiment, polypeptides, antibodies, polynucleotides and/or agonists or antagonists of the present invention are used as an agent to increase serum immunoglobulin concentrations.

[0571] In another specific embodiment, polypeptides, antibodies, polynucleotides and/or agonists or antagonists of the present invention are used as an agent to accelerate recovery of immunocompromised individuals.

[0572] In another specific embodiment, polypeptides, antibodies, polynucleotides and/or agonists or antagonists of the present invention are used as an agent to boost immunoresponsiveness among aged populations and/or neonates.

[0573] In another specific embodiment, polypeptides, antibodies, polynucleotides and/or agonists or antagonists of the present invention are used as an immune system enhancer prior to, during, or after bone marrow transplant and/or other transplants (e.g., allogeneic or xenogeneic organ transplantation). With respect to transplantation, compositions of the invention may be administered prior to, concomitant with, and/or after transplantation. In a specific embodiment, compositions of the invention are administered after transplantation, prior to the beginning of recovery of T-cell populations. In another specific embodiment, compositions of the invention are first administered after transplantation after the beginning of recovery of T cell populations, but prior to full recovery of B cell populations.

[0574] In another specific embodiment, polypeptides, antibodies, polynucleotides and/or agonists or antagonists of the present invention are used as an agent to boost immunoresponsiveness among individuals having an acquired loss of B cell function. Conditions resulting in an acquired loss of B cell function that may be ameliorated or treated by administering the polypeptides, antibodies, polynucleotides and/or agonists or antagonists thereof, include, but are not limited to, HIV Infection, AIDS, bone marrow transplant, and B cell chronic lymphocytic leukemia (CLL).

[0575] In another specific embodiment, polypeptides, antibodies, polynucleotides and/or agonists or antagonists of the present invention are used as an agent to boost immunoresponsiveness among individuals having a temporary immune deficiency. Conditions resulting in a temporary immune deficiency that may be ameliorated or treated by administering the polypeptides, antibodies, polynucleotides and/or agonists or antagonists thereof, include, but are not limited to, recovery from viral infections (e.g., influenza), conditions associated with malnutrition, recovery from infectious mononucleosis, or conditions associated with stress, recovery from measles, recovery from blood transfusion, and recovery from surgery.

[0576] In another specific embodiment, polypeptides, antibodies, polynucleotides and/or agonists or antagonists of the present invention are used as a regulator of antigen presentation by monocytes, dendritic cells, and/or B-cells. In one embodiment, polynucleotides, polypeptides, antibodies, and/or agonists or antagonists of the present invention enhance antigen presentation or antagonizes antigen presentation in vitro or in vivo. Moreover, in related embodiments, said enhancement or antagonism of antigen presentation may be useful as an anti-tumor treatment or to modulate the immune system.

[0577] In another specific embodiment, polypeptides, antibodies, polynucleotides and/or agonists or antagonists of the present invention are used as an agent to direct an individual's immune system towards development of a humoral response (i.e. TH2) as opposed to a TH1 cellular response.

[0578] In another specific embodiment, polypeptides, antibodies, polynucleotides and/or agonists or antagonists of the present invention are used as a means to induce tumor proliferation and thus make it more susceptible to anti-neoplastic agents. For example, multiple myeloma is a slowly dividing disease and is thus refractory to virtually all anti-neoplastic regimens. If these cells were forced to proliferate more rapidly their susceptibility profile would likely change.

[0579] In another specific embodiment, polypeptides, antibodies, polynucleotides and/or agonists or antagonists of the present invention are used as a stimulator of B cell production in pathologies such as AIDS, chronic lymphocyte disorder and/or Common Variable Immunodificiency.

[0580] In another specific embodiment, polypeptides, antibodies, polynucleotides and/or agonists or antagonists of the present invention are used as a therapy for generation and/or regeneration of lymphoid tissues following surgery, trauma or genetic defect. In another specific embodiment, polypeptides, antibodies, polynucleotides and/or agonists or antagonists of the present invention are used in the pretreatment of bone marrow samples prior to transplant.

[0581] In another specific embodiment, polypeptides, antibodies, polynucleotides and/or agonists or antagonists of the present invention are used as a gene-based therapy for genetically inherited disorders resulting in immuno-incompetence/immunodeficiency such as observed among SCID patients.

[0582] In another specific embodiment, polypeptides, antibodies, polynucleotides and/or agonists or antagonists of the present invention are used as a means of activating monocytes/macrophages to defend against parasitic diseases that effect monocytes such as Leishmania.

[0583] In another specific embodiment, polypeptides, antibodies, polynucleotides and/or agonists or antagonists of the present invention are used as a means of regulating secreted cytokines that are elicited by polypeptides of the invention.

[0584] In another embodiment, polypeptides, antibodies, polynucleotides and/or agonists or antagonists of the present invention are used in one or more of the applications decribed herein, as they may apply to veterinary medicine.

[0585] In another specific embodiment, polypeptides, antibodies, polynucleotides and/or agonists or antagonists of the present invention are used as a means of blocking various aspects of immune responses to foreign agents or self. Examples of diseases or conditions in which blocking of certain aspects of immune responses may be desired include autoimmune disorders such as lupus, and arthritis, as well as immunoresponsiveness to skin allergies, inflammation, bowel disease, injury and diseases/disorders associated with pathogens.

[0586] In another specific embodiment, polypeptides, antibodies, polynucleotides and/or agonists or antagonists of the present invention are used as a therapy for preventing the B cell proliferation and Ig secretion associated with autoimmune diseases such as idiopathic thrombocytopenic purpura, systemic lupus erythematosus and multiple sclerosis.

[0587] In another specific embodiment, polypeptides, antibodies, polynucleotides and/or agonists or antagonists of the present invention are used as a inhibitor of B and/or T cell migration in endothelial cells. This activity disrupts tissue architecture or cognate responses and is useful, for example in disrupting immune responses, and blocking sepsis.

[0588] In another specific embodiment, polypeptides, antibodies, polynucleotides and/or agonists or antagonists of the present invention are used as a therapy for chronic hypergammaglobulinemia evident in such diseases as monoclonal gammopathy of undetermined significance (MGUS), Waldenstrom's disease, related idiopathic monoclonal gammopathies, and plasmacytomas.

[0589] In another specific embodiment, polypeptides, antibodies, polynucleotides and/or agonists or antagonists of the present invention may be employed for instance to inhibit polypeptide chemotaxis and activation of macrophages and their precursors, and of neutrophils, basophils, B lymphocytes and some T-cell subsets, e.g., activated and CD8 cytotoxic T cells and natural killer cells, in certain autoimmune and chronic inflammatory and infective diseases. Examples of autoimmune diseases are described herein and include multiple sclerosis, and insulin-dependent diabetes.

[0590] The polypeptides, antibodies, polynucleotides and/or agonists or antagonists of the present invention may also be employed to treat idiopathic hyper-eosinophilic syndrome by, for example, preventing eosinophil production and migration.

[0591] In another specific embodiment, polypeptides, antibodies, polynucleotides and/or agonists or antagonists of the present invention are used to enhance or inhibit complement mediated cell lysis.

[0592] In another specific embodiment, polypeptides, antibodies, polynucleotides and/or agonists or antagonists of the present invention are used to enhance or inhibit antibody dependent cellular cytotoxicity.

[0593] In another specific embodiment, polypeptides, antibodies, polynucleotides and/or agonists or antagonists of the present invention may also be employed for treating atherosclerosis, for example, by preventing monocyte infiltration in the artery wall.

[0594] In another specific embodiment, polypeptides, antibodies, polynucleotides and/or agonists or antagonists of the present invention may be employed to treat adult respiratory distress syndrome (ARDS).

[0595] In another specific embodiment, polypeptides, antibodies, polynucleotides and/or agonists or antagonists of the present invention may be useful for stimulating wound and tissue repair, stimulating angiogenesis, and/or stimulating the repair of vascular or lymphatic diseases or disorders. Additionally, agonists and antagonists of the invention may be used to stimulate the regeneration of mucosal surfaces.

[0596] In a specific embodiment, polynucleotides or polypeptides, and/or agonists thereof are used to detect, prevent, diagnose, prognosticate, treat, and/or ameliorate a disorder characterized by primary or acquired immunodeficiency, deficient serum immunoglobulin production, recurrent infections, and/or immune system dysfunction. Moreover, polynucleotides or polypeptides, and/or agonists thereof may be used to treat or prevent infections of the joints, bones, skin, and/or parotid glands, blood-borne infections (e.g., sepsis, meningitis, septic arthritis, and/or osteomyelitis), autoimmune diseases (e.g., those disclosed herein), inflammatory disorders, and malignancies, and/or any disease or disorder or condition associated with these infections, diseases, disorders and/or malignancies) including, but not limited to, CVID, other primary immune deficiencies, HUV disease, CLL, recurrent bronchitis, sinusitis, otitis media, conjunctivitis, pneumonia, hepatitis, meningitis, herpes zoster (e.g., severe herpes zoster), and/or pneumocystis carnii. Other diseases and disorders that may be detected, prevented, diagnosed, prognosticated, treated, and/or ameliorated with polynucleotides or polypeptides, and/or agonists of the present invention include, but are not limited to, HIV infection, HTLV-BLV infection, lymphopenia, phagocyte bactericidal dysfunction anemia, thrombocytopenia, and hemoglobinuria.

[0597] In another embodiment, polynucleotides, polypeptides, antibodies, and/or agonists or antagonists of the present invention are used to treat, and/or diagnose an individual having common variable immunodeficiency disease (“CVID”; also known as “acquired agammaglobulinemia” and “acquired hypogammaglobulinemia”) or a subset of this disease.

[0598] In a specific embodiment, polynucleotides, polypeptides, antibodies, and/or agonists or antagonists of the present invention may be used to detect, prevent, diagnose, prognosticate, treat, and/or ameliorate cancers or neoplasms including immune cell or immune tissue-related cancers or neoplasms. Examples of cancers or neoplasms that may be detected, prevented, diagnosed, prognosticated, treated, and/or ameliorated by polynucleotides, polypeptides, antibodies, and/or agonists or antagonists of the present invention include, but are not limited to, acute myelogenous leukemia, chronic myelogenous leukemia, Hodgkin's disease, non-Hodgkin's lymphoma, acute lymphocytic anemia (ALL) Chronic lymphocyte leukemia, plasmacytomas, multiple myeloma, Burkitt's lymphoma, EBV-transformed diseases, and/or diseases and disorders described in the section entitled “Hyperproliferative Disorders” elsewhere herein.

[0599] In another specific embodiment, polypeptides, antibodies, polynucleotides and/or agonists or antagonists of the present invention are used as a therapy for decreasing cellular proliferation of Large B-cell Lymphomas.

[0600] In another specific embodiment, polypeptides, antibodies, polynucleotides and/or agonists or antagonists of the present invention are used as a means of decreasing the involvement of B cells and Ig associated with Chronic Myelogenous Leukemia.

[0601] In specific embodiments, the compositions of the invention are used as an agent to boost immunoresponsiveness among B cell immunodeficient individuals, such as, for example, an individual who has undergone a partial or complete splenectomy.

[0602] Antagonists of the invention include, for example, binding and/or inhibitory antibodies, antisense nucleic acids, ribozymes or soluble forms of the polypeptides of the present invention (e.g., Fc fusion protein; see, e.g., Example 9). Agonists of the invention include, for example, binding or stimulatory antibodies, and soluble forms of the polypeptides (e.g., Fc fusion proteins; see, e.g., Example 9). polypeptides, antibodies, polynucleotides and/or agonists or antagonists of the present invention may be employed in a composition with a pharmaceutically acceptable carrier, e.g., as described herein.

[0603] In another embodiment, polypeptides, antibodies, polynucleotides and/or agonists or antagonists of the present invention are administered to an animal (including, but not limited to, those listed above, and also including transgenic animals) incapable of producing functional endogenous antibody molecules or having an otherwise compromised endogenous immune system, but which is capable of producing human immunoglobulin molecules by means of a reconstituted or partially reconstituted immune system from another animal (see, e.g., published PCT Application Nos. WO98/24893, WO/9634096, WO/9633735, and WO/9110741). Administration of polypeptides, antibodies, polynucleotides and/or agonists or antagonists of the present invention to such animals is useful for the generation of monoclonal antibodies against the polypeptides, antibodies, polynucleotides and/or agonists or antagonists of the present invention.

Blood-Related Disorders

[0604] The polynucleotides, polypeptides, antibodies, and/or agonists or antagonists of the present invention may be used to modulate hemostatic (the stopping of bleeding) or thrombolytic (clot dissolving) activity. For example, by increasing hemostatic or thrombolytic activity, polynucleotides or polypeptides, and/or agonists or antagonists of the present invention could be used to treat or prevent blood coagulation diseases, disorders, and/or conditions (e.g., afibrinogenemia, factor deficiencies, hemophilia), blood platelet diseases, disorders, and/or conditions (e.g., thrombocytopenia), or wounds resulting from trauma, surgery, or other causes. Alternatively, polynucleotides, polypeptides, antibodies, and/or agonists or antagonists of the present invention that can decrease hemostatic or thrombolytic activity could be used to inhibit or dissolve clotting. These molecules could be important in the treatment or prevention of heart attacks (infarction), strokes, or scarring.

[0605] In specific embodiments, the polynucleotides, polypeptides, antibodies, and/or agonists or antagonists of the present invention may be used to detect, prevent, diagnose, prognosticate, treat, and/or ameliorate thrombosis, arterial thrombosis, venous thrombosis, thromboembolism, pulmonary embolism, atherosclerosis, myocardial infarction, transient ischemic attack, unstable angina. In specific embodiments, the polynucleotides, polypeptides, antibodies, and/or agonists or antagonists of the present invention may be used for the prevention of occulsion of saphenous grafts, for reducing the risk of periprocedural thrombosis as might accompany angioplasty procedures, for reducing the risk of stroke in patients with atrial fibrillation including nonrheumatic atrial fibrillation, for reducing the risk of embolism associated with mechanical heart valves and or mitral valves disease. Other uses for the polynucleotides, polypeptides, antibodies, and/or agonists or antagonists of the present invention, include, but are not limited to, the prevention of occlusions in extrcorporeal devices (e.g., intravascular canulas, vascular access shunts in hemodialysis patients, hemodialysis machines, and cardiopulmonary bypass machines).

[0606] In another embodiment, a polypeptide of the invention, or polynucleotides, antibodies, agonists, or antagonists corresponding to that polypeptide, may be used to detect, prevent, diagnose, prognosticate, treat, and/or ameliorate diseases and disorders of the blood and/or blood forming organs associated with the tissue(s) in which the polypeptide of the invention is expressed, including one, two, three, four, five, or more tissues disclosed in Table 1B.2, column 5 (Tissue Distribution Library Code).

[0607] The polynucleotides, polypeptides, antibodies, and/or agonists or antagonists of the present invention may be used to modulate hematopoietic activity (the formation of blood cells). For example, the polynucleotides, polypeptides, antibodies, and/or agonists or antagonists of the present invention may be used to increase the quantity of all or subsets of blood cells, such as, for example, erythrocytes, lymphocytes (B or T cells), myeloid cells (e.g., basophils, eosinophils, neutrophils, mast cells, macrophages) and platelets. The ability to decrease the quantity of blood cells or subsets of blood cells may be useful in the detection, prevention, diagnosis, prognostication, treatment, and/or amelioration of anemias and leukopenias described below. Alternatively, the polynucleotides, polypeptides, antibodies, and/or agonists or antagonists of the present invention may be used to decrease the quantity of all or subsets of blood cells, such as, for example, erythrocytes, lymphocytes (B or T cells), myeloid cells (e.g., basophils, eosinophils, neutrophils, mast cells, macrophages) and platelets. The ability to decrease the quantity of blood cells or subsets of blood cells may be useful in the detection, prevention, diagnosis, prognostication, treatment, and/or amelioration of leukocytoses, such as, for example eosinophilia.

[0608] The polynucleotides, polypeptides, antibodies, and/or agonists or antagonists of the present invention may be used to detect, prevent, diagnose, prognosticate, treat, and/or ameliorate blood dyscrasia.

[0609] Anemias are conditions in which the number of red blood cells or amount of hemoglobin (the protein that carries oxygen) in them is below normal. Anemia may be caused by excessive bleeding, decreased red blood cell production, or increased red blood cell destruction (hemolysis). The polynucleotides, polypeptides, antibodies, and/or agonists or antagonists of the present invention may be useful in detecting, preventing, diagnosing, prognosticating, treating, and/or ameliorating anemias. Anemias that may be treated detect, prevented, diagnosed, prognosticated, treated, and/or ameliorated by the polynucleotides, polypeptides, antibodies, and/or agonists or antagonists of the present invention include iron deficiency anemia, hypochromic anemia, microcytic anemia, chlorosis, hereditary sideroblastic anemia, idiopathic acquired sideroblastic anemia, red cell aplasia, megaloblastic anemia (e.g., pernicious anemia, (vitamin B12 deficiency) and folic acid deficiency anemia), aplastic anemia, hemolytic anemias (e.g., autoimmune helolytic anemia, microangiopathic hemolytic anemia, and paroxysmal nocturnal hemoglobinuria). The polynucleotides, polypeptides, antibodies, and/or agonists or antagonists of the present invention may be useful in detecting, preventing, diagnosing, prognosticating, treating, and/or ameliorating anemias associated with diseases including but not limited to, anemias associated with systemic lupus erythematosus, cancers, lymphomas, chronic renal disease, and enlarged spleens. The polynucleotides, polypeptides, antibodies, and/or agonists or antagonists of the present invention may be useful in detecting, preventing, diagnosing, prognosticating, treating, and/or ameliorating anemias arising from drug treatments such as anemias associated with methyldopa, dapsone, and/or sulfadrugs. Additionally, rhe polynucleotides, polypeptides, antibodies, and/or agonists or antagonists of the present invention may be useful in detecting, preventing, diagnosing, prognosticating, treating, and/or ameliorating anemias associated with abnormal red blood cell architecture including but not limited to, hereditary spherocytosis, hereditary elliptocytosis, glucose-6-phosphate dehydrogenase deficiency, and sickle cell anemia.

[0610] The polynucleotides, polypeptides, antibodies, and/or agonists or antagonists of the present invention may be useful in detecting, preventing, diagnosing, prognosticating, treating, and/or ameliorating hemoglobin abnormalities, (e.g., those associated with sickle cell anemia, hemoglobin C disease, hemoglobin S-C disease, and hemoglobin E disease). Additionally, the polynucleotides, polypeptides, antibodies, and/or agonists or antagonists of the present invention may be useful in detecting, preventing, diagnosing, prognosticating, treating, and/or ameliorating thalassemias, including, but not limited to major and minor forms of alpha-thalassemia and beta-thalassemia.

[0611] In another embodiment, the polynucleotides, polypeptides, antibodies, and/or agonists or antagonists of the present invention may be useful in detecting, preventing, diagnosing, prognosticating, treating, and/or ameliorating bleeding disorders including, but not limited to, thrombocytopenia (e.g., idiopathic thrombocytopenic purpura, and thrombotic thrombocytopenic purpura), Von Willebrand's disease, hereditary platelet disorders (e.g., storage pool disease such as Chediak-Higashi and Hermansky-Pudlak syndromes, thromboxane A2 dysfunction, thromboasthenia, and Bernard-Soulier syndrome), hemolytic-uremic syndrome, hemophelias such as hemophelia A or Factor VII deficiency and Christmas disease or Factor IX deficiency, Hereditary Hemorhhagic Telangiectsia, also known as Rendu-Osler-Weber syndrome, allergic purpura (Henoch Schonlein purpura) and disseminated intravascular coagulation.

[0612] The effect of the polynucleotides, polypeptides, antibodies, and/or agonists or antagonists of the present invention on the clotting time of blood may be monitored using any of the clotting tests known in the art including, but not limited to, whole blood partial thromboplastin time (PTT), the activated partial thromboplastin time (aPTT), the activated clotting time (ACT), the recalcified activated clotting time, or the Lee-White Clotting time.

[0613] Several diseases and a variety of drugs can cause platelet dysfunction. Thus, in a specific embodiment, the polynucleotides, polypeptides, antibodies, and/or agonists or antagonists of the present invention may be useful in detecting, preventing, diagnosing, prognosticating, treating, and/or ameliorating acquired platelet dysfunction such as platelet dysfunction accompanying kidney failure, leukemia, multiple myeloma, cirrhosis of the liver, and systemic lupus erythematosus as well as platelet dysfunction associated with drug treatments, including treatment with aspirin, ticlopidine, nonsteroidal anti-inflammatory drugs (used for arthritis, pain, and sprains), and penicillin in high doses.

[0614] In another embodiment, the polynucleotides, polypeptides, antibodies, and/or agonists or antagonists of the present invention may be useful in detecting, preventing, diagnosing, prognosticating, treating, and/or ameliorating diseases and disorders characterized by or associated with increased or decreased numbers of white blood cells. Leukopenia occurs when the number of white blood cells decreases below normal. Leukopenias include, but are not limited to, neutropenia and lymphocytopenia. An increase in the number of white blood cells compared to normal is known as leukocytosis. The body generates increased numbers of white blood cells during infection. Thus, leukocytosis may simply be a normal physiological parameter that reflects infection. Alternatively, leukocytosis may be an indicator of injury or other disease such as cancer. Leokocytoses, include but are not limited to, eosinophilia, and accumulations of macrophages. In specific embodiments, the polynucleotides, polypeptides, antibodies, and/or agonists or antagonists of the present invention may be useful in detecting, preventing, diagnosing, prognosticating, treating, and/or ameliorating leukopenia. In other specific embodiments, the polynucleotides, polypeptides, antibodies, and/or agonists or antagonists of the present invention may be useful in detecting, preventing, diagnosing, prognosticating, treating, and/or ameliorating leukocytosis.

[0615] Leukopenia may be a generalized decreased in all types of white blood cells, or may be a specific depletion of particular types of white blood cells. Thus, in specific embodiments, the polynucleotides, polypeptides, antibodies, and/or agonists or antagonists of the present invention may be useful in detecting, preventing, diagnosing, prognosticating, treating, and/or ameliorating decreases in neutrophil numbers, known as neutropenia. Neutropenias that may be detected, prevented, diagnosed, prognosticated, treated, and/or ameliorated by the polynucleotides, polypeptides, antibodies, and/or agonists or antagonists of the present invention include, but are not limited to, infantile genetic agranulocytosis, familial neutropenia, cyclic neutropenia, neutropenias resulting from or associated with dietary deficiencies (e.g., vitamin B 12 deficiency or folic acid deficiency), neutropenias resulting from or associated with drug treatments (e.g., antibiotic regimens such as penicillin treatment, sulfonamide treatment, anticoagulant treatment, anticonvulsant drugs, anti-thyroid drugs, and cancer chemotherapy), and neutropenias resulting from increased neutrophil destruction that may occur in association with some bacterial or viral infections, allergic disorders, autoimmune diseases, conditions in which an individual has an enlarged spleen (e.g., Felty syndrome, malaria and sarcoidosis), and some drug treatment regimens.

[0616] The polynucleotides, polypeptides, antibodies, and/or agonists or antagonists of the present invention may be useful in detecting, preventing, diagnosing, prognosticating, treating, and/or ameliorating lymphocytopenias (decreased numbers of B and/or T lymphocytes), including, but not limited lymphocytopenias resulting from or associated with stress, drug treatments (e.g., drug treatment with corticosteroids, cancer chemotherapies, and/or radiation therapies), AIDS infection and/or other diseases such as, for example, cancer, rheumatoid arthritis, systemic lupus erythematosus, chronic infections, some viral infections and/or hereditary disorders (e.g., DiGeorge syndrome, Wiskott-Aldrich Syndome, severe combined immunodeficiency, ataxia telangiectsia).

[0617] The polynucleotides, polypeptides, antibodies, and/or agonists or antagonists of the present invention may be useful in detecting, preventing, diagnosing, prognosticating, treating, and/or ameliorating diseases and disorders associated with macrophage numbers and/or macrophage function including, but not limited to, Gaucher's disease, Niemann-Pick disease, Letterer-Siwe disease and Hand-Schuller-Christian disease.

[0618] In another embodiment, the polynucleotides, polypeptides, antibodies, and/or agonists or antagonists of the present invention may be useful in detecting, preventing, diagnosing, prognosticating, treating, and/or ameliorating diseases and disorders associated with eosinophil numbers and/or eosinophil function including, but not limited to, idiopathic hypereosinophilic syndrome, eosinophilia-myalgia syndrome, and Hand-Schuller-Christian disease.

[0619] In yet another embodiment, the polynucleotides, polypeptides, antibodies, and/or agonists or antagonists of the present invention may be useful in detecting, preventing, diagnosing, prognosticating, treating, and/or ameliorating leukemias and lymphomas including, but not limited to, acute lymphocytic (lymphpblastic) leukemia (ALL), acute myeloid (myelocytic, myelogenous, myeloblastic, or myelomonocytic) leukemia, chronic lymphocytic leukemia (e.g., B cell leukemias, T cell leukemias, Sezary syndrome, and Hairy cell leukemia), chronic myelocytic (myeloid, myelogenous, or granulocytic) leukemia, Hodgkin's lymphoma, non-hodgkin's lymphoma, Burkitt's lymphoma, and mycosis fungoides.

[0620] In other embodiments, the polynucleotides, polypeptides, antibodies, and/or agonists or antagonists of the present invention may be useful in detecting, preventing, diagnosing, prognosticating, treating, and/or ameliorating diseases and disorders of plasma cells including, but not limited to, plasma cell dyscrasias, monoclonal gammaopathies, monoclonal gammopathies of undetermined significance, multiple myeloma, macroglobulinemia, Waldenstrom's macroglobulinemia, cryoglobulinemia, and Raynaud's phenomenon.

[0621] In other embodiments, the polynucleotides, polypeptides, antibodies, and/or agonists or antagonists of the present invention may be useful in detecting, preventing, diagnosing, prognosticating, treating, and/or ameliorating myeloproliferative disorders, including but not limited to, polycythemia vera, relative polycythemia, secondary polycythemia, myelofibrosis, acute myelofibrosis, agnogenic myelod metaplasia, thrombocythemia, (including both primary and seconday thrombocythemia) and chronic myelocytic leukemia.

[0622] In other embodiments, the polynucleotides, polypeptides, antibodies, and/or agonists or antagonists of the present invention may be useful as a treatment prior to surgery, to increase blood cell production.

[0623] In other embodiments, the polynucleotides, polypeptides, antibodies, and/or agonists or antagonists of the present invention may be useful as an agent to enhance the migration, phagocytosis, superoxide production, antibody dependent cellular cytotoxicity of neutrophils, eosionophils and macrophages.

[0624] In other embodiments, the polynucleotides, polypeptides, antibodies, and/or agonists or antagonists of the present invention may be useful as an agent to increase the number of stem cells in circulation prior to stem cells pheresis. In another specific embodiment, the polynucleotides, polypeptides, antibodies, and/or agonists or antagonists of the present invention may be useful as an agent to increase the number of stem cells in circulation prior to platelet pheresis.

[0625] In other embodiments, the polynucleotides, polypeptides, antibodies, and/or agonists or antagonists of the present invention may be useful as an agent to increase cytokine production.

[0626] In other embodiments, the polynucleotides, polypeptides, antibodies, and/or agonists or antagonists of the present invention may be useful in detecting, preventing, diagnosing, prognosticating, treating, and/or ameliorating primary hematopoietic disorders.

Hyperproliferative Disorders

[0627] In certain embodiments, polynucleotides or polypeptides, or agonists or antagonists of the present invention can be used to treat or detect hyperproliferative disorders, including neoplasms. Polynucleotides or polypeptides, or agonists or antagonists of the present invention may inhibit the proliferation of the disorder through direct or indirect interactions. Alternatively, Polynucleotides or polypeptides, or agonists or antagonists of the present invention may proliferate other cells which can inhibit the hyperproliferative disorder.

[0628] For example, by increasing an immune response, particularly increasing antigenic qualities of the hyperproliferative disorder or by proliferating, differentiating, or mobilizing T-cells, hyperproliferative disorders can be treated. This immune response may be increased by either enhancing an existing immune response, or by initiating a new immune response. Alternatively, decreasing an immune response may also be a method of treating hyperproliferative disorders, such as a chemotherapeutic agent.

[0629] Examples of hyperproliferative disorders that can be treated or detected by polynucleotides or polypeptides, or agonists or antagonists of the present invention include, but are not limited to neoplasms located in the: colon, abdomen, bone, breast, digestive system, liver, pancreas, peritoneum, endocrine glands (adrenal, parathyroid, pituitary, testicles, ovary, thymus, thyroid), eye, head and neck, nervous (central and peripheral), lymphatic system, pelvis, skin, soft tissue, spleen, thorax, and urogenital tract.

[0630] Similarly, other hyperproliferative disorders can also be treated or detected by polynucleotides or polypeptides, or agonists or antagonists of the present invention. Examples of such hyperproliferative disorders include, but are not limited to: Acute Childhood Lymphoblastic Leukemia, Acute Lymphoblastic Leukemia, Acute Lymphocytic Leukemia, Acute Myeloid Leukemia, Adrenocortical Carcinoma, Adult (Primary) Hepatocellular Cancer, Adult (Primary) Liver Cancer, Adult Acute Lymphocytic Leukemia, Adult Acute Myeloid Leukemia, Adult Hodgkin's Disease, Adult Hodgkin's Lymphoma, Adult Lymphocytic Leukemia, Adult Non-Hodgkin's Lymphoma, Adult Primary Liver Cancer, Adult Soft Tissue Sarcoma, AIDS-Related Lymphoma, AIDS-Related Malignancies, Anal Cancer, Astrocytoma, Bile Duct Cancer, Bladder Cancer, Bone Cancer, Brain Stem Glioma, Brain Tumors, Breast Cancer, Cancer of the Renal Pelvis and Ureter, Central Nervous System (Primary) Lymphoma, Central Nervous System Lymphoma, Cerebellar Astrocytoma, Cerebral Astrocytoma, Cervical Cancer, Childhood (Primary) Hepatocellular Cancer, Childhood (Primary) Liver Cancer, Childhood Acute Lymphoblastic Leukemia, Childhood Acute Myeloid Leukemia, Childhood Brain Stem Glioma, Childhood Cerebellar Astrocytoma, Childhood Cerebral Astrocytoma, Childhood Extracranial Germ Cell Tumors, Childhood Hodgkin's Disease, Childhood Hodgkin's Lymphoma, Childhood Hypothalamic and Visual Pathway Glioma, Childhood Lymphoblastic Leukemia, Childhood Medulloblastoma, Childhood Non-Hodgkin's Lymphoma, Childhood Pineal and Supratentorial Primitive Neuroectodermal Tumors, Childhood Primary Liver Cancer, Childhood Rhabdomyosarcoma, Childhood Soft Tissue Sarcoma, Childhood Visual Pathway and Hypothalamic Glioma, Chronic Lymphocytic Leukemia, Chronic Myelogenous Leukemia, Colon Cancer, Cutaneous T-Cell Lymphoma, Endocrine Pancreas Islet Cell Carcinoma, Endometrial Cancer, Ependymoma, Epithelial Cancer, Esophageal Cancer, Ewing's Sarcoma and Related Tumors, Exocrine Pancreatic Cancer, Extracranial Germ Cell Tumor, Extragonadal Germ Cell Tumor, Extrahepatic Bile Duct Cancer, Eye Cancer, Female Breast Cancer, Gaucher's Disease, Gallbladder Cancer, Gastric Cancer, Gastrointestinal Carcinoid Tumor, Gastrointestinal Tumors, Germ Cell Tumors, Gestational Trophoblastic Tumor, Hairy Cell Leukemia, Head and Neck Cancer, Hepatocellular Cancer, Hodgkin's Disease, Hodgkin's Lymphoma, Hypergammaglobulinemia, Hypopharyngeal Cancer, Intestinal Cancers, Intraocular Melanoma, Islet Cell Carcinoma, Islet Cell Pancreatic Cancer, Kaposi's Sarcoma, Kidney Cancer, Laryngeal Cancer, Lip and Oral Cavity Cancer, Liver Cancer, Lung Cancer, Lymphoproliferative Disorders, Macroglobulinemia, Male Breast Cancer, Malignant Mesothelioma, Malignant Thymoma, Medulloblastoma, Melanoma, Mesothelioma, Metastatic Occult Primary Squamous Neck Cancer, Metastatic Primary Squamous Neck Cancer, Metastatic Squamous Neck Cancer, Multiple Myeloma, Multiple Myeloma/Plasma Cell Neoplasm, Myelodysplastic Syndrome, Myelogenous Leukemia, Myeloid Leukemia, Myeloproliferative Disorders, Nasal Cavity and Paranasal Sinus Cancer, Nasopharyngeal Cancer, Neuroblastoma, Non-Hodgkin's Lymphoma During Pregnancy, Nonmelanoma Skin Cancer, Non-Small Cell Lung Cancer, Occult Primary Metastatic Squamous Neck Cancer, Oropharyngeal Cancer, Osteo-/Malignant Fibrous Sarcoma, Osteosarcoma/Malignant Fibrous Histiocytoma, Osteosarcoma/Malignant Fibrous Histiocytoma of Bone, Ovarian Epithelial Cancer, Ovarian Germ Cell Tumor, Ovarian Low Malignant Potential Tumor, Pancreatic Cancer, Paraproteinemias, Purpura, Parathyroid Cancer, Penile Cancer, Pheochromocytoma, Pituitary Tumor, Plasma Cell Neoplasm/Multiple Myeloma, Primary Central Nervous System Lymphoma, Primary Liver Cancer, Prostate Cancer, Rectal Cancer, Renal Cell Cancer, Renal Pelvis and Ureter Cancer, Retinoblastoma, Rhabdomyosarcoma, Salivary Gland Cancer, Sarcoidosis Sarcomas, Sezary Syndrome, Skin Cancer, Small Cell Lung Cancer, Small Intestine Cancer, Soft Tissue Sarcoma, Squamous Neck Cancer, Stomach Cancer, Supratentorial Primitive Neuroectodermal and Pineal Tumors, T-Cell Lymphoma, Testicular Cancer, Thymoma, Thyroid Cancer, Transitional Cell Cancer of the Renal Pelvis and Ureter, Transitional Renal Pelvis and Ureter Cancer, Trophoblastic Tumors, Ureter and Renal Pelvis Cell Cancer, Urethral Cancer, Uterine Cancer, Uterine Sarcoma, Vaginal Cancer, Visual Pathway and Hypothalamic Glioma, Vulvar Cancer, Waldenstrom's Macroglobulinemia, Wilms' Tumor, and any other hyperproliferative disease, besides neoplasia, located in an organ system listed above.

[0631] In another preferred embodiment, polynucleotides or polypeptides, or agonists or antagonists of the present invention are used to detect, prevent, diagnose, prognosticate, treat, and/or ameliorate premalignant conditions and to prevent progression to a neoplastic or malignant state, including but not limited to those disorders described above. Such uses are indicated in conditions known or suspected of preceding progression to neoplasia or cancer, in particular, where non-neoplastic cell growth consisting of hyperplasia, metaplasia, or most particularly, dysplasia has occurred (for review of such abnormal growth conditions, see Robbins and Angell, 1976, Basic Pathology, 2d Ed., W. B. Saunders Co., Philadelphia, pp. 68-79.)

[0632] Hyperplasia is a form of controlled cell proliferation, involving an increase in cell number in a tissue or organ, without significant alteration in structure or function. Hyperplastic disorders which can be detected, prevented, diagnosed, prognosticated, treated, and/or ameliorated with compositions of the invention (including polynucleotides, polypeptides, agonists or antagonists) include, but are not limited to, angiofollicular mediastinal lymph node hyperplasia, angiolymphoid hyperplasia with eosinophilia, atypical melanocytic hyperplasia, basal cell hyperplasia, benign giant lymph node hyperplasia, cementum hyperplasia, congenital adrenal hyperplasia, congenital sebaceous hyperplasia, cystic hyperplasia, cystic hyperplasia of the breast, denture hyperplasia, ductal hyperplasia, endometrial hyperplasia, fibromuscular hyperplasia, focal epithelial hyperplasia, gingival hyperplasia, inflammatory fibrous hyperplasia, inflammatory papillary hyperplasia, intravascular papillary endothelial hyperplasia, nodular hyperplasia of prostate, nodular regenerative hyperplasia, pseudoepitheliomatous hyperplasia, senile sebaceous hyperplasia, and verrucous hyperplasia.

[0633] Metaplasia is a form of controlled cell growth in which one type of adult or fully differentiated cell substitutes for another type of adult cell. Metaplastic disorders which can be detected, prevented, diagnosed, prognosticated, treated, and/or ameliorated with compositions of the invention (including polynucleotides, polypeptides, agonists or antagonists) include, but are not limited to, agnogenic myeloid metaplasia, apocrine metaplasia, atypical metaplasia, autoparenchymatous metaplasia, connective tissue metaplasia, epithelial metaplasia, intestinal metaplasia, metaplastic anemia, metaplastic ossification, metaplastic polyps, myeloid metaplasia, primary myeloid metaplasia, secondary myeloid metaplasia, squamous metaplasia, squamous metaplasia of amnion, and symptomatic myeloid metaplasia.

[0634] Dysplasia is frequently a forerunner of cancer, and is found mainly in the epithelia; it is the most disorderly form of non-neoplastic cell growth, involving a loss in individual cell uniformity and in the architectural orientation of cells. Dysplastic cells often have abnormally large, deeply stained nuclei, and exhibit pleomorphism. Dysplasia characteristically occurs where there exists chronic irritation or inflammation. Dysplastic disorders which can be detected, prevented, diagnosed, prognosticated, treated, and/or ameliorated with compositions of the invention (including polynucleotides, polypeptides, agonists or antagonists) include, but are not limited to, anhidrotic ectodermal dysplasia, anterofacial dysplasia, asphyxiating thoracic dysplasia, atriodigital dysplasia, bronchopulmonary dysplasia, cerebral dysplasia, cervical dysplasia, chondroectodermal dysplasia, cleidocranial dysplasia, congenital ectodermal dysplasia, craniodiaphysial dysplasia, craniocarpotarsal dysplasia, craniometaphysial dysplasia, dentin dysplasia, diaphysial dysplasia, ectodermal dysplasia, enamel dysplasia, encephalo-ophthalmic dysplasia, dysplasia epiphysialis hemimelia, dysplasia epiphysialis multiplex, dysplasia epiphysialis punctata, epithelial dysplasia, faciodigitogenital dysplasia, familial fibrous dysplasia of jaws, familial white folded dysplasia, fibromuscular dysplasia, fibrous dysplasia of bone, florid osseous dysplasia, hereditary renal-retinal dysplasia, hidrotic ectodermal dysplasia, hypohidrotic ectodermal dysplasia, lymphopenic thymic dysplasia, mammary dysplasia, mandibulofacial dysplasia, metaphysial dysplasia, Mondini dysplasia, monostotic fibrous dysplasia, mucoepithelial dysplasia, multiple epiphysial dysplasia, oculoauriculovertebral dysplasia, oculodentodigital dysplasia, oculovertebral dysplasia, odontogenic dysplasia, ophthalmomandibulomelic dysplasia, periapical cemental dysplasia, polyostotic fibrous dysplasia, pseudoachondroplastic spondyloepiphysial dysplasia, retinal dysplasia, septo-optic dysplasia, spondyloepiphysial dysplasia, and ventriculoradial dysplasia.

[0635] Additional pre-neoplastic disorders which can be detected, prevented, diagnosed, prognosticated, treated, and/or ameliorated with compositions of the invention (including polynucleotides, polypeptides, agonists or antagonists) include, but are not limited to, benign dysproliferative disorders (e.g., benign tumors, fibrocystic conditions, tissue hypertrophy, intestinal polyps, colon polyps, and esophageal dysplasia), leukoplakia, keratoses, Bowen's disease, Farmer's Skin, solar cheilitis, and solar keratosis.

[0636] In another embodiment, a polypeptide of the invention, or polynucleotides, antibodies, agonists, or antagonists corresponding to that polypeptide, may be used to diagnose and/or prognosticate disorders associated with the tissue(s) in which the polypeptide of the invention is expressed, including one, two, three, four, five, or more tissues disclosed in Table 1B.2, column 5 (Tissue Distribution Library Code).

[0637] In another embodiment, polynucleotides, polypeptides, antibodies, and/or agonists or antagonists of the present invention conjugated to a toxin or a radioactive isotope, as described herein, may be used to treat cancers and neoplasms, including, but not limited to those described herein. In a further preferred embodiment, polynucleotides, polypeptides, antibodies, and/or agonists or antagonists of the present invention conjugated to a toxin or a radioactive isotope, as described herein, may be used to treat acute myelogenous leukemia.

[0638] Additionally, polynucleotides, polypeptides, and/or agonists or antagonists of the invention may affect apoptosis, and therefore, would be useful in treating a number of diseases associated with increased cell survival or the inhibition of apoptosis. For example, diseases associated with increased cell survival or the inhibition of apoptosis that could be detected, prevented, diagnosed, prognosticated, treated, and/or ameliorated by polynucleotides, polypeptides, and/or agonists or antagonists of the invention, include cancers (such as follicular lymphomas, carcinomas with p53 mutations, and hormone-dependent tumors, including, but not limited to colon cancer, cardiac tumors, pancreatic cancer, melanoma, retinoblastoma, glioblastoma, lung cancer, intestinal cancer, testicular cancer, stomach cancer, neuroblastoma, myxoma, myoma, lymphoma, endothelioma, osteoblastoma, osteoclastoma, osteosarcoma, chondrosarcoma, adenoma, breast cancer, prostate cancer, Kaposi's sarcoma and ovarian cancer); autoimmune disorders such as, multiple sclerosis, Sjogren's syndrome, Hashimoto's thyroiditis, biliary cirrhosis, Behcet's disease, Crohn's disease, polymyositis, systemic lupus erythematosus and immune-related glomerulonephritis and rheumatoid arthritis) and viral infections (such as herpes viruses, pox viruses and adenoviruses), inflammation, graft v. host disease, acute graft rejection, and chronic graft rejection.

[0639] In preferred embodiments, polynucleotides, polypeptides, and/or agonists or antagonists of the invention are used to inhibit growth, progression, and/or metastasis of cancers, in particular those listed above.

[0640] Additional diseases or conditions associated with increased cell survival that could be detected, prevented, diagnosed, prognosticated, treated, and/or ameliorated by polynucleotides, polypeptides, and/or agonists or antagonists of the invention, include, but are not limited to, progression, and/or metastases of malignancies and related disorders such as leukemia (including acute leukemias (e.g., acute lymphocytic leukemia, acute myelocytic leukemia (including myeloblastic, promyelocytic, myelomonocytic, monocytic, and erythroleukemia)) and chronic leukemias (e.g., chronic myelocytic (granulocytic) leukemia and chronic lymphocytic leukemia)), polycythemia vera, lymphomas (e.g., Hodgkin's disease and non-Hodgkin's disease), multiple myeloma, Waldenstrom's macroglobulinemia, heavy chain disease, and solid tumors including, but not limited to, sarcomas and carcinomas such as fibrosarcoma, myxosarcoma, liposarcoma, chondrosarcoma, osteogenic sarcoma, chordoma, angiosarcoma, endotheliosarcoma, lymphangiosarcoma, lymphangioendotheliosarcoma, synovioma, mesothelioma, Ewing's tumor, leiomyosarcoma, rhabdomyosarcoma, colon carcinoma, pancreatic cancer, breast cancer, ovarian cancer, prostate cancer, squamous cell carcinoma, basal cell carcinoma, adenocarcinoma, sweat gland carcinoma, sebaceous gland carcinoma, papillary carcinoma, papillary adenocarcinomas, cystadenocarcinoma, medullary carcinoma, bronchogenic carcinoma, renal cell carcinoma, hepatoma, bile duct carcinoma, choriocarcinoma, seminoma, embryonal carcinoma, Wilm's tumor, cervical cancer, testicular tumor, lung carcinoma, small cell lung carcinoma, bladder carcinoma, epithelial carcinoma, glioma, astrocytoma, medulloblastoma, craniopharyngioma, ependymoma, pinealoma, emangioblastoma, acoustic neuroma, oligodendroglioma, menangioma, melanoma, neuroblastoma, and retinoblastoma.

[0641] Diseases associated with increased apoptosis that could be detected, prevented, diagnosed, prognosticated, treated, and/or ameliorated by polynucleotides, polypeptides, and/or agonists or antagonists of the invention, include AIDS; neurodegenerative disorders (such as Alzheimer's disease, Parkinson's disease, amyotrophic lateral sclerosis, retinitis pigmentosa, cerebellar degeneration and brain tumor or prior associated disease); autoimmune disorders (such as, multiple sclerosis, Sjogren's syndrome, Hashimoto's thyroiditis, biliary cirrhosis, Behcet's disease, Crohn's disease, polymyositis, systemic lupus erythematosus and immune-related glomerulonephritis and rheumatoid arthritis) myelodysplastic syndromes (such as aplastic anemia), graft v. host disease, ischemic injury (such as that caused by myocardial infarction, stroke and reperfusion injury), liver injury (e.g., hepatitis related liver injury, ischemia/reperfusion injury, cholestosis (bile duct injury) and liver cancer); toxin-induced liver disease (such as that caused by alcohol), septic shock, cachexia and anorexia.

[0642] Hyperproliferative diseases and/or disorders that could be detected, prevented, diagnosed, prognosticated, treated, and/or ameliorated by polynucleotides, polypeptides, and/or agonists or antagonists of the invention, include, but are not limited to, neoplasms located in the liver, abdomen, bone, breast, digestive system, pancreas, peritoneum, endocrine glands (adrenal, parathyroid, pituitary, testicles, ovary, thymus, thyroid), eye, head and neck, nervous system (central and peripheral), lymphatic system, pelvis, skin, soft tissue, spleen, thorax, and urogenital tract.

[0643] Similarly, other hyperproliferative disorders can also be detected, prevented, diagnosed, prognosticated, treated, and/or ameliorated by polynucleotides, polypeptides, and/or agonists or antagonists of the invention. Examples of such hyperproliferative disorders include, but are not limited to: hypergammaglobulinemia, lymphoproliferative disorders, paraproteinemias, purpura, sarcoidosis, Sezary Syndrome, Waldenstron's macroglobulinemia, Gaucher's Disease, histiocytosis, and any other hyperproliferative disease, besides neoplasia, located in an organ system listed above.

[0644] Another preferred embodiment utilizes polynucleotides of the present invention to inhibit aberrant cellular division, by gene therapy using the present invention, and/or protein fusions or fragments thereof.

[0645] Thus, the present invention provides a method for treating cell proliferative disorders by inserting into an abnormally proliferating cell a polynucleotide of the present invention, wherein said polynucleotide represses said expression.

[0646] Another embodiment of the present invention provides a method of treating cell-proliferative disorders in individuals comprising administration of one or more active gene copies of the present invention to an abnormally proliferating cell or cells. In a preferred embodiment, polynucleotides of the present invention is a DNA construct comprising a recombinant expression vector effective in expressing a DNA sequence encoding said polynucleotides. In another preferred embodiment of the present invention, the DNA construct encoding the poynucleotides of the present invention is inserted into cells to be treated utilizing a retrovirus, or more preferably an adenoviral vector (See G J. Nabel, et. al., PNAS 1999 96: 324-326, which is hereby incorporated by reference). In a most preferred embodiment, the viral vector is defective and will not transform non-proliferating cells, only proliferating cells. Moreover, in a preferred embodiment, the polynucleotides of the present invention inserted into proliferating cells either alone, or in combination with or fused to other polynucleotides, can then be modulated via an external stimulus (i.e. magnetic, specific small molecule, chemical, or drug administration, etc.), which acts upon the promoter upstream of said polynucleotides to induce expression of the encoded protein product. As such the beneficial therapeutic affect of the present invention may be expressly modulated (i.e. to increase, decrease, or inhibit expression of the present invention) based upon said external stimulus.

[0647] Polynucleotides of the present invention may be useful in repressing expression of oncogenic genes or antigens. By “repressing expression of the oncogenic genes” is intended the suppression of the transcription of the gene, the degradation of the gene transcript (pre-message RNA), the inhibition of splicing, the destruction of the messenger RNA, the prevention of the post-translational modifications of the protein, the destruction of the protein, or the inhibition of the normal function of the protein.

[0648] For local administration to abnormally proliferating cells, polynucleotides of the resent invention may be administered by any method known to those of skill in the art including, ut not limited to transfection, electroporation, microinjection of cells, or in vehicles such as liposomes, lipofectin, or as naked polynucleotides, or any other method described throughout the specification. The polynucleotide of the present invention may be delivered by known gene delivery systems such as, but not limited to, retroviral vectors (Gilboa, J. Virology 44:845 (1982); Hocke, Nature 320:275 (1986); Wilson, et al., Proc. Natl. Acad. Sci. U.S.A. 85:3014), vaccinia virus system (Chakrabarty et al., Mol. Cell Biol. 5:3403 (1985) or other efficient DNA delivery systems (Yates et al., Nature 313:812 (1985)) known to those skilled in the art. These references are exemplary only and are hereby incorporated by reference. In order to specifically deliver or transfect cells which are abnormally proliferating and spare non-dividing cells, it is preferable to utilize a retrovirus, or adenoviral (as described in the art and elsewhere herein) delivery system known to those of skill in the art. Since host DNA replication is required for retroviral DNA to integrate and the retrovirus will be unable to self replicate due to the lack of the retrovirus genes needed for its life cycle. Utilizing such a retroviral delivery system for polynucleotides of the present invention will target said gene and constructs to abnormally proliferating cells and will spare the non-dividing normal cells.

[0649] The polynucleotides of the present invention may be delivered directly to cell proliferative disorder/disease sites in internal organs, body cavities and the like by use of imaging devices used to guide an injecting needle directly to the disease site. The polynucleotides of the present invention may also be administered to disease sites at the time of surgical intervention.

[0650] By “cell proliferative disease” is meant any human or animal disease or disorder, affecting any one or any combination of organs, cavities, or body parts, which is characterized by single or multiple local abnormal proliferations of cells, groups of cells, or tissues, whether benign or malignant.

[0651] Any amount of the polynucleotides of the present invention may be administered as long as it has a biologically inhibiting effect on the proliferation of the treated cells. Moreover, it is possible to administer more than one of the polynucleotide of the present invention simultaneously to the same site. By “biologically inhibiting” is meant partial or total growth inhibition as well as decreases in the rate of proliferation or growth of the cells. The biologically inhibitory dose may be determined by assessing the effects of the polynucleotides of the present invention on target malignant or abnormally proliferating cell growth in tissue culture, tumor growth in animals and cell cultures, or any other method known to one of ordinary skill in the art.

[0652] The present invention is further directed to antibody-based therapies which involve administering of anti-polypeptides and anti-polynucleotide antibodies to a mammalian, preferably human, patient for treating one or more of the described disorders. Methods for producing anti-polypeptides and anti-polynucleotide antibodies polyclonal and monoclonal antibodies are described in detail elsewhere herein. Such antibodies may be provided in pharmaceutically acceptable compositions as known in the art or as described herein.

[0653] A summary of the ways in which the antibodies of the present invention may be used therapeutically includes binding polynucleotides or polypeptides of the present invention locally or systemically in the body or by direct cytotoxicity of the antibody, e.g. as mediated by complement (CDC) or by effector cells (ADCC). Some of these approaches are described in more detail below. Armed with the teachings provided herein, one of ordinary skill in the art will know how to use the antibodies of the present invention for diagnosis, prognosis, monitoring, or therapeutic purposes without undue experimentation.

[0654] In particular, the antibodies, fragments and derivatives of the present invention are useful for treating a subject having or developing cell proliferative and/or differentiation disorders as described herein. Such treatment comprises administering a single or multiple doses of the antibody, or a fragment, derivative, or a conjugate thereof.

[0655] The antibodies of this invention may be advantageously utilized in combination with other monoclonal or chimeric antibodies, or with lymphokines or hematopoietic growth factors, for example., which serve to increase the number or activity of effector cells which interact with the antibodies.

[0656] It is preferred to use high affinity and/or potent in vivo inhibiting and/or neutralizing antibodies against polypeptides or polynucleotides of the present invention, fragments or regions thereof, for both immunoassays directed to and therapy of disorders related to polynucleotides or polypeptides, including fragements thereof, of the present invention. Such antibodies, fragments, or regions, will preferably have an affinity for polynucleotides or polypeptides, including fragements thereof. Preferred binding affinities include those with a dissociation constant or Kd less than 5×10⁻⁶M, 10⁻⁶M, 5×10⁻⁷M, 10⁻⁷M, 5×10⁻⁸M, 10⁻⁸M, 5×10⁻⁹M, 10⁻⁹M, 5×10⁻¹⁰ M, 10⁻¹⁰M, 5×10⁻¹¹M, 10⁻¹¹M, 5×10⁻¹²M, 10⁻¹²M, 5×10⁻¹³ M, 10⁻¹³M, 5×10⁻¹⁴M, 10⁻¹⁴M, 5×10⁻¹⁵M, and 10⁻¹⁵M.

[0657] Moreover, polypeptides of the present invention are useful in inhibiting the angiogenesis of proliferative cells or tissues, either alone, as a protein fusion, or in combination with other polypeptides directly or indirectly, as described elsewhere herein. In a most preferred embodiment, said anti-angiogenesis effect may be achieved indirectly, for example, through the inhibition of hematopoietic, tumor-specific cells, such as tumor-associated macrophages (See Joseph I B, et al. J Natl Cancer Inst, 90(21):1648-53 (1998), which is hereby incorporated by reference). Antibodies directed to polypeptides or polynucleotides of the present invention may also result in inhibition of angiogenesis directly, or indirectly (See Witte L, et al., Cancer Metastasis Rev. 17(2):155-61 (1998), which is hereby incorporated by reference)).

[0658] Polypeptides, including protein fusions, of the present invention, or fragments thereof may be useful in inhibiting proliferative cells or tissues through the induction of apoptosis. Said polypeptides may act either directly, or indirectly to induce apoptosis of proliferative cells and tissues, for example in the activation of a death-domain receptor, such as tumor necrosis factor (TNF) receptor-1, CD95 (Fas/APO-1), TNF-receptor-related apoptosis-mediated protein (TRAMP) and TNF-related apoptosis-inducing ligand (TRAIL) receptor-1 and -2 (See Schulze-Osthoff K, et. al., Eur J. Biochem 254(3):439-59 (1998), which is hereby incorporated by reference). Moreover, in another preferred embodiment of the present invention, said polypeptides may induce apoptosis through other mechanisms, such as in the activation of other proteins which will activate apoptosis, or through stimulating the expression of said proteins, either alone or in combination with small molecule drugs or adjuviants, such as apoptonin, galectins, thioredoxins, anti-inflammatory proteins (See for example, Mutat Res 400(1-2):447-55 (1998), Med Hypotheses.50(5):423-33 (1998), Chem Biol Interact. Apr. 24; 111-112:23-34 (1998), J Mol Med. 76(6):402-12 (1998), Int J Tissue React; 20(1):3-15 (1998), which are all hereby incorporated by reference).

[0659] Polypeptides, including protein fusions to, or fragments thereof, of the present invention are useful in inhibiting the metastasis of proliferative cells or tissues. Inhibition may occur as a direct result of administering polypeptides, or antibodies directed to said polypeptides as described elsewere herein, or indirectly, such as activating the expression of proteins known to inhibit metastasis, for example alpha 4 integrins, (See, e.g., Curr Top Microbiol Immunol 1998; 231:125-41, which is hereby incorporated by reference). Such thereapeutic affects of the present invention may be achieved either alone, or in combination with small molecule drugs or adjuvants.

[0660] In another embodiment, the invention provides a method of delivering compositions containing the polypeptides of the invention (e.g., compositions containing polypeptides or polypeptide antibodes associated with heterologous polypeptides, heterologous nucleic acids, toxins, or prodrugs) to targeted cells expressing the polypeptide of the present invention. Polypeptides or polypeptide antibodes of the invention may be associated with with heterologous polypeptides, heterologous nucleic acids, toxins, or prodrugs via hydrophobic, hydrophilic, ionic and/or covalent interactions.

[0661] Polypeptides, protein fusions to, or fragments thereof, of the present invention are useful in enhancing the immunogenicity and/or antigenicity of proliferating cells or tissues, either directly, such as would occur if the polypeptides of the present invention ‘vaccinated’ the immune response to respond to proliferative antigens and immunogens, or indirectly, such as in activating the expression of proteins known to enhance the immune response (e.g. chemokines), to said antigens and immunogens.

Renal Disorders

[0662] Polynucleotides, polypeptides, antibodies, and/or agonists or antagonists of the present invention, may be used to detect, prevent, diagnose, prognosticate, treat, and/or ameliorate disorders of the renal system. Renal disorders which can be detected, prevented, diagnosed, prognosticated, treated, and/or ameliorated with compositions of the invention include, but are not limited to, kidney failure, nephritis, blood vessel disorders of kidney, metabolic and congenital kidney disorders, urinary disorders of the kidney, autoimmune disorders, sclerosis and necrosis, electrolyte imbalance, and kidney cancers.

[0663] Kidney diseases which can be detected, prevented, diagnosed, prognosticated, treated, and/or ameliorated with compositions of the invention include, but are not limited to, acute kidney failure, chronic kidney failure, atheroembolic renal failure, end-stage renal disease, inflammatory diseases of the kidney (e.g., acute glomerulonephritis, postinfectious glomerulonephritis, rapidly progressive glomerulonephritis, nephrotic syndrome, membranous glomerulonephritis, familial nephrotic syndrome, membranoproliferative glomerulonephritis I and II, mesangial proliferative glomerulonephritis, chronic glomerulonephritis, acute tubulointerstitial nephritis, chronic tubulointerstitial nephritis, acute post-streptococcal glomerulonephritis (PSGN), pyelonephritis, lupus nephritis, chronic nephritis, interstitial nephritis, and post-streptococcal glomerulonephritis), blood vessel disorders of the kidneys (e.g., kidney infarction, atheroembolic kidney disease, cortical necrosis, malignant nephrosclerosis, renal vein thrombosis, renal underperfusion, renal retinopathy, renal ischemia-reperfusion, renal artery embolism, and renal artery stenosis), and kidney disorders resulting form urinary tract disease (e.g., pyelonephritis, hydronephrosis, urolithiasis (renal lithiasis, nephrolithiasis), reflux nephropathy, urinary tract infections, urinary retention, and acute or chronic unilateral obstructive uropathy.)

[0664] In addition, compositions of the invention can be used to detect, prevent, diagnose, prognosticate, treat, and/or ameliorate metabolic and congenital disorders of the kidney (e.g., uremia, renal amyloidosis, renal osteodystrophy, renal tubular acidosis, renal glycosuria, nephrogenic diabetes insipidus, cystinuria, Fanconi's syndrome, renal fibrocystic osteosis (renal rickets), Hartnup disease, Bartter's syndrome, Liddle's syndrome, polycystic kidney disease, medullary cystic disease, medullary sponge kidney, Alport's syndrome, nail-patella syndrome, congenital nephrotic syndrome, CRUSH syndrome, horseshoe kidney, diabetic nephropathy, nephrogenic diabetes insipidus, analgesic nephropathy, kidney stones, and membranous nephropathy), and autoimmune disorders of the kidney (e.g., systemic lupus erythematosus (SLE), Goodpasture syndrome, IgA nephropathy, and IgM mesangial proliferative glomerulonephritis). Compositions of the invention can also be used to detect, prevent, diagnose, prognosticate, treat, and/or ameliorate sclerotic or necrotic disorders of the kidney (e.g., glomerulosclerosis, diabetic nephropathy, focal segmental glomerulosclerosis (FSGS), necrotizing glomerulonephritis, and renal papillary necrosis), cancers of the kidney (e.g., nephroma, hypernephroma, nephroblastoma, renal cell cancer, transitional cell cancer, renal adenocarcinoma, squamous cell cancer, and Wilm's tumor), and electrolyte imbalances (e.g., nephrocalcinosis, pyuria, edema, hydronephritis, proteinuria, hyponatremia, hypernatremia, hypokalemia, hyperkalemia, hypocalcemia, hypercalcemia, hypophosphatemia, and hyperphosphatemia).

[0665] Polypeptides may be administered using any method known in the art, including, but not limited to, direct needle injection at the delivery site, intravenous injection, topical administration, catheter infusion, biolistic injectors, particle accelerators, gelfoam sponge depots, other commercially available depot materials, osmotic pumps, oral or suppositorial solid pharmaceutical formulations, decanting or topical applications during surgery, aerosol delivery. Such methods are known in the art. Polypeptides may be administered as part of a Therapeutic, described in more detail below. Methods of delivering polynucleotides are described in more detail herein.

Cardiovascular Disorders

[0666] Polynucleotides or polypeptides, or agonists or antagonists of the present invention, may be used to detect, prevent, diagnose, prognosticate, treat, and/or ameliorate cardiovascular diseases and disorders, including, but not limited to, peripheral artery disease, such as limb ischemia.

[0667] Cardiovascular disorders include, but are not limited to, cardiovascular abnormalities, such as arterio-arterial fistula, arteriovenous fistula, cerebral arteriovenous malformations, congenital heart defects, pulmonary atresia, and Scimitar Syndrome. Congenital heart defects include, but are not limited to, aortic coarctation, cortriatriatum, coronary vessel anomalies, crisscross heart, dextrocardia, patent ductus arteriosus, Ebstein's anomaly, Eisenmenger complex, hypoplastic left heart syndrome, levocardia, tetralogy of fallot, transposition of great vessels, double outlet right ventricle, tricuspid atresia, persistent truncus arteriosus, and heart septal defects, such as aortopulmonary septal defect, endocardial cushion defects, Lutembacher's Syndrome, trilogy of Fallot, ventricular heart septal defects.

[0668] Cardiovascular disorders also include, but are not limited to, heart disease, such as arrhythmias, carcinoid heart disease, high cardiac output, low cardiac output, cardiac tamponade, endocarditis (including bacterial), heart aneurysm, cardiac arrest, congestive heart failure, congestive cardiomyopathy, paroxysmal dyspnea, cardiac edema, heart hypertrophy, congestive cardiomyopathy, left ventricular hypertrophy, right ventricular hypertrophy, post-infarction heart rupture, ventricular septal rupture, heart valve diseases, myocardial diseases, myocardial ischemia, pericardial effusion, pericarditis (including constrictive and tuberculous), pneumopericardium, postpericardiotomy syndrome, pulmonary heart disease, rheumatic heart disease, ventricular dysfunction, hyperemia, cardiovascular pregnancy complications, Scimitar Syndrome, cardiovascular syphilis, and cardiovascular tuberculosis.

[0669] Arrhythmias include, but are not limited to, sinus arrhythmia, atrial fibrillation, atrial flutter, bradycardia, extrasystole, Adams-Stokes Syndrome, bundle-branch block, sinoatrial block, long QT syndrome, parasystole, Lown-Ganong-Levine Syndrome, Mahaim-type pre-excitation syndrome, Wolff-Parkinson-White syndrome, sick sinus syndrome, tachycardias, and ventricular fibrillation. Tachycardias include paroxysmal tachycardia, supraventricular tachycardia, accelerated idioventricular rhythm, atrioventricular nodal reentry tachycardia, ectopic atrial tachycardia, ectopic junctional tachycardia, sinoatrial nodal reentry tachycardia, sinus tachycardia, Torsades de Pointes, and ventricular tachycardia.

[0670] Heart valve diseases include, but are not limited to, aortic valve insufficiency, aortic valve stenosis, hear murmurs, aortic valve prolapse, mitral valve prolapse, tricuspid valve prolapse, mitral valve insufficiency, mitral valve stenosis, pulmonary atresia, pulmonary valve insufficiency, pulmonary valve stenosis, tricuspid atresia, tricuspid valve insufficiency, and tricuspid valve stenosis.

[0671] Myocardial diseases include, but are not limited to, alcoholic cardiomyopathy, congestive cardiomyopathy, hypertrophic cardiomyopathy, aortic subvalvular stenosis, pulmonary subvalvular stenosis, restrictive cardiomyopathy, Chagas cardiomyopathy, endocardial fibroelastosis, endomyocardial fibrosis, Kearns Syndrome, myocardial reperfusion injury, and myocarditis.

[0672] Myocardial ischemias include, but are not limited to, coronary disease, such as angina pectoris, coronary aneurysm, coronary arteriosclerosis, coronary thrombosis, coronary vasospasm, myocardial infarction and myocardial stunning.

[0673] Cardiovascular diseases also include vascular diseases such as aneurysms, angiodysplasia, angiomatosis, bacillary angiomatosis, Hippel-Lindau Disease, Klippel-Trenaunay-Weber Syndrome, Sturge-Weber Syndrome, angioneurotic edema, aortic diseases, Takayasu's Arteritis, aortitis, Leriche's Syndrome, arterial occlusive diseases, arteritis, enarteritis, polyarteritis nodosa, cerebrovascular disorders, diabetic angiopathies, diabetic retinopathy, embolisms, thrombosis, erythromelalgia, hemorrhoids, hepatic veno-occlusive disease, hypertension, hypotension, ischemia, peripheral vascular diseases, phlebitis, pulmonary veno-occlusive disease, Raynaud's disease, CREST syndrome, retinal vein occlusion, Scimitar syndrome, superior vena cava syndrome, telangiectasia, atacia telangiectasia, hereditary hemorrhagic telangiectasia, varicocele, varicose veins, varicose ulcer, vasculitis, and venous insufficiency.

[0674] Aneurysms include, but are not limited to, dissecting aneurysms, false aneurysms, infected aneurysms, ruptured aneurysms, aortic aneurysms, cerebral aneurysms, coronary aneurysms, heart aneurysms, and iliac aneurysms.

[0675] Arterial occlusive diseases include, but are not limited to, arteriosclerosis, intermittent claudication, carotid stenosis, fibromuscular dysplasias, mesenteric vascular occlusion, Moyamoya disease, renal artery obstruction, retinal artery occlusion, and thromboangiitis obliterans.

[0676] Cerebrovascular disorders include, but are not limited to, carotid artery diseases, cerebral amyloid angiopathy, cerebral aneurysm, cerebral anoxia, cerebral arteriosclerosis, cerebral arteriovenous malformation, cerebral artery diseases, cerebral embolism and thrombosis, carotid artery thrombosis, sinus thrombosis, Wallenberg's syndrome, cerebral hemorrhage, epidural hematoma, subdural hematoma, subaraxhnoid hemorrhage, cerebral infarction, cerebral ischemia (including transient), subclavian steal syndrome, periventricular leukomalacia, vascular headache, cluster headache, migraine, and vertebrobasilar insufficiency.

[0677] Embolisms include, but are not limited to, air embolisms, amniotic fluid embolisms, cholesterol embolisms, blue toe syndrome, fat embolisms, pulmonary embolisms, and thromoboembolisms. Thrombosis include, but are not limited to, coronary thrombosis, hepatic vein thrombosis, retinal vein occlusion, carotid artery thrombosis, sinus thrombosis, Wallenberg's syndrome, and thrombophlebitis.

[0678] Ischemic disorders include, but are not limited to, cerebral ischemia, ischemic colitis, compartment syndromes, anterior compartment syndrome, myocardial ischemia, reperfusion injuries, and peripheral limb ischemia. Vasculitis includes, but is not limited to, aortitis, arteritis, Behcet's Syndrome, Churg-Strauss Syndrome, mucocutaneous lymph node syndrome, thromboangiitis obliterans, hypersensitivity vasculitis, Schoenlein-Henoch purpura, allergic cutaneous vasculitis, and Wegener's granulomatosis.

[0679] Polypeptides may be administered using any method known in the art, including, but not limited to, direct needle injection at the delivery site, intravenous injection, topical administration, catheter infusion, biolistic injectors, particle accelerators, gelfoam sponge depots, other commercially available depot materials, osmotic pumps, oral or suppositorial solid pharmaceutical formulations, decanting or topical applications during surgery, aerosol delivery. Such methods are known in the art. Polypeptides may be administered as part of a Therapeutic, described in more detail below. Methods of delivering polynucleotides are described in more detail herein.

Respiratory Disorders

[0680] Polynucleotides or polypeptides, or agonists or antagonists of the present invention may be used to detect, prevent, diagnose, prognosticate, treat, and/or ameliorate diseases and/or disorders of the respiratory system.

[0681] Diseases and disorders of the respiratory system include, but are not limited to, nasal vestibulitis, nonallergic rhinitis (e.g., acute rhinitis, chronic rhinitis, atrophic rhinitis, vasomotor rhinitis), nasal polyps, and sinusitis, juvenile angiofibromas, cancer of the nose and juvenile papillomas, vocal cord polyps, nodules (singer's nodules), contact ulcers, vocal cord paralysis, laryngoceles, pharyngitis (e.g., viral and bacterial), tonsillitis, tonsillar cellulitis, parapharyngeal abscess, laryngitis, laryngoceles, and throat cancers (e.g., cancer of the nasopharynx, tonsil cancer, larynx cancer), lung cancer (e.g., squamous cell carcinoma, small cell (oat cell) carcinoma, large cell carcinoma, and adenocarcinoma), allergic disorders (eosinophilic pneumonia, hypersensitivity pneumonitis (e.g., extrinsic allergic alveolitis, allergic interstitial pneumonitis, organic dust pneumoconiosis, allergic bronchopulmonary aspergillosis, asthma, Wegener's granulomatosis (granulomatous vasculitis), Goodpasture's syndrome)), pneumonia (e.g., bacterial pneumonia (e.g., Streptococcus pneumoniae (pneumoncoccal pneumonia), Staphylococcus aureus (staphylococcal pneumonia), Gram-negative bacterial pneumonia (caused by, e.g., Klebsiella and Pseudomas spp.), Mycoplasma pneumoniae pneumonia, Hemophilus influenzae pneumonia, Legionella pneumophila (Legionnaires' disease), and Chlamydia psittaci (Psittacosis)), and viral pneumonia (e.g., influenza, chickenpox (varicella).

[0682] Additional diseases and disorders of the respiratory system include, but are not limited to bronchiolitis, polio (poliomyelitis), croup, respiratory syncytial viral infection, mumps, erythema infectiosum (fifth disease), roseola infantum, progressive rubella panencephalitis, german measles, and subacute sclerosing panencephalitis), fungal pneumonia (e.g., Histoplasmosis, Coccidioidomycosis, Blastomycosis, fungal infections in people with severely suppressed immune systems (e.g., cryptococcosis, caused by Cryptococcus neoformans; aspergillosis, caused by Aspergillus spp.; candidiasis, caused by Candida; and mucormycosis)), Pneumocystis carinii (pneumocystis pneumonia), atypical pneumonias (e.g., Mycoplasma and Chlamydia spp.), opportunistic infection pneumonia, nosocomial pneumonia, chemical pneumonitis, and aspiration pneumonia, pleural disorders (e.g., pleurisy, pleural effusion, and pneumothorax (e.g., simple spontaneous pneumothorax, complicated spontaneous pneumothorax, tension pneumothorax)), obstructive airway diseases (e.g., asthma, chronic obstructive pulmonary disease (COPD), emphysema, chronic or acute bronchitis), occupational lung diseases (e.g., silicosis, black lung (coal workers' pneumoconiosis), asbestosis, berylliosis, occupational asthsma, byssinosis, and benign pneumoconioses), Infiltrative Lung Disease (e.g., pulmonary fibrosis (e.g., fibrosing alveolitis, usual interstitial pneumonia), idiopathic pulmonary fibrosis, desquamative interstitial pneumonia, lymphoid interstitial pneumonia, histiocytosis X (e.g., Letterer-Siwe disease, Hand-Schuller-Christian disease, eosinophilic granuloma), idiopathic pulmonary hemosiderosis, sarcoidosis and pulmonary alveolar proteinosis), Acute respiratory distress syndrome (also called, e.g., adult respiratory distress syndrome), edema, pulmonary embolism, bronchitis (e.g., viral, bacterial), bronchiectasis, atelectasis, lung abscess (caused by, e.g., Staphylococcus aureus or Legionella pneumophila), and cystic fibrosis.

Anti-Angiogenesis Activity

[0683] The naturally occurring balance between endogenous stimulators and inhibitors of angiogenesis is one in which inhibitory influences predominate. Rastinejad et al., Cell 56:345-355 (1989). In those rare instances in which neovascularization occurs under normal physiological conditions, such as wound healing, organ regeneration, embryonic development, and female reproductive processes, angiogenesis is stringently regulated and spatially and temporally delimited. Under conditions of pathological angiogenesis such as that characterizing solid tumor growth, these regulatory controls fail. Unregulated angiogenesis becomes pathologic and sustains progression of many neoplastic and non-neoplastic diseases. A number of serious diseases are dominated by abnormal neovascularization including solid tumor growth and metastases, arthritis, some types of eye disorders, and psoriasis. See, e.g., reviews by Moses et al., Biotech. 9:630-634 (1991); Folkman et al., N. Engl. J. Med., 333:1757-1763 (1995); Auerbach et al., J. Microvasc. Res. 29:401-411 (1985); Folkman, Advances in Cancer Research, eds. Klein and Weinhouse, Academic Press, New York, pp. 175-203 (1985); Patz, Am. J. Opthalmol. 94:715-743 (1982); and Folkman et al., Science 221:719-725 (1983). In a number of pathological conditions, the process of angiogenesis contributes to the disease state. For example, significant data have accumulated which suggest that the growth of solid tumors is dependent on angiogenesis. Folkman and Klagsbrun, Science 235:442-447 (1987).

[0684] The present invention provides for treatment of diseases or disorders associated with neovascularization by administration of the polynucleotides and/or polypeptides of the invention, as well as agonists or antagonists of the present invention. Malignant and metastatic conditions which can be treated with the polynucleotides and polypeptides, or agonists or antagonists of the invention include, but are not limited to, malignancies, solid tumors, and cancers described herein and otherwise known in the art (for a review of such disorders, see Fishman et al., Medicine, 2d Ed., J. B. Lippincott Co., Philadelphia (1985)). Thus, the present invention provides a method of treating an angiogenesis-related disease and/or disorder, comprising administering to an individual in need thereof a therapeutically effective amount of a polynucleotide, polypeptide, antagonist and/or agonist of the invention. For example, polynucleotides, polypeptides, antagonists and/or agonists may be utilized in a variety of additional methods in order to therapeutically treat a cancer or tumor. Cancers which may be treated with polynucleotides, polypeptides, antagonists and/or agonists include, but are not limited to solid tumors, including prostate, lung, breast, ovarian, stomach, pancreas, larynx, esophagus, testes, liver, parotid, biliary tract, colon, rectum, cervix, uterus, endometrium, kidney, bladder, thyroid cancer; primary tumors and metastases; melanomas; glioblastoma; Kaposi's sarcoma; leiomyosarcoma; non-small cell lung cancer; colorectal cancer; advanced malignancies; and blood born tumors such as leukemias. For example, polynucleotides, polypeptides, antagonists and/or agonists may be delivered topically, in order to treat cancers such as skin cancer, head and neck tumors, breast tumors, and Kaposi's sarcoma.

[0685] Within yet other aspects, polynucleotides, polypeptides, antagonists and/or agonists may be utilized to treat superficial forms of bladder cancer by, for example, intravesical administration. Polynucleotides, polypeptides, antagonists and/or agonists may be delivered directly into the tumor, or near the tumor site, via injection or a catheter. Of course, as the artisan of ordinary skill will appreciate, the appropriate mode of administration will vary according to the cancer to be treated. Other modes of delivery are discussed herein.

[0686] Polynucleotides, polypeptides, antagonists and/or agonists may be useful in treating other disorders, besides cancers, which involve angiogenesis. These disorders include, but are not limited to: benign tumors, for example hemangiomas, acoustic neuromas, neurofibromas, trachomas, and pyogenic granulomas; artheroscleric plaques; ocular angiogenic diseases, for example, diabetic retinopathy, retinopathy of prematurity, macular degeneration, corneal graft rejection, neovascular glaucoma, retrolental fibroplasia, rubeosis, retinoblastoma, uvietis and Pterygia (abnormal blood vessel growth) of the eye; rheumatoid arthritis; psoriasis; delayed wound healing; endometriosis; vasculogenesis; granulations; hypertrophic scars (keloids); nonunion fractures; scleroderma; trachoma; vascular adhesions; myocardial angiogenesis; coronary collaterals; cerebral collaterals; arteriovenous malformations; ischemic limb angiogenesis; Osler-Webber Syndrome; plaque neovascularization; telangiectasia; hemophiliac joints; angiofibroma; fibromuscular dysplasia; wound granulation; Crohn's disease; and atherosclerosis.

[0687] For example, within one aspect of the present invention methods are provided for treating hypertrophic scars and keloids, comprising the step of administering a polynucleotide, polypeptide, antagonist and/or agonist of the invention to a hypertrophic scar or keloid.

[0688] Within one embodiment of the present invention polynucleotides, polypeptides, antagonists and/or agonists of the invention are directly injected into a hypertrophic scar or keloid, in order to prevent the progression of these lesions. This therapy is of particular value in the prophylactic treatment of conditions which are known to result in the development of hypertrophic scars and keloids (e.g., burns), and is preferably initiated after the proliferative phase has had time to progress (approximately 14 days after the initial injury), but before hypertrophic scar or keloid development. As noted above, the present invention also provides methods for treating neovascular diseases of the eye, including for example, corneal neovascularization, neovascular glaucoma, proliferative diabetic retinopathy, retrolental fibroplasia and macular degeneration.

[0689] Moreover, Ocular disorders associated with neovascularization which can be treated with the polynucleotides and polypeptides of the present invention (including agonists and/or antagonists) include, but are not limited to: neovascular glaucoma, diabetic retinopathy, retinoblastoma, retrolental fibroplasia, uveitis, retinopathy of prematurity macular degeneration, corneal graft neovascularization, as well as other eye inflammatory diseases, ocular tumors and diseases associated with choroidal or iris neovascularization. See, e.g., reviews by Waltman et al., Am. J. OphthaL 85:704-710 (1978) and Gartner et al., Surv. Ophthal. 22:291-312 (1978).

[0690] Thus, within one aspect of the present invention methods are provided for treating neovascular diseases of the eye such as corneal neovascularization (including corneal graft neovascularization), comprising the step of administering to a patient a therapeutically effective amount of a compound (as described above) to the cornea, such that the formation of blood vessels is inhibited. Briefly, the cornea is a tissue that normally lacks blood vessels. In certain pathological conditions however, capillaries may extend into the cornea from the pericorneal vascular plexus of the limbus. When the cornea becomes vascularized, it also becomes clouded, resulting in a decline in the patient's visual acuity. Visual loss may become complete if the cornea completely opacitates. A wide variety of disorders can result in corneal neovascularization, including for example, corneal infections (e.g., trachoma, herpes simplex keratitis, leishmaniasis and onchocerciasis), immunological processes (e.g., graft rejection and Stevens-Johnson's syndrome), alkali burns, trauma, inflammation (of any cause), toxic and nutritional deficiency states, and as a complication of wearing contact lenses.

[0691] Within particularly preferred embodiments of the invention, may be prepared for topical administration in saline (combined with any of the preservatives and antimicrobial agents commonly used in ocular preparations), and administered in eyedrop form. The solution or suspension may be prepared in its pure form and administered several times daily. Alternatively, anti-angiogenic compositions, prepared as described above, may also be administered directly to the cornea. Within preferred embodiments, the anti-angiogenic composition is prepared with a muco-adhesive polymer that binds to cornea. Within further embodiments, the anti-angiogenic factors or anti-angiogenic compositions may be utilized as an adjunct to conventional steroid therapy. Topical therapy may also be useful prophylactically in corneal lesions which are known to have a high probability of inducing an angiogenic response (such as chemical burns). In these instances the treatment, likely in combination with steroids, may be instituted immediately to help prevent subsequent complications.

[0692] Within other embodiments, the compounds described above may be injected directly into the corneal stroma by an ophthalmologist under microscopic guidance. The preferred site of injection may vary with the morphology of the individual lesion, but the goal of the administration would be to place the composition at the advancing front of the vasculature (i.e., interspersed between the blood vessels and the normal cornea). In most cases this would involve perilimbic corneal injection to “protect” the cornea from the advancing blood vessels. This method may also be utilized shortly after a corneal insult in order to prophylactically prevent corneal neovascularization. In this situation the material could be injected in the perilimbic cornea interspersed between the corneal lesion and its undesired potential limbic blood supply. Such methods may also be utilized in a similar fashion to prevent capillary invasion of transplanted corneas. In a sustained-release form injections might only be required 2-3 times per year. A steroid could also be added to the injection solution to reduce inflammation resulting from the injection itself.

[0693] Within another aspect of the present invention, methods are provided for treating neovascular glaucoma, comprising the step of administering to a patient a therapeutically effective amount of a polynucleotide, polypeptide, antagonist and/or agonist to the eye, such that the formation of blood vessels is inhibited. In one embodiment, the compound may be administered topically to the eye in order to treat early forms of neovascular glaucoma. Within other embodiments, the compound may be implanted by injection into the region of the anterior chamber angle. Within other embodiments, the compound may also be placed in any location such that the compound is continuously released into the aqueous humor. Within another aspect of the present invention, methods are provided for treating proliferative diabetic retinopathy, comprising the step of administering to a patient a therapeutically effective amount of a polynucleotide, polypeptide, antagonist and/or agonist to the eyes, such that the formation of blood vessels is inhibited.

[0694] Within particularly preferred embodiments of the invention, proliferative diabetic retinopathy may be treated by injection into the aqueous humor or the vitreous, in order to increase the local concentration of the polynucleotide, polypeptide, antagonist and/or agonist in the retina. Preferably, this treatment should be initiated prior to the acquisition of severe disease requiring photocoagulation.

[0695] Within another aspect of the present invention, methods are provided for treating retrolental fibroplasia, comprising the step of administering to a patient a therapeutically effective amount of a polynucleotide, polypeptide, antagonist and/or agonist to the eye, such that the formation of blood vessels is inhibited. The compound may be administered topically, via intravitreous injection and/or via intraocular implants.

[0696] Additionally, disorders which can be treated with the polynucleotides, polypeptides, agonists and/or agonists include, but are not limited to, hemangioma, arthritis, psoriasis, angiofibroma, atherosclerotic plaques, delayed wound healing, granulations, hemophilic joints, hypertrophic scars, nonunion fractures, Osler-Weber syndrome, pyogenic granuloma, scleroderma, trachoma, and vascular adhesions.

[0697] Moreover, disorders and/or states, which can be detected, prevented, diagnosed, prognosticated, treated, and/or ameliorated with the the polynucleotides, polypeptides, agonists and/or agonists of the invention include, but are not limited to, solid tumors, blood born tumors such as leukemias, tumor metastasis, Kaposi's sarcoma, benign tumors, for example hemangiomas, acoustic neuromas, neurofibromas, trachomas, and pyogenic granulomas, rheumatoid arthritis, psoriasis, ocular angiogenic diseases, for example, diabetic retinopathy, retinopathy of prematurity, macular degeneration, corneal graft rejection, neovascular glaucoma, retrolental fibroplasia, rubeosis, retinoblastoma, and uvietis, delayed wound healing, endometriosis, vascluogenesis, granulations, hypertrophic scars (keloids), nonunion fractures, scleroderma, trachoma, vascular adhesions, myocardial angiogenesis, coronary collaterals, cerebral collaterals, arteriovenous malformations, ischemic limb angiogenesis, Osler-Webber Syndrome, plaque neovascularization, telangiectasia, hemophiliac joints, angiofibroma fibromuscular dysplasia, wound granulation, Crohn's disease, atherosclerosis, birth control agent by preventing vascularization required for embryo implantation controlling menstruation, diseases that have angiogenesis as a pathologic consequence such as cat scratch disease (Rochele minalia quintosa), ulcers (Helicobacter pylori), Bartonellosis and bacillary angiomatosis.

[0698] In one aspect of the birth control method, an amount of the compound sufficient to block embryo implantation is administered before or after intercourse and fertilization have occurred, thus providing an effective method of birth control, possibly a “morning after” method. Polynucleotides, polypeptides, agonists and/or agonists may also be used in controlling menstruation or administered as either a peritoneal lavage fluid or for peritoneal implantation in the treatment of endometriosis.

[0699] Polynucleotides, polypeptides, agonists and/or agonists of the present invention may be incorporated into surgical sutures in order to prevent stitch granulomas.

[0700] Polynucleotides, polypeptides, agonists and/or agonists may be utilized in a wide variety of surgical procedures. For example, within one aspect of the present invention a compositions (in the form of, for example, a spray or film) may be utilized to coat or spray an area prior to removal of a tumor, in order to isolate normal surrounding tissues from malignant tissue, and/or to prevent the spread of disease to surrounding tissues. Within other aspects of the present invention, compositions (e.g., in the form of a spray) may be delivered via endoscopic procedures in order to coat tumors, or inhibit angiogenesis in a desired locale. Within yet other aspects of the present invention, surgical meshes which have been coated with anti-angiogenic compositions of the present invention may be utilized in any procedure wherein a surgical mesh might be utilized. For example, within one embodiment of the invention a surgical mesh laden with an anti-angiogenic composition may be utilized during abdominal cancer resection surgery (e.g., subsequent to colon resection) in order to provide support to the structure, and to release an amount of the anti-angiogenic factor.

[0701] Within further aspects of the present invention, methods are provided for treating tumor excision sites, comprising administering a polynucleotide, polypeptide, agonist and/or agonist to the resection margins of a tumor subsequent to excision, such that the local recurrence of cancer and the formation of new blood vessels at the site is inhibited. Within one embodiment of the invention, the anti-angiogenic compound is administered directly to the tumor excision site (e.g., applied by swabbing, brushing or otherwise coating the resection margins of the tumor with the anti-angiogenic compound). Alternatively, the anti-angiogenic compounds may be incorporated into known surgical pastes prior to administration. Within particularly preferred embodiments of the invention, the anti-angiogenic compounds are applied after hepatic resections for malignancy, and after neurosurgical operations.

[0702] Within one aspect of the present invention, polynucleotides, polypeptides, agonists and/or agonists may be administered to the resection margin of a wide variety of tumors, including for example, breast, colon, brain and hepatic tumors. For example, within one embodiment of the invention, anti-angiogenic compounds may be administered to the site of a neurological tumor subsequent to excision, such that the formation of new blood vessels at the site are inhibited.

[0703] The polynucleotides, polypeptides, agonists and/or agonists of the present invention may also be administered along with other anti-angiogenic factors. Representative examples of other anti-angiogenic factors include: Anti-Invasive Factor, retinoic acid and derivatives thereof, paclitaxel, Suramin, Tissue Inhibitor of Metalloproteinase-1, Tissue Inhibitor of Metalloproteinase-2, Plasminogen Activator Inhibitor-1, Plasminogen Activator Inhibitor-2, and various forms of the lighter “d group” transition metals.

[0704] Lighter “d group” transition metals include, for example, vanadium, molybdenum, tungsten, titanium, niobium, and tantalum species. Such transition metal species may form transition metal complexes. Suitable complexes of the above-mentioned transition metal species include oxo transition metal complexes.

[0705] Representative examples of vanadium complexes include oxo vanadium complexes such as vanadate and vanadyl complexes. Suitable vanadate complexes include metavanadate and orthovanadate complexes such as, for example, ammonium metavanadate, sodium metavanadate, and sodium orthovanadate. Suitable vanadyl complexes include, for example, vanadyl acetylacetonate and vanadyl sulfate including vanadyl sulfate hydrates such as vanadyl sulfate mono- and trihydrates.

[0706] Representative examples of tungsten and molybdenum complexes also include oxo complexes. Suitable oxo tungsten complexes include tungstate and tungsten oxide complexes. Suitable tungstate complexes include ammonium tungstate, calcium tungstate, sodium tungstate dihydrate, and tungstic acid. Suitable tungsten oxides include tungsten (IV) oxide and tungsten (VI) oxide. Suitable oxo molybdenum complexes include molybdate, molybdenum oxide, and molybdenyl complexes. Suitable molybdate complexes include ammonium molybdate and its hydrates, sodium molybdate and its hydrates, and potassium molybdate and its hydrates. Suitable molybdenum oxides include molybdenum (VI) oxide, molybdenum (VI) oxide, and molybdic acid. Suitable molybdenyl complexes include, for example, molybdenyl acetylacetonate. Other suitable tungsten and molybdenum complexes include hydroxo derivatives derived from, for example, glycerol, tartaric acid, and sugars.

[0707] A wide variety of other anti-angiogenic factors may also be utilized within the context of the present invention. Representative examples include platelet factor 4; protamine sulphate; sulphated chitin derivatives (prepared from queen crab shells), (Murata et al., Cancer Res. 51:22-26, 1991); Sulphated Polysaccharide Peptidoglycan Complex (SP-PG) (the function of this compound may be enhanced by the presence of steroids such as estrogen, and tamoxifen citrate); Staurosporine; modulators of matrix metabolism, including for example, proline analogs, cishydroxyproline, d,L-3,4-dehydroproline, Thiaproline, alpha,alpha-dipyridyl, aminopropionitrile fumarate; 4-propyl-5-(4-pyridinyl)-2(3H)-oxazolone; Methotrexate; Mitoxantrone; Heparin; Interferons; 2 Macroglobulin-serum; ChIMP-3 (Pavloff et al., J. Bio. Chem. 267:17321-17326, 1992); Chymostatin (Tomkinson et al., Biochem J. 286:475-480, 1992); Cyclodextrin Tetradecasulfate; Eponemycin; Camptothecin; Fumagillin (Ingber et al., Nature 348:555-557, 1990); Gold Sodium Thiomalate (“GST”; Matsubara and Ziff, J. Clin. Invest. 79:1440-1446, 1987); anticollagenase-serum; alpha2-antiplasmin (Holmes et al., J. Biol. Chem. 262(4):1659-1664, 1987); Bisantrene (National Cancer Institute); Lobenzarit disodium (N-(2)-carboxyphenyl-4-chloroanthronilic acid disodium or “CCA”; Takeuchi et al., Agents Actions 36:312-316, 1992); Thalidomide; Angostatic steroid; AGM-1470; carboxynaminolmidazole; and metalloproteinase inhibitors such as BB94.

Diseases at the Cellular Level

[0708] Diseases associated with increased cell survival or the inhibition of apoptosis that could be detected, prevented, diagnosed, prognosticated, treated, and/or ameliorated using polynucleotides or polypeptides, as well as antagonists or agonists of the present invention, include cancers (such as follicular lymphomas, carcinomas with p53 mutations, and hormone-dependent tumors, including, but not limited to colon cancer, cardiac tumors, pancreatic cancer, melanoma, retinoblastoma, glioblastoma, lung cancer, intestinal cancer, testicular cancer, stomach cancer, neuroblastoma, myxoma, myoma, lymphoma, endothelioma, osteoblastoma, osteoclastoma, osteosarcoma, chondrosarcoma, adenoma, breast cancer, prostate cancer, Kaposi's sarcoma and ovarian cancer); autoimmune disorders (such as, multiple sclerosis, Sjogren's syndrome, Hashimoto's thyroiditis, biliary cirrhosis, Behcet's disease, Crohn's disease, polymyositis, systemic lupus erythematosus and immune-related glomerulonephritis and rheumatoid arthritis) and viral infections (such as herpes viruses, pox viruses and adenoviruses), inflammation, graft v. host disease, acute graft rejection, and chronic graft rejection.

[0709] In preferred embodiments, polynucleotides, polypeptides, and/or antagonists of the invention are used to inhibit growth, progression, and/or metasis of cancers, in particular those listed above.

[0710] Additional diseases or conditions associated with increased cell survival that could be treated or detected by polynucleotides or polypeptides, or agonists or antagonists of the present invention include, but are not limited to, progression, and/or metastases of malignancies and related disorders such as leukemia (including acute leukemias (e.g., acute lymphocytic leukemia, acute myelocytic leukemia (including myeloblastic, promyelocytic, myelomonocytic, monocytic, and erythroleukemia)) and chronic leukemias (e.g., chronic myelocytic (granulocytic) leukemia and chronic lymphocytic leukemia)), polycythemia vera, lymphomas (e.g., Hodgkin's disease and non-Hodgkin's disease), multiple myeloma, Waldenstrom's macroglobulinemia, heavy chain disease, and solid tumors including, but not limited to, sarcomas and carcinomas such as fibrosarcoma, myxosarcoma, liposarcoma, chondrosarcoma, osteogenic sarcoma, chordoma, angiosarcoma, endotheliosarcoma, lymphangiosarcoma, lymphangioendotheliosarcoma, synovioma, mesothelioma, Ewing's tumor, leiomyosarcoma, rhabdomyosarcoma, colon carcinoma, pancreatic cancer, breast cancer, ovarian cancer, prostate cancer, squamous cell carcinoma, basal cell carcinoma, adenocarcinoma, sweat gland carcinoma, sebaceous gland carcinoma, papillary carcinoma, papillary adenocarcinomas, cystadenocarcinoma, medullary carcinoma, bronchogenic carcinoma, renal cell carcinoma, hepatoma, bile duct carcinoma, choriocarcinoma, seminoma, embryonal carcinoma, Wilm's tumor, cervical cancer, testicular tumor, lung carcinoma, small cell lung carcinoma, bladder carcinoma, epithelial carcinoma, glioma, astrocytoma, medulloblastoma, craniopharyngioma, ependymoma, pinealoma, hemangioblastoma, acoustic neuroma, oligodendroglioma, menangioma, melanoma, neuroblastoma, and retinoblastoma.

[0711] Diseases associated with increased apoptosis that could be detected, prevented, diagnosed, prognosticated, treated, and/or ameliorated using polynucleotides or polypeptides, as well as agonists or antagonists of the present invention, include, but are not limited to, AIDS; neurodegenerative disorders (such as Alzheimer's disease, Parkinson's disease, Amyotrophic lateral sclerosis, Retinitis pigmentosa, Cerebellar degeneration and brain tumor or prior associated disease); autoimmune disorders (such as, multiple sclerosis, Sjogren's syndrome, Hashimoto's thyroiditis, biliary cirrhosis, Behcet's disease, Crohn's disease, polymyositis, systemic lupus erythematosus and immune-related glomerulonephritis and rheumatoid arthritis) myelodysplastic syndromes (such as aplastic anemia), graft v. host disease, ischemic injury (such as that caused by myocardial infarction, stroke and reperfusion injury), liver injury (e.g., hepatitis related liver injury, ischemia/reperfusion injury, cholestosis (bile duct injury) and liver cancer); toxin-induced liver disease (such as that caused by alcohol), septic shock, cachexia and anorexia.

Wound Healing and Epithelial Cell Proliferation

[0712] In accordance with yet a further aspect of the present invention, there is provided a process for utilizing polynucleotides or polypeptides, as well as agonists or antagonists of the present invention, for therapeutic purposes, for example, to stimulate epithelial cell proliferation and basal keratinocytes for the purpose of wound healing, and to stimulate hair follicle production and healing of dermal wounds. Polynucleotides or polypeptides, as well as agonists or antagonists of the present invention, may be clinically useful in stimulating wound healing including surgical wounds, excisional wounds, deep wounds involving damage of the dermis and epidermis, eye tissue wounds, dental tissue wounds, oral cavity wounds, diabetic ulcers, dermal ulcers, cubitus ulcers, arterial ulcers, venous stasis ulcers, burns resulting from heat exposure or chemicals, and other abnormal wound healing conditions such as uremia, malnutrition, vitamin deficiencies and complications associated with systemic treatment with steroids, radiation therapy and antineoplastic drugs and antimetabolites. Polynucleotides or polypeptides, as well as agonists or antagonists of the present invention, could be used to promote dermal reestablishment subsequent to dermal loss

[0713] Polynucleotides or polypeptides, as well as agonists or antagonists of the present invention, could be used to increase the adherence of skin grafts to a wound bed and to stimulate re-epithelialization from the wound bed. The following are types of grafts that polynucleotides or polypeptides, agonists or antagonists of the present invention, could be used to increase adherence to a wound bed: autografts, artificial skin, allografts, autodermic graft, autoepdermic grafts, avacular grafts, Blair-Brown grafts, bone graft, brephoplastic grafts, cutis graft, delayed graft, dermic graft, epidermic graft, fascia graft, full thickness graft, heterologous graft, xenograft, homologous graft, hyperplastic graft, lamellar graft, mesh graft, mucosal graft, Ollier-Thiersch graft, omenpal graft, patch graft, pedicle graft, penetrating graft, split skin graft, thick split graft. Polynucleotides or polypeptides, as well as agonists or antagonists of the present invention, can be used to promote skin strength and to improve the appearance of aged skin.

[0714] It is believed that polynucleotides or polypeptides, as well as agonists or antagonists of the present invention, will also produce changes in hepatocyte proliferation, and epithelial cell proliferation in the lung, breast, pancreas, stomach, small intestine, and large intestine. Polynucleotides or polypeptides, as well as agonists or antagonists of the present invention, could promote proliferation of epithelial cells such as sebocytes, hair follicles, hepatocytes, type II pneumocytes, mucin-producing goblet cells, and other epithelial cells and their progenitors contained within the skin, lung, liver, and gastrointestinal tract. Polynucleotides or polypeptides, agonists or antagonists of the present invention, may promote proliferation of endothelial cells, keratinocytes, and basal keratinocytes.

[0715] Polynucleotides or polypeptides, as well as agonists or antagonists of the present invention, could also be used to reduce the side effects of gut toxicity that result from radiation, chemotherapy treatments or viral infections. Polynucleotides or polypeptides, as well as agonists or antagonists of the present invention, may have a cytoprotective effect on the small intestine mucosa. Polynucleotides or polypeptides, as well as agonists or antagonists of the present invention, may also stimulate healing of mucositis (mouth ulcers) that result from chemotherapy and viral infections.

[0716] Polynucleotides or polypeptides, as well as agonists or antagonists of the present invention, could further be used in full regeneration of skin in full and partial thickness skin defects, including burns, (i.e., repopulation of hair follicles, sweat glands, and sebaceous glands), treatment of other skin defects such as psoriasis. Polynucleotides or polypeptides, as well as agonists or antagonists of the present invention, could be used to treat epidermolysis bullosa, a defect in adherence of the epidermis to the underlying dermis which results in frequent, open and painful blisters by accelerating reepithelialization of these lesions. Polynucleotides or polypeptides, as well as agonists or antagonists of the present invention, could also be used to treat gastric and doudenal ulcers and help heal by scar formation of the mucosal lining and regeneration of glandular mucosa and duodenal mucosal lining more rapidly. Inflammatory bowel diseases, such as Crohn's disease and ulcerative colitis, are diseases which result in destruction of the mucosal surface of the small or large intestine, respectively. Thus, polynucleotides or polypeptides, as well as agonists or antagonists of the present invention, could be used to promote the resurfacing of the mucosal surface to aid more rapid healing and to prevent progression of inflammatory bowel disease. Treatment with polynucleotides or polypeptides, agonists or antagonists of the present invention, is expected to have a significant effect on the production of mucus throughout the gastrointestinal tract and could be used to protect the intestinal mucosa from injurious substances that are ingested or following surgery. Polynucleotides or polypeptides, as well as agonists or antagonists of the present invention, could be used to treat diseases associate with the under expression.

[0717] Moreover, polynucleotides or polypeptides, as well as agonists or antagonists of the present invention, could be used to prevent and heal damage to the lungs due to various pathological states. Polynucleotides or polypeptides, as well as agonists or antagonists of the present invention, which could stimulate proliferation and differentiation and promote the repair of alveoli and brochiolar epithelium to prevent or treat acute or chronic lung damage. For example, emphysema, which results in the progressive loss of aveoli, and inhalation injuries, i.e., resulting from smoke inhalation and burns, that cause necrosis of the bronchiolar epithelium and alveoli could be effectively treated using polynucleotides or polypeptides, agonists or antagonists of the present invention. Also, polynucleotides or polypeptides, as well as agonists or antagonists of the present invention, could be used to stimulate the proliferation of and differentiation of type II pneumocytes, which may help treat or prevent disease such as hyaline membrane diseases, such as infant respiratory distress syndrome and bronchopulmonary displasia, in premature infants.

[0718] Polynucleotides or polypeptides, as well as agonists or antagonists of the present invention, could stimulate the proliferation and differentiation of hepatocytes and, thus, could be used to alleviate or treat liver diseases and pathologies such as fulminant liver failure caused by cirrhosis, liver damage caused by viral hepatitis and toxic substances (i.e., acetaminophen, carbon tetraholoride and other hepatotoxins known in the art).

[0719] In addition, polynucleotides or polypeptides, as well as agonists or antagonists of the present invention, could be used treat or prevent the onset of diabetes mellitus. In patients with newly diagnosed Types I and II diabetes, where some islet cell function remains, polynucleotides or polypeptides, as well as agonists or antagonists of the present invention, could be used to maintain the islet function so as to alleviate, delay or prevent permanent manifestation of the disease. Also, polynucleotides or polypeptides, as well as agonists or antagonists of the present invention, could be used as an auxiliary in islet cell transplantation to improve or promote islet cell function.

Neural Activity and Neurological Diseases

[0720] The polynucleotides, polypeptides and agonists or antagonists of the invention may be used for the detection, prevention, diagnosis, prognostication, treatment, and/or amelioration of diseases, disorders, damage or injury of the brain and/or nervous system. Nervous system disorders that can be treated with the compositions of the invention (e.g., polypeptides, polynucleotides, and/or agonists or antagonists), include, but are not limited to, nervous system injuries, and diseases or disorders which result in either a disconnection of axons, a diminution or degeneration of neurons, or demyelination. Nervous system lesions which may be treated in a patient (including human and non-human mammalian patients) according to the methods of the invention, include but are not limited to, the following lesions of either the central (including spinal cord, brain) or peripheral nervous systems: (1) ischemic lesions, in which a lack of oxygen in a portion of the nervous system results in neuronal injury or death, including cerebral infarction or ischemia, or spinal cord infarction or ischemia; (2) traumatic lesions, including lesions caused by physical injury or associated with surgery, for example, lesions which sever a portion of the nervous system, or compression injuries; (3) malignant lesions, in which a portion of the nervous system is destroyed or injured by malignant tissue which is either a nervous system associated malignancy or a malignancy derived from non-nervous system tissue; (4) infectious lesions, in which a portion of the nervous system is destroyed or injured as a result of infection, for example, by an abscess or associated with infection by human immunodeficiency virus, herpes zoster, or herpes simplex virus or with Lyme disease, tuberculosis, or syphilis; (5) degenerative lesions, in which a portion of the nervous system is destroyed or injured as a result of a degenerative process including but not limited to, degeneration associated with Parkinson's disease, Alzheimer's disease, Huntington's chorea, or amyotrophic lateral sclerosis (ALS); (6) lesions associated with nutritional diseases or disorders, in which a portion of the nervous system is destroyed or injured by a nutritional disorder or disorder of metabolism including, but not limited to, vitamin B12 deficiency, folic acid deficiency, Wemicke disease, tobacco-alcohol amblyopia, Marchiafava-Bignami disease (primary degeneration of the corpus callosum), and alcoholic cerebellar degeneration; (7) neurological lesions associated with systemic diseases including, but not limited to, diabetes (diabetic neuropathy, Bell's palsy), systemic lupus erythematosus, carcinoma, or sarcoidosis; (8) lesions caused by toxic substances including alcohol, lead, or particular neurotoxins; and (9) demyelinated lesions in which a portion of the nervous system is destroyed or injured by a demyelinating disease including, but not limited to, multiple sclerosis, human immunodeficiency virus-associated myelopathy, transverse myelopathy or various etiologies, progressive multifocal leukoencephalopathy, and central pontine myelinolysis.

[0721] In one embodiment, the polypeptides, polynucleotides, or agonists or antagonists of the invention are used to protect neural cells from the damaging effects of hypoxia. In a further preferred embodiment, the polypeptides, polynucleotides, or agonists or antagonists of the invention are used to protect neural cells from the damaging effects of cerebral hypoxia. According to this embodiment, the compositions of the invention are used to treat or prevent neural cell injury associated with cerebral hypoxia. In one non-exclusive aspect of this embodiment, the polypeptides, polynucleotides, or agonists or antagonists of the invention, are used to treat or prevent neural cell injury associated with cerebral ischemia. In another non-exclusive aspect of this embodiment, the polypeptides, polynucleotides, or agonists or antagonists of the invention are used to treat or prevent neural cell injury associated with cerebral infarction.

[0722] In another preferred embodiment, the polypeptides, polynucleotides, or agonists or antagonists of the invention are used to treat or prevent neural cell injury associated with a stroke. In a specific embodiment, the polypeptides, polynucleotides, or agonists or antagonists of the invention are used to treat or prevent cerebral neural cell injury associated with a stroke.

[0723] In another preferred embodiment, the polypeptides, polynucleotides, or agonists or antagonists of the invention are used to treat or prevent neural cell injury associated with a heart attack. In a specific embodiment, the polypeptides, polynucleotides, or agonists or antagonists of the invention are used to treat or prevent cerebral neural cell injury associated with a heart attack.

[0724] The compositions of the invention which are useful for treating or preventing a nervous system disorder may be selected by testing for biological activity in promoting the survival or differentiation of neurons. For example, and not by way of limitation, compositions of the invention which elicit any of the following effects may be useful according to the invention: (1) increased survival time of neurons in culture either in the presence or absence of hypoxia or hypoxic conditions; (2) increased sprouting of neurons in culture or in vivo; (3) increased production of a neuron-associated molecule in culture or in vivo, e.g., choline acetyltransferase or acetylcholinesterase with respect to motor neurons; or (4) decreased symptoms of neuron dysfunction in vivo. Such effects may be measured by any method known in the art. In preferred, non-limiting embodiments, increased survival of neurons may routinely be measured using a method set forth herein or otherwise known in the art, such as, for example, in Zhang et al., Proc Natl Acad Sci USA 97:3637-42 (2000) or in Arakawa et al., J. Neurosci., 10:3507-15 (1990); increased sprouting of neurons may be detected by methods known in the art, such as, for example, the methods set forth in Pestronk et al., Exp. Neurol., 70:65-82 (1980), or Brown et al., Ann. Rev. Neurosci., 4:17-42 (1981); increased production of neuron-associated molecules may be measured by bioassay, enzymatic assay, antibody binding, Northern blot assay, etc., using techniques known in the art and depending on the molecule to be measured; and motor neuron dysfunction may be measured by assessing the physical manifestation of motor neuron disorder, e.g., weakness, motor neuron conduction velocity, or functional disability.

[0725] In specific embodiments, motor neuron disorders that may be treated according to the invention include, but are not limited to, disorders such as infarction, infection, exposure to toxin, trauma, surgical damage, degenerative disease or malignancy that may affect motor neurons as well as other components of the nervous system, as well as disorders that selectively affect neurons such as amyotrophic lateral sclerosis, and including, but not limited to, progressive spinal muscular atrophy, progressive bulbar palsy, primary lateral sclerosis, infantile and juvenile muscular atrophy, progressive bulbar paralysis of childhood (Fazio-Londe syndrome), poliomyelitis and the post polio syndrome, and Hereditary Motorsensory Neuropathy (Charcot-Marie-Tooth Disease).

[0726] Further, polypeptides or polynucleotides of the invention may play a role in neuronal survival; synapse formation; conductance; neural differentiation, etc. Thus, compositions of the invention (including polynucleotides, polypeptides, and agonists or antagonists) may be used to detect, prevent, diagnose, prognosticate, treat, and/or ameliorate diseases or disorders associated with these roles, including, but not limited to, learning and/or cognition disorders. The compositions of the invention may also be useful in the treatment or prevention of neurodegenerative disease states and/or behavioural disorders. Such neurodegenerative disease states and/or behavioral disorders include, but are not limited to, Alzheimer's Disease, Parkinson's Disease, Huntington's Disease, Tourette Syndrome, schizophrenia, mania, dementia, paranoia, obsessive compulsive disorder, panic disorder, learning disabilities, ALS, psychoses, autism, and altered behaviors, including disorders in feeding, sleep patterns, balance, and perception. In addition, compositions of the invention may also play a role in the treatment, prevention and/or detection of developmental disorders associated with the developing embryo, or sexually-linked disorders.

[0727] Additionally, polypeptides, polynucleotides and/or agonists or antagonists of the invention, may be useful in protecting neural cells from diseases, damage, disorders, or injury, associated with cerebrovascular disorders including, but not limited to, carotid artery diseases (e.g., carotid artery thrombosis, carotid stenosis, or Moyamoya Disease), cerebral amyloid angiopathy, cerebral aneurysm, cerebral anoxia, cerebral arteriosclerosis, cerebral arteriovenous malformations, cerebral artery diseases, cerebral embolism and thrombosis (e.g., carotid artery thrombosis, sinus thrombosis, or Wallenberg's Syndrome), cerebral hemorrhage (e.g., epidural or subdural hematoma, or subarachnoid hemorrhage), cerebral infarction, cerebral ischemia (e.g., transient cerebral ischemia, Subclavian Steal Syndrome, or vertebrobasilar insufficiency), vascular dementia (e.g., multi-infarct), leukomalacia, periventricular, and vascular headache (e.g., cluster headache or migraines).

[0728] In accordance with yet a further aspect of the present invention, there is provided a process for utilizing polynucleotides or polypeptides, as well as agonists or antagonists of the present invention, for therapeutic purposes, for example, to stimulate neurological cell proliferation and/or differentiation. Therefore, polynucleotides, polypeptides, agonists and/or antagonists of the invention may be used to treat and/or detect neurologic diseases. Moreover, polynucleotides or polypeptides, or agonists or antagonists of the invention, can be used as a marker or detector of a particular nervous system disease or disorder.

[0729] Examples of neurologic diseases which can be treated or detected with polynucleotides, polypeptides, agonists, and/or antagonists of the present invention include brain diseases, such as metabolic brain diseases which includes phenylketonuria such as maternal phenylketonuria, pyruvate carboxylase deficiency, pyruvate dehydrogenase complex deficiency, Wernicke's Encephalopathy, brain edema, brain neoplasms such as cerebellar neoplasms which include infratentorial neoplasms, cerebral ventricle neoplasms such as choroid plexus neoplasms, hypothalamic neoplasms, supratentorial neoplasms, canavan disease, cerebellar diseases such as cerebellar ataxia which include spinocerebellar degeneration such as ataxia telangiectasia, cerebellar dyssynergia, Friederich's Ataxia, Machado-Joseph Disease, olivopontocerebellar atrophy, cerebellar neoplasms such as infratentorial neoplasms, diffuse cerebral sclerosis such as encephalitis periaxialis, globoid cell leukodystrophy, metachromatic leukodystrophy and subacute sclerosing panencephalitis.

[0730] Additional neurologic diseases which can be treated or detected with polynucleotides, polypeptides, agonists, and/or antagonists of the present invention include cerebrovascular disorders (such as carotid artery diseases which include carotid artery thrombosis, carotid stenosis and Moyamoya Disease), cerebral amyloid angiopathy, cerebral aneurysm, cerebral anoxia, cerebral arteriosclerosis, cerebral arteriovenous malformations, cerebral artery diseases, cerebral embolism and thrombosis such as carotid artery thrombosis, sinus thrombosis and Wallenberg's Syndrome, cerebral hemorrhage such as epidural hematoma, subdural hematoma and subarachnoid hemorrhage, cerebral infarction, cerebral ischemia such as transient cerebral ischemia, Subclavian Steal Syndrome and vertebrobasilar insufficiency, vascular dementia such as multi-infarct dementia, periventricular leukomalacia, vascular headache such as cluster headache and migraine.

[0731] Additional neurologic diseases which can be treated or detected with polynucleotides, polypeptides, agonists, and/or antagonists of the present invention include dementia such as AIDS Dementia Complex, presenile dementia such as Alzheimer's Disease and Creutzfeldt-Jakob Syndrome, senile dementia such as Alzheimer's Disease and progressive supranuclear palsy, vascular dementia such as multi-infarct dementia, encephalitis which include encephalitis periaxialis, viral encephalitis such as epidemic encephalitis, Japanese Encephalitis, St. Louis Encephalitis, tick-borne encephalitis and West Nile Fever, acute disseminated encephalomyelitis, meningoencephalitis such as uveomeningoencephalitic syndrome, Postencephalitic Parkinson Disease and subacute sclerosing panencephalitis, encephalomalacia such as periventricular leukomalacia, epilepsy such as generalized epilepsy which includes infantile spasms, absence epilepsy, myoclonic epilepsy which includes MERRF Syndrome, tonic-clonic epilepsy, partial epilepsy such as complex partial epilepsy, frontal lobe epilepsy and temporal lobe epilepsy, post-traumatic epilepsy, status epilepticus such as Epilepsia Partialis Continua, and Hallervorden-Spatz Syndrome.

[0732] Additional neurologic diseases which can be treated or detected with polynucleotides, polypeptides, agonists, and/or antagonists of the present invention include hydrocephalus such as Dandy-Walker Syndrome and normal pressure hydrocephalus, hypothalamic diseases such as hypothalamic neoplasms, cerebral malaria, narcolepsy which includes cataplexy, bulbar poliomyelitis, cerebri pseudotumor, Rett Syndrome, Reye's Syndrome, thalamic diseases, cerebral toxoplasmosis, intracranial tuberculoma and Zellweger Syndrome, central nervous system infections such as AIDS Dementia Complex, Brain Abscess, subdural empyema, encephalomyelitis such as Equine Encephalomyelitis, Venezuelan Equine Encephalomyelitis, Necrotizing Hemorrhagic Encephalomyelitis, Visna, and cerebral malaria.

[0733] Additional neurologic diseases which can be treated or detected with polynucleotides, polypeptides, agonists, and/or antagonists of the present invention include meningitis such as arachnoiditis, aseptic meningtitis such as viral meningtitis which includes lymphocytic choriomeningitis, Bacterial meningtitis which includes Haemophilus Meningtitis, Listeria Meningtitis, Meningococcal Meningtitis such as Waterhouse-Friderichsen Syndrome, Pneumococcal Meningtitis and meningeal tuberculosis, fungal meningitis such as Cryptococcal Meningtitis, subdural effusion, meningoencephalitis such as uvemeningoencephalitic syndrome, myelitis such as transverse myelitis, neurosyphilis such as tabes dorsalis, poliomyelitis which includes bulbar poliomyelitis and postpoliomyelitis syndrome, prion diseases (such as Creutzfeldt-Jakob Syndrome, Bovine Spongiform Encephalopathy, Gerstmann-Straussler Syndrome, Kuru, Scrapie), and cerebral toxoplasmosis.

[0734] Additional neurologic diseases which can be treated or detected with polynucleotides, polypeptides, agonists, and/or antagonists of the present invention include central nervous system neoplasms such as brain neoplasms that include cerebellar neoplasms such as infratentorial neoplasms, cerebral ventricle neoplasms such as choroid plexus neoplasms, hypothalamic neoplasms and supratentorial neoplasms, meningeal neoplasms, spinal cord neoplasms which include epidural neoplasms, demyelinating diseases such as Canavan Diseases, diffuse cerebral sceloris which includes adrenoleukodystrophy, encephalitis periaxialis, globoid cell leukodystrophy, diffuse cerebral sclerosis such as metachromatic leukodystrophy, allergic encephalomyelitis, necrotizing hemorrhagic encephalomyelitis, progressive multifocal leukoencephalopathy, multiple sclerosis, central pontine myelinolysis, transverse myelitis, neuromyelitis optica, Scrapie, Swayback, Chronic Fatigue Syndrome, Visna, High Pressure Nervous Syndrome, Meningism, spinal cord diseases such as amyotonia congenita, amyotrophic lateral sclerosis, spinal muscular atrophy such as Werdnig-Hoffmann Disease, spinal cord compression, spinal cord neoplasms such as epidural neoplasms, syringomyelia, Tabes Dorsalis, Stiff-Man Syndrome, mental retardation such as Angelman Syndrome, Cri-du-Chat Syndrome, De Lange's Syndrome, Down Syndrome, Gangliosidoses such as gangliosidoses G(M1), Sandhoff Disease, Tay-Sachs Disease, Hartnup Disease, homocystinuria, Laurence-Moon-Biedl Syndrome, Lesch-Nyhan Syndrome, Maple Syrup Urine Disease, mucolipidosis such as fucosidosis, neuronal ceroid-lipofuscinosis, oculocerebrorenal syndrome, phenylketonuria such as maternal phenylketonuria, Prader-Willi Syndrome, Rett Syndrome, Rubinstein-Taybi Syndrome, Tuberous Sclerosis, WAGR Syndrome, nervous system abnormalities such as holoprosencephaly, neural tube defects such as anencephaly which includes hydrangencephaly, Arnold-Chairi Deformity, encephalocele, meningocele, meningomyelocele, spinal dysraphism such as spina bifida cystica and spina bifida occulta.

[0735] Additional neurologic diseases which can be treated or detected with polynucleotides, polypeptides, agonists, and/or antagonists of the present invention include hereditary motor and sensory neuropathies which include Charcot-Marie Disease, Hereditary optic atrophy, Refsum's Disease, hereditary spastic paraplegia, Werdnig-Hoffmann Disease, Hereditary Sensory and Autonomic Neuropathies such as Congenital Analgesia and Familial Dysautonomia, Neurologic manifestations (such as agnosia that include Gerstmann's Syndrome, Amnesia such as retrograde amnesia, apraxia, neurogenic bladder, cataplexy, communicative disorders such as hearing disorders that includes deafness, partial hearing loss, loudness recruitment and tinnitus, language disorders such as aphasia which include agraphia, anomia, broca aphasia, and Wernicke Aphasia, Dyslexia such as Acquired Dyslexia, language development disorders, speech disorders such as aphasia which includes anomia, broca aphasia and Wemicke Aphasia, articulation disorders, communicative disorders such as speech disorders which include dysarthria, echolalia, mutism and stuttering, voice disorders such as aphonia and hoarseness, decerebrate state, delirium, fasciculation, hallucinations, meningism, movement disorders such as angelman syndrome, ataxia, athetosis, chorea, dystonia, hypokinesia, muscle hypotonia, myoclonus, tic, torticollis and tremor, muscle hypertonia such as muscle rigidity such as stiff-man syndrome, muscle spasticity, paralysis such as facial paralysis which includes Herpes Zoster Oticus, Gastroparesis, Hemiplegia, ophthalmoplegia such as diplopia, Duane's Syndrome, Horner's Syndrome, Chronic progressive external ophthalmoplegia such as Kearns Syndrome, Bulbar Paralysis, Tropical Spastic Paraparesis, Paraplegia such as Brown-Sequard Syndrome, quadriplegia, respiratory paralysis and vocal cord paralysis, paresis, phantom limb, taste disorders such as ageusia and dysgeusia, vision disorders such as amblyopia, blindness, color vision defects, diplopia, hemianopsia, scotoma and subnormal vision, sleep disorders such as hypersomnia which includes Kleine-Levin Syndrome, insomnia, and somnambulism, spasm such as trismus, unconsciousness such as coma, persistent vegetative state and syncope and vertigo, neuromuscular diseases such as amyotonia congenita, amyotrophic lateral sclerosis, Lambert-Eaton Myasthenic Syndrome, motor neuron disease, muscular atrophy such as spinal muscular atrophy, Charcot-Marie Disease and Werdnig-Hoffmann Disease, Postpoliomyelitis Syndrome, Muscular Dystrophy, Myasthenia Gravis, Myotonia Atrophica, Myotonia Confenita, Nemaline Myopathy, Familial Periodic Paralysis, Multiplex Paramyloclonus, Tropical Spastic Paraparesis and Stiff-Man Syndrome, peripheral nervous system diseases such as acrodynia, amyloid neuropathies, autonomic nervous system diseases such as Adie's Syndrome, Barre-Lieou Syndrome, Familial Dysautonomia, Horner's Syndrome, Reflex Sympathetic Dystrophy and Shy-Drager Syndrome, Cranial Nerve Diseases such as Acoustic Nerve Diseases such as Acoustic Neuroma which includes Neurofibromatosis 2, Facial Nerve Diseases such as Facial Neuralgia, Melkersson-Rosenthal Syndrome, ocular motility disorders which includes amblyopia, nystagmus, oculomotor nerve paralysis, ophthalmoplegia such as Duane's Syndrome, Horner's Syndrome, Chronic Progressive External Ophthalmoplegia which includes Kearns Syndrome, Strabismus such as Esotropia and Exotropia, Oculomotor Nerve Paralysis, Optic Nerve Diseases such as Optic Atrophy which includes Hereditary Optic Atrophy, Optic Disk Drusen, Optic Neuritis such as Neuromyelitis Optica, Papilledema, Trigeminal Neuralgia, Vocal Cord Paralysis, Demyelinating Diseases such as Neuromyelitis Optica and Swayback, and Diabetic neuropathies such as diabetic foot.

[0736] Additional neurologic diseases which can be treated or detected with polynucleotides, polypeptides, agonists, and/or antagonists of the present invention include nerve compression syndromes such as carpal tunnel syndrome, tarsal tunnel syndrome, thoracic outlet syndrome such as cervical rib syndrome, ulnar nerve compression syndrome, neuralgia such as causalgia, cervico-brachial neuralgia, facial neuralgia and trigeminal neuralgia, neuritis such as experimental allergic neuritis, optic neuritis, polyneuritis, polyradiculoneuritis and radiculities such as polyradiculitis, hereditary motor and sensory neuropathies such as Charcot-Marie Disease, Hereditary Optic Atrophy, Refsum's Disease, Hereditary Spastic Paraplegia and Werdnig-Hoffmann Disease, Hereditary Sensory and Autonomic Neuropathies which include Congenital Analgesia and Familial Dysautonomia, POEMS Syndrome, Sciatica, Gustatory Sweating and Tetany).

Endocrine Disorders

[0737] Polynucleotides or polypeptides, or agonists or antagonists of the present invention, may be used to detect, prevent, diagnose, prognosticate, treat, and/or ameliorate disorders and/or diseases related to hormone imbalance, and/or disorders or diseases of the endocrine system.

[0738] Hormones secreted by the glands of the endocrine system control physical growth, sexual function, metabolism, and other functions. Disorders may be classified in two ways: disturbances in the production of hormones, and the inability of tissues to respond to hormones. The etiology of these hormone imbalance or endocrine system diseases, disorders or conditions may be genetic, somatic, such as cancer and some autoimmune diseases, acquired (e.g., by chemotherapy, injury or toxins), or infectious. Moreover, polynucleotides, polypeptides, antibodies, and/or agonists or antagonists of the present invention can be used as a marker or detector of a particular disease or disorder related to the endocrine system and/or hormone imbalance.

[0739] Endocrine system and/or hormone imbalance and/or diseases encompass disorders of uterine motility including, but not limited to: complications with pregnancy and labor (e.g., pre-term labor, post-term pregnancy, spontaneous abortion, and slow or stopped labor); and disorders and/or diseases of the menstrual cycle (e.g., dysmenorrhea and endometriosis).

[0740] Endocrine system and/or hormone imbalance disorders and/or diseases include disorders and/or diseases of the pancreas, such as, for example, diabetes mellitus, diabetes insipidus, congenital pancreatic agenesis, pheochromocytoma—islet cell tumor syndrome; disorders and/or diseases of the adrenal glands such as, for example, Addison's Disease, corticosteroid deficiency, virilizing disease, hirsutism, Cushing's Syndrome, hyperaldosteronism, pheochromocytoma; disorders and/or diseases of the pituitary gland, such as, for example, hyperpituitarism, hypopituitarism, pituitary dwarfism, pituitary adenoma, panhypopituitarism, acromegaly, gigantism; disorders and/or diseases of the thyroid, including but not limited to, hyperthyroidism, hypothyroidism, Plummer's disease, Graves' disease (toxic diffuse goiter), toxic nodular goiter, thyroiditis (Hashimoto's thyroiditis, subacute granulomatous thyroiditis, and silent lymphocytic thyroiditis), Pendred's syndrome, myxedema, cretinism, thyrotoxicosis, thyroid hormone coupling defect, thymic aplasia, Hurthle cell tumours of the thyroid, thyroid cancer, thyroid carcinoma, Medullary thyroid carcinoma; disorders and/or diseases of the parathyroid, such as, for example, hyperparathyroidism, hypoparathyroidism; disorders and/or diseases of the hypothalamus.

[0741] In addition, endocrine system and/or hormone imbalance disorders and/or diseases may also include disorders and/or diseases of the testes or ovaries, including cancer. Other disorders and/or diseases of the testes or ovaries further include, for example, ovarian cancer, polycystic ovary syndrome, Klinefelter's syndrome, vanishing testes syndrome (bilateral anorchia), congenital absence of Leydig's cells, cryptorchidism, Noonan's syndrome, myotonic dystrophy, capillary haemangioma of the testis (benign), neoplasias of the testis and neo-testis.

[0742] Moreover, endocrine system and/or hormone imbalance disorders and/or diseases may also include disorders and/or diseases such as, for example, polyglandular deficiency syndromes, pheochromocytoma, neuroblastoma, multiple Endocrine neoplasia, and disorders and/or cancers of endocrine tissues.

[0743] In another embodiment, a polypeptide of the invention, or polynucleotides, antibodies, agonists, or antagonists corresponding to that polypeptide, may be used to detect, prevent, diagnose, prognosticate, treat, and/or ameliorate endocrine diseases and/or disorders associated with the tissue(s) in which the polypeptide of the invention is expressed, including one, two, three, four, five, or more tissues disclosed in Table 1B.2, column 5 (Tissue Distribution Library Code).

Reproductive System Disorders

[0744] The polynucleotides or polypeptides, or agonists or antagonists of the invention may be used for the detection, prevention, diagnosis, prognostication, treatment, and/or amelioration of diseases and/or disorders of the reproductive system. Reproductive system disorders that can be treated by the compositions of the invention, include, but are not limited to, reproductive system injuries, infections, neoplastic disorders, congenital defects, and diseases or disorders which result in infertility, complications with pregnancy, labor, or parturition, and postpartum difficulties.

[0745] Reproductive system disorders and/or diseases include diseases and/or disorders of the testes, including testicular atrophy, testicular feminization, cryptorchism (unilateral and bilateral), anorchia, ectopic testis, epididymitis and orchitis (typically resulting from infections such as, for example, gonorrhea, mumps, tuberculosis, and syphilis), testicular torsion, vasitis nodosa, germ cell tumors (e.g., seminomas, embryonal cell carcinomas, teratocarcinomas, choriocarcinomas, yolk sac tumors, and teratomas), stromal tumors (e.g., Leydig cell tumors), hydrocele, hematocele, varicocele, spermatocele, inguinal hernia, and disorders of sperm production (e.g., immotile cilia syndrome, aspermia, asthenozoospermia, azoospermia, oligospermia, and teratozoospermia).

[0746] Reproductive system disorders also include disorders of the prostate gland, such as acute non-bacterial prostatitis, chronic non-bacterial prostatitis, acute bacterial prostatitis, chronic bacterial prostatitis, prostatodystonia, prostatosis, granulomatous prostatitis, malacoplakia, benign prostatic hypertrophy or hyperplasia, and prostate neoplastic disorders, including adenocarcinomas, transitional cell carcinomas, ductal carcinomas, and squamous cell carcinomas.

[0747] Additionally, the compositions of the invention may be useful in the detection, prevention, diagnosis, prognostication, treatment, and/or amelioration of disorders or diseases of the penis and urethra, including inflammatory disorders, such as balanoposthitis, balanitis xerotica obliterans, phimosis, paraphimosis, syphilis, herpes simplex virus, gonorrhea, non-gonococcal urethritis, chlamydia, mycoplasma, trichomonas, HIV, AIDS, Reiter's syndrome, condyloma acuminatum, condyloma latum, and pearly penile papules; urethral abnormalities, such as hypospadias, epispadias, and phimosis; premalignant lesions, including Erythroplasia of Queyrat, Bowen's disease, Bowenoid paplosis, giant condyloma of Buscke-Lowenstein, and varrucous carcinoma; penile cancers, including squamous cell carcinomas, carcinoma in situ, verrucous carcinoma, and disseminated penile carcinoma; urethral neoplastic disorders, including penile urethral carcinoma, bulbomembranous urethral carcinoma, and prostatic urethral carcinoma; and erectile disorders, such as priapism, Peyronie's disease, erectile dysfunction, and impotence.

[0748] Moreover, diseases and/or disorders of the vas deferens include vasculititis and CBAVD (congenital bilateral absence of the vas deferens); additionally, the polynucleotides, polypeptides, and agonists or antagonists of the present invention may be used in the detection, prevention, diagnosis, prognostication, treatment, and/or amelioration of diseases and disorders of the seminal vesicles, including hydatid disease, congenital chloride diarrhea, and polycystic kidney disease.

[0749] Other disorders and/or diseases of the male reproductive system include, for example, Klinefelter's syndrome, Young's syndrome, premature ejaculation, diabetes mellitus, cystic fibrosis, Kartagener's syndrome, high fever, multiple sclerosis, and gynecomastia.

[0750] Further, the polynucleotides, polypeptides, and agonists or antagonists of the present invention may be used in the detection, prevention, diagnosis, prognostication, treatment, and/or amelioration of diseases and/or disorders of the vagina and vulva, including bacterial vaginosis, candida vaginitis, herpes simplex virus, chancroid, granuloma inguinale, lymphogranuloma venereum, scabies, human papillomavirus, vaginal trauma, vulvar trauma, adenosis, chlamydia vaginitis, gonorrhea, trichomonas vaginitis, condyloma acuminatum, syphilis, molluscum contagiosum, atrophic vaginitis, Paget's disease, lichen sclerosus, lichen planus, vulvodynia, toxic shock syndrome, vaginismus, vulvovaginitis, vulvar vestibulitis, and neoplastic disorders, such as squamous cell hyperplasia, clear cell carcinoma, basal cell carcinoma, melanomas, cancer of Bartholin's gland, and vulvar intraepithelial neoplasia.

[0751] Disorders and/or diseases of the uterus include dysmenorrhea, retroverted uterus, endometriosis, fibroids, adenomyosis, anovulatory bleeding, amenorrhea, Cushing's syndrome, hydatidiform moles, Asherman's syndrome, premature menopause, precocious puberty, uterine polyps, dysfunctional uterine bleeding (e.g., due to aberrant hormonal signals), and neoplastic disorders, such as adenocarcinomas, keiomyosarcomas, and sarcomas. Additionally, the polypeptides, polynucleotides, or agonists or antagonists of the invention may be useful as a marker or detector of, as well as in the detection, prevention, diagnosis, prognostication, treatment, and/or amelioration of congenital uterine abnormalities, such as bicornuate uterus, septate uterus, simple unicornuate uterus, unicornuate uterus with a noncavitary rudimentary horn, unicornuate uterus with a non-communicating cavitary rudimentary horn, unicornuate uterus with a communicating cavitary horn, arcuate uterus, uterine didelfus, and T-shaped uterus.

[0752] Ovarian diseases and/or disorders include anovulation, polycystic ovary syndrome (Stein-Leventhal syndrome), ovarian cysts, ovarian hypofunction, ovarian insensitivity to gonadotropins, ovarian overproduction of androgens, right ovarian vein syndrome, amenorrhea, hirutism, and ovarian cancer (including, but not limited to, primary and secondary cancerous growth, Sertoli-Leydig tumors, endometriod carcinoma of the ovary, ovarian papillary serous adenocarcinoma, ovarian mucinous adenocarcinoma, and Ovarian Krukenberg tumors).

[0753] Cervical diseases and/or disorders include cervicitis, chronic cervicitis, mucopurulent cervicitis, cervical dysplasia, cervical polyps, Nabothian cysts, cervical erosion, cervical incompetence, and cervical neoplasms (including, for example, cervical carcinoma, squamous metaplasia, squamous cell carcinoma, adenosquamous cell neoplasia, and columnar cell neoplasia).

[0754] Additionally, diseases and/or disorders of the reproductive system include disorders and/or diseases of pregnancy, including miscarriage and stillbirth, such as early abortion, late abortion, spontaneous abortion, induced abortion, therapeutic abortion, threatened abortion, missed abortion, incomplete abortion, complete abortion, habitual abortion, missed abortion, and septic abortion; ectopic pregnancy, anemia, Rh incompatibility, vaginal bleeding during pregnancy, gestational diabetes, intrauterine growth retardation, polyhydramnios, HELLP syndrome, abruptio placentae, placenta previa, hyperemesis, preeclampsia, eclampsia, herpes gestationis, and urticaria of pregnancy. Additionally, the polynucleotides, polypeptides, and agonists or antagonists of the present invention may be used in the detection, prevention, diagnosis, prognostication, treatment, and/or amelioration of diseases that can complicate pregnancy, including heart disease, heart failure, rheumatic heart disease, congenital heart disease, mitral valve prolapse, high blood pressure, anemia, kidney disease, infectious disease (e.g., rubella, cytomegalovirus, toxoplasmosis, infectious hepatitis, chlamydia, HIV, AIDS, and genital herpes), diabetes mellitus, Graves' disease, thyroiditis, hypothyroidism, Hashimoto's thyroiditis, chronic active hepatitis, cirrhosis of the liver, primary biliary cirrhosis, asthma, systemic lupus eryematosis, rheumatoid arthritis, myasthenia gravis, idiopathic thrombocytopenic purpura, appendicitis, ovarian cysts, gallbladder disorders, and obstruction of the intestine.

[0755] Complications associated with labor and parturition include premature rupture of the membranes, pre-term labor, post-term pregnancy, postmaturity, labor that progresses too slowly, fetal distress (e.g., abnormal heart rate (fetal or maternal), breathing problems, and abnormal fetal position), shoulder dystocia, prolapsed umbilical cord, amniotic fluid embolism, and aberrant uterine bleeding.

[0756] Further, diseases and/or disorders of the postdelivery period, including endometritis, myometritis, parametritis, peritonitis, pelvic thrombophlebitis, pulmonary embolism, endotoxemia, pyelonephritis, saphenous thrombophlebitis, mastitis, cystitis, postpartum hemorrhage, and inverted uterus.

[0757] Other disorders and/or diseases of the female reproductive system that may be detected, prevented, diagnosed, prognosticated, treated, and/or ameliorated by the polynucleotides, polypeptides, and agonists or antagonists of the present invention include, for example, Turner's syndrome, pseudohermaphroditism, premenstrual syndrome, pelvic inflammatory disease, pelvic congestion (vascular engorgement), frigidity, anorgasmia, dyspareunia, ruptured fallopian tube, and Mittelschmerz.

Infectious Disease

[0758] Polynucleotides or polypeptides, as well as agonists or antagonists of the present invention can be used to treat or detect infectious agents. For example, by increasing the immune response, particularly increasing the proliferation and differentiation of B and/or T cells, infectious diseases may be treated. The immune response may be increased by either enhancing an existing immune response, or by initiating a new immune response. Alternatively, polynucleotides or polypeptides, as well as agonists or antagonists of the present invention may also directly inhibit the infectious agent, without necessarily eliciting an immune response.

[0759] Viruses are one example of an infectious agent that can cause disease or symptoms that can be treated or detected by a polynucleotide or polypeptide and/or agonist or antagonist of the present invention. Examples of viruses, include, but are not limited to Examples of viruses, include, but are not limited to the following DNA and RNA viruses and viral families: Arbovirus, Adenoviridae, Arenaviridae, Arterivirus, Birnaviridae, Bunyaviridae, Caliciviridae, Circoviridae, Coronaviridae, Dengue, EBV, HIV, Flaviviridae, Hepadnaviridae (Hepatitis), Herpesviridae (such as, Cytomegalovirus, Herpes Simplex, Herpes Zoster), Mononegavirus (e.g., Paramyxoviridae, Morbillivirus, Rhabdoviridae), Orthomyxoviridae (e.g., Influenza A, Influenza B, and parainfluenza), Papiloma virus, Papovaviridae, Parvoviridae, Picornaviridae, Poxviridae (such as Smallpox or Vaccinia), Reoviridae (e.g., Rotavirus), Retroviridae (HTLV-I, HTLV-II, Lentivirus), and Togaviridae (e.g., Rubivirus). Viruses falling within these families can cause a variety of diseases or symptoms, including, but not limited to: arthritis, bronchiollitis, respiratory syncytial virus, encephalitis, eye infections (e.g., conjunctivitis, keratitis), chronic fatigue syndrome, hepatitis (A, B, C, E, Chronic Active, Delta), Japanese B encephalitis, Junin, Chikungunya, Rift Valley fever, yellow fever, meningitis, opportunistic infections (e.g., AIDS), pneumonia, Burkitt's Lymphoma, chickenpox, hemorrhagic fever, Measles, Mumps, Parainfluenza, Rabies, the common cold, Polio, leukemia, Rubella, sexually transmitted diseases, skin diseases (e.g., Kaposi's, warts), and viremia. polynucleotides or polypeptides, or agonists or antagonists of the invention, can be used to treat or detect any of these symptoms or diseases. In specific embodiments, polynucleotides, polypeptides, or agonists or antagonists of the invention are used to treat: meningitis, Dengue, EBV, and/or hepatitis (e.g., hepatitis B). In an additional specific embodiment polynucleotides, polypeptides, or agonists or antagonists of the invention are used to treat patients nonresponsive to one or more other commercially available hepatitis vaccines. In a further specific embodiment polynucleotides, polypeptides, or agonists or antagonists of the invention are used to treat AIDS.

[0760] Similarly, bacterial and fungal agents that can cause disease or symptoms and that can be treated or detected by a polynucleotide or polypeptide and/or agonist or antagonist of the present invention include, but not limited to, the following Gram-Negative and Gram-positive bacteria, bacterial families, and fungi: Actinomyces (e.g., Norcardia), Acinetobacter, Cryptococcus neoformans, Aspergillus, Bacillaceae (e.g., Bacillus anthrasis), Bacteroides (e.g., Bacteroides fragilis), Blastomycosis, Bordetella, Borrelia (e.g., Borrelia burgdorferi), Brucella, Candidia, Campylobacter, Chlamydia, Clostridium (e.g., Clostridium botulinum, Clostridium dificile, Clostridium perfringens, Clostridium tetani), Coccidioides, Corynebacterium (e.g., Corynebacterium diptheriae), Cryptococcus, Dermatocycoses, E. coli (e.g., Enterotoxigenic E. coli and Enterohemorrhagic E. coli), Enterobacter (e.g. Enterobacter aerogenes), Enterobacteriaceae (Klebsiella, Salmonella (e.g., Salmonella typhi, Salmonella enteritidis, Salmonella typhi), Serratia, Yersinia, Shigella), Erysipelothrix, Haemophilus (e.g., Haemophilus influenza type B), Helicobacter, Legionella (e.g., Legionella pneumophila), Leptospira, Listeria (e.g., Listeria monocytogenes), Mycoplasma, Mycobacterium (e.g., Mycobacterium leprae and Mycobacterium tuberculosis), Vibrio (e.g., Vibrio cholerae), Neisseriaceae (e.g., Neisseria gonorrhea, Neisseria meningitidis), Pasteurellacea, Proteus, Pseudomonas (e.g., Pseudomonas aeruginosa), Rickettsiaceae, Spirochetes (e.g., Treponema spp., Leptospira spp., Borrelia spp.), Shigella spp., Staphylococcus (e.g., Staphylococcus aureus), Meningiococcus, Pneumococcus and Streptococcus (e.g., Streptococcus pneumoniae and Groups A, B, and C Streptococci), and Ureaplasmas. These bacterial, parasitic, and fungal families can cause diseases or symptoms, including, but not limited to: antibiotic-resistant infections, bacteremia, endocarditis, septicemia, eye infections (e.g., conjunctivitis), uveitis, tuberculosis, gingivitis, bacterial diarrhea, opportunistic infections (e.g., AIDS related infections), paronychia, prosthesis-related infections, dental caries, Reiter's Disease, respiratory tract infections, such as Whooping Cough or Empyema, sepsis, Lyme Disease, Cat-Scratch Disease, dysentery, paratyphoid fever, food poisoning, Legionella disease, chronic and acute inflammation, erythema, yeast infections, typhoid, pneumonia, gonorrhea, meningitis (e.g., mengitis types A and B), chlamydia, syphillis, diphtheria, leprosy, brucellosis, peptic ulcers, anthrax, spontaneous abortions, birth defects, pneumonia, lung infections, ear infections, deafness, blindness, lethargy, malaise, vomiting, chronic diarrhea, Crohn's disease, colitis, vaginosis, sterility, pelvic inflammatory diseases, candidiasis, paratuberculosis, tuberculosis, lupus, botulism, gangrene, tetanus, impetigo, Rheumatic Fever, Scarlet Fever, sexually transmitted diseases, skin diseases (e.g., cellulitis, dermatocycoses), toxemia, urinary tract infections, wound infections, noscomial infections. Polynucleotides or polypeptides, agonists or antagonists of the invention, can be used to treat or detect any of these symptoms or diseases. In specific embodiments, polynucleotides, polypeptides, agonists or antagonists of the invention are used to treat: tetanus, diptheria, botulism, and/or meningitis type B.

[0761] Moreover, parasitic agents causing disease or symptoms that can be detected, prevented, diagnosed, prognosticated, treated, and/or ameliorated by a polynucleotide or polypeptide and/or agonist or antagonist of the present invention include, but not limited to, the following families or class: Amebiasis, Babesiosis, Coccidiosis, Cryptosporidiosis, Dientamoebiasis, Dourine, Ectoparasitic, Giardias, Helminthiasis, Leishmaniasis, Schistisoma, Theileriasis, Toxoplasmosis, Trypanosomiasis, and Trichomonas and Sporozoans (e.g., Plasmodium virax, Plasmodium falciparium, Plasmodium malariae and Plasmodium ovale). These parasites can cause a variety of diseases or symptoms, including, but not limited to: Scabies, Trombiculiasis, eye infections, intestinal disease (e.g., dysentery, giardiasis), liver disease, lung disease, opportunistic infections (e.g., AIDS related), malaria, pregnancy complications, and toxoplasmosis. polynucleotides or polypeptides, or agonists or antagonists of the invention, can be used to detect, prevent, diagnose, prognosticate, treat, and/or ameliorate any of these symptoms or diseases. In specific embodiments, polynucleotides, polypeptides, or agonists or antagonists of the invention are used to detect, prevent, diagnose, treat, and/or ameliorate malaria.

[0762] Polynucleotides or polypeptides, as well as agonists or antagonists of the present invention of the present invention could either be by administering an effective amount of a polypeptide to the patient, or by removing cells from the patient, supplying the cells with a polynucleotide of the present invention, and returning the engineered cells to the patient (ex vivo therapy). Moreover, the polypeptide or polynucleotide of the present invention can be used as an antigen in a vaccine to raise an immune response against infectious disease.

Regeneration

[0763] Polynucleotides or polypeptides, as well as agonists or antagonists of the present invention can be used to differentiate, proliferate, and attract cells, leading to the regeneration of tissues. (See, Science 276:59-87 (1997)). The regeneration of tissues could be used to repair, replace, or protect tissue damaged by congenital defects, trauma (wounds, burns, incisions, or ulcers), age, disease (e.g. osteoporosis, osteocarthritis, periodontal disease, liver failure), surgery, including cosmetic plastic surgery, fibrosis, reperfusion injury, or systemic cytokine damage.

[0764] Tissues that could be regenerated using the present invention include organs (e.g., pancreas, liver, intestine, kidney, skin, endothelium), muscle (smooth, skeletal or cardiac), vasculature (including vascular and lymphatics), nervous, hematopoietic, and skeletal (bone, cartilage, tendon, and ligament) tissue. Preferably, regeneration occurs without or decreased scarring. Regeneration also may include angiogenesis.

[0765] Moreover, polynucleotides or polypeptides, as well as agonists or antagonists of the present invention, may increase regeneration of tissues difficult to heal. For example, increased tendon/ligament regeneration would quicken recovery time after damage. Polynucleotides or polypeptides, as well as agonists or antagonists of the present invention could also be used prophylactically in an effort to avoid damage. Specific diseases that could be treated include of tendinitis, carpal tunnel syndrome, and other tendon or ligament defects. A further example of tissue regeneration of non-healing wounds includes pressure ulcers, ulcers associated with vascular insufficiency, surgical, and traumatic wounds.

[0766] Similarly, nerve and brain tissue could also be regenerated by using polynucleotides or polypeptides, as well as agonists or antagonists of the present invention, to proliferate and differentiate nerve cells. Diseases that could be treated using this method include central and peripheral nervous system diseases, neuropathies, or mechanical and traumatic disorders (e.g., spinal cord disorders, head trauma, cerebrovascular disease, and stoke). Specifically, diseases associated with peripheral nerve injuries, peripheral neuropathy (e.g., resulting from chemotherapy or other medical therapies), localized neuropathies, and central nervous system diseases (e.g., Alzheimer's disease, Parkinson's disease, Huntington's disease, amyotrophic lateral sclerosis, and Shy-Drager syndrome), could all be treated using the polynucleotides or polypeptides, as well as agonists or antagonists of the present invention.

Gastrointestinal Disorders

[0767] Polynucleotides or polypeptides, or agonists or antagonists of the present invention, may be used to detect, prevent, diagnose, prognosticate, treat, and/or ameliorate gastrointestinal diseases and disorders, including inflammatory diseases and/or conditions, infections, cancers (e.g., intestinal neoplasms (carcinoid tumor of the small intestine, non-Hodgkin's lymphoma of the small intestine, small bowl lymphoma)), and ulcers, such as peptic ulcers.

[0768] Gastrointestinal disorders include dysphagia, odynophagia, inflammation of the esophagus, peptic esophagitis, gastric reflux, submucosal fibrosis and stricturing, Mallory-Weiss lesions, leiomyomas, lipomas, epidermal cancers, adeoncarcinomas, gastric retention disorders, gastroenteritis, gastric atrophy, gastric/stomach cancers, polyps of the stomach, autoimmune disorders such as pernicious anemia, pyloric stenosis, gastritis (bacterial, viral, eosinophilic, stress-induced, chronic erosive, atrophic, plasma cell, and Menetrier's), and peritoneal diseases (e.g., chyloperioneum, hemoperitoneum, mesenteric cyst, mesenteric lymphadenitis, mesenteric vascular occlusion, panniculitis, neoplasms, peritonitis, pneumoperitoneum, bubphrenic abscess,).

[0769] Gastrointestinal disorders also include disorders associated with the small intestine, such as malabsorption syndromes, distension, irritable bowel syndrome, sugar intolerance, celiac disease, duodenal ulcers, duodenitis, tropical sprue, Whipple's disease, intestinal lymphangiectasia, Crohn's disease, appendicitis, obstructions of the ileum, Meckel's diverticulum, multiple diverticula, failure of complete rotation of the small and large intestine, lymphoma, and bacterial and parasitic diseases (such as Traveler's diarrhea, typhoid and paratyphoid, cholera, infection by Roundworms (Ascariasis lumbricoides), Hookworms (Ancylostoma duodenale), Threadworms (Enterobius vermicularis), Tapeworms (Taenia saginata, Echinococcus granulosus, Diphyllobothrium spp., and T. solium).

[0770] Liver diseases and/or disorders include intrahepatic cholestasis (alagille syndrome, biliary liver cirrhosis), fatty liver (alcoholic fatty liver, reye syndrome), hepatic vein thrombosis, hepatolentricular degeneration, hepatomegaly, hepatopulmonary syndrome, hepatorenal syndrome, portal hypertension (esophageal and gastric varices), liver abscess (amebic liver abscess), liver cirrhosis (alcoholic, biliary and experimental), alcoholic liver diseases (fatty liver, hepatitis, cirrhosis), parasitic (hepatic echinococcosis, fascioliasis, amebic liver abscess), jaundice (hemolytic, hepatocellular, and cholestatic), cholestasis, portal hypertension, liver enlargement, ascites, hepatitis (alcoholic hepatitis, animal hepatitis, chronic hepatitis (autoimmune, hepatitis B, hepatitis C, hepatitis D, drug induced), toxic hepatitis, viral human hepatitis (hepatitis A, hepatitis B, hepatitis C, hepatitis D, hepatitis E), Wilson's disease, granulomatous hepatitis, secondary biliary cirrhosis, hepatic encephalopathy, portal hypertension, varices, hepatic encephalopathy, primary biliary cirrhosis, primary sclerosing cholangitis, hepatocellular adenoma, hemangiomas, bile stones, liver failure (hepatic encephalopathy, acute liver failure), and liver neoplasms (angiomyolipoma, calcified liver metastases, cystic liver metastases, epithelial tumors, fibrolamellar hepatocarcinoma, focal nodular hyperplasia, hepatic adenoma, hepatobiliary cystadenoma, hepatoblastoma, hepatocellular carcinoma, hepatoma, liver cancer, liver hemangioendothelioma, mesenchymal hamartoma, mesenchymal tumors of liver, nodular regenerative hyperplasia, benign liver tumors (Hepatic cysts [Simple cysts, Polycystic liver disease, Hepatobiliary cystadenoma, Choledochal cyst], Mesenchymal tumors [Mesenchymal hamartoma, Infantile hemangioendothelioma, Hemangioma, Peliosis hepatis, Lipomas, Inflammatory pseudotumor, Miscellaneous], Epithelial tumors [Bile duct epithelium (Bile duct hamartoma, Bile duct adenoma), Hepatocyte (Adenoma, Focal nodular hyperplasia, Nodular regenerative hyperplasia)], malignant liver tumors [hepatocellular, hepatoblastoma, hepatocellular carcinoma, cholangiocellular, cholangiocarcinoma, cystadenocarcinoma, tumors of blood vessels, angiosarcoma, Karposi's sarcoma, hemangioendothelioma, other tumors, embryonal sarcoma, fibrosarcoma, leiomyosarcoma, rhabdomyosarcoma, carcinosarcoma, teratoma, carcinoid, squamous carcinoma, primary lymphoma]), peliosis hepatis, erythrohepatic porphyria, hepatic porphyria (acute intermittent porphyria, porphyria cutanea tarda), Zellweger syndrome).

[0771] Pancreatic diseases and/or disorders include acute pancreatitis, chronic pancreatitis (acute necrotizing pancreatitis, alcoholic pancreatitis), neoplasms (adenocarcinoma of the pancreas, cystadenocarcinoma, insulinoma, gastrinoma, and glucagonoma, cystic neoplasms, islet-cell tumors, pancreoblastoma), and other pancreatic diseases (e.g., cystic fibrosis, cyst (pancreatic pseudocyst, pancreatic fistula, insufficiency)).

[0772] Gallbladder diseases include gallstones (cholelithiasis and choledocholithiasis), postcholecystectomy syndrome, diverticulosis of the gallbladder, acute cholecystitis, chronic cholecystitis, bile duct tumors, and mucocele.

[0773] Diseases and/or disorders of the large intestine include antibiotic-associated colitis, diverticulitis, ulcerative colitis, acquired megacolon, abscesses, fungal and bacterial infections, anorectal disorders (e.g., fissures, hemorrhoids), colonic diseases (colitis, colonic neoplasms [colon cancer, adenomatous colon polyps (e.g., villous adenoma), colon carcinoma, colorectal cancer], colonic diverticulitis, colonic diverticulosis, megacolon [Hirschsprung disease, toxic megacolon]; sigmoid diseases [proctocolitis, sigmoin neoplasms]), constipation, Crohn's disease, diarrhea (infantile diarrhea, dysentery), duodenal diseases (duodenal neoplasms, duodenal obstruction, duodenal ulcer, duodenitis), enteritis (enterocolitis), HIV enteropathy, ileal diseases (ileal neoplasms, ileitis), immunoproliferative small intestinal disease, inflammatory bowel disease (ulcerative colitis, Crohn's disease), intestinal atresia, parasitic diseases (anisakiasis, balantidiasis, blastocystis infections, cryptosporidiosis, dientamoebiasis, amebic dysentery, giardiasis), intestinal fistula (rectal fistula), intestinal neoplasms (cecal neoplasms, colonic neoplasms, duodenal neoplasms, ileal neoplasms, intestinal polyps, jejunal neoplasms, rectal neoplasms), intestinal obstruction (afferent loop syndrome, duodenal obstruction, impacted feces, intestinal pseudo-obstruction [cecal volvulus], intussusception), intestinal perforation, intestinal polyps (colonic polyps, gardner syndrome, peutz-jeghers syndrome), jejunal diseases (jejunal neoplasms), malabsorption syndromes (blind loop syndrome, celiac disease, lactose intolerance, short bowl syndrome, tropical sprue, whipple's disease), mesenteric vascular occlusion, pneumatosis cystoides intestinalis, protein-losing enteropathies (intestinal lymphagiectasis), rectal diseases (anus diseases, fecal incontinence, hemorrhoids, proctitis, rectal fistula, rectal prolapse, rectocele), peptic ulcer (duodenal ulcer, peptic esophagitis, hemorrhage, perforation, stomach ulcer, Zollinger-Ellison syndrome), postgastrectomy syndromes (dumping syndrome), stomach diseases (e.g., achlorhydria, duodenogastric reflux (bile reflux), gastric antral vascular ectasia, gastric fistula, gastric outlet obstruction, gastritis (atrophic or hypertrophic), gastroparesis, stomach dilatation, stomach diverticulum, stomach neoplasms (gastric cancer, gastric polyps, gastric adenocarcinoma, hyperplastic gastric polyp), stomach rupture, stomach ulcer, stomach volvulus), tuberculosis, visceroptosis, vomiting (e.g., hematemesis, hyperemesis gravidarum, postoperative nausea and vomiting) and hemorrhagic colitis.

[0774] Further diseases and/or disorders of the gastrointestinal system include biliary tract diseases, such as, gastroschisis, fistula (e.g., biliary fistula, esophageal fistula, gastric fistula, intestinal fistula, pancreatic fistula), neoplasms (e.g., biliary tract neoplasms, esophageal neoplasms, such as adenocarcinoma of the esophagus, esophageal squamous cell carcinoma, gastrointestinal neoplasms, pancreatic neoplasms, such as adenocarcinoma of the pancreas, mucinous cystic neoplasm of the pancreas, pancreatic cystic neoplasms, pancreatoblastoma, and peritoneal neoplasms), esophageal disease (e.g., bullous diseases, candidiasis, glycogenic acanthosis, ulceration, barrett esophagus varices, atresia, cyst, diverticulum (e.g., Zenker's diverticulum), fistula (e.g., tracheoesophageal fistula), motility disorders (e.g., CREST syndrome, deglutition disorders, achalasia, spasm, gastroesophageal reflux), neoplasms, perforation (e.g., Boerhaave syndrome, Mallory-Weiss syndrome), stenosis, esophagitis, diaphragmatic hernia (e.g., hiatal hernia); gastrointestinal diseases, such as, gastroenteritis (e.g., cholera morbus, norwalk virus infection), hemorrhage (e.g., hematemesis, melena, peptic ulcer hemorrhage), stomach neoplasms (gastric cancer, gastric polyps, gastric adenocarcinoma, stomach cancer)), hernia (e.g., congenital diaphragmatic hernia, femoral hernia, inguinal hernia, obturator hernia, umbilical hernia, ventral hernia), and intestinal diseases (e.g., cecal diseases (appendicitis, cecal neoplasms)).

Chemotaxis

[0775] Polynucleotides or polypeptides, as well as agonists or antagonists of the present invention may have chemotaxis activity. A chemotaxic molecule attracts or mobilizes cells (e.g., monocytes, fibroblasts, neutrophils, T-cells, mast cells, eosinophils, epithelial and/or endothelial cells) to a particular site in the body, such as inflammation, infection, or site of hyperproliferation. The mobilized cells can then fight off and/or heal the particular trauma or abnormality.

[0776] Polynucleotides or polypeptides, as well as agonists or antagonists of the present invention may increase chemotaxic activity of particular cells. These chemotactic molecules can then be used to treat inflammation, infection, hyperproliferative disorders, or any immune system disorder by increasing the number of cells targeted to a particular location in the body. For example, chemotaxic molecules can be used to treat wounds and other trauma to tissues by attracting immune cells to the injured location. Chemotactic molecules of the present invention can also attract fibroblasts, which can be used to treat wounds.

[0777] It is also contemplated that polynucleotides or polypeptides, as well as agonists or antagonists of the present invention may inhibit chemotactic activity. These molecules could also be used to treat disorders. Thus, polynucleotides or polypeptides, as well as agonists or antagonists of the present invention could be used as an inhibitor of chemotaxis.

Binding Activity

[0778] A polypeptide of the present invention may be used to screen for molecules that bind to the polypeptide or for molecules to which the polypeptide binds. The binding of the polypeptide and the molecule may activate (agonist), increase, inhibit (antagonist), or decrease activity of the polypeptide or the molecule bound. Examples of such molecules include antibodies, oligonucleotides, proteins (e.g., receptors), or small molecules.

[0779] Preferably, the molecule is closely related to the natural ligand of the polypeptide, e.g., a fragment of the ligand, or a natural substrate, a ligand, a structural or functional mimetic. (See, Coligan et al., Current Protocols in Immunology 1(2):Chapter 5 (1991)). Similarly, the molecule can be closely related to the natural receptor to which the polypeptide binds, or at least, a fragment of the receptor capable of being bound by the polypeptide (e.g., active site). In either case, the molecule can be rationally designed using known techniques.

[0780] Preferably, the screening for these molecules involves producing appropriate cells which express the polypeptide. Preferred cells include cells from mammals, yeast, Drosophila, or E. coli. Cells expressing the polypeptide (or cell membrane containing the expressed polypeptide) are then preferably contacted with a test compound potentially containing the molecule to observe binding, stimulation, or inhibition of activity of either the polypeptide or the molecule.

[0781] The assay may simply test binding of a candidate compound to the polypeptide, wherein binding is detected by a label, or in an assay involving competition with a labeled competitor. Further, the assay may test whether the candidate compound results in a signal generated by binding to the polypeptide.

[0782] Alternatively, the assay can be carried out using cell-free preparations, polypeptide/molecule affixed to a solid support, chemical libraries, or natural product mixtures. The assay may also simply comprise the steps of mixing a candidate compound with a solution containing a polypeptide, measuring polypeptide/molecule activity or binding, and comparing the polypeptide/molecule activity or binding to a standard.

[0783] Preferably, an ELISA assay can measure polypeptide level or activity in a sample (e.g., biological sample) using a monoclonal or polyclonal antibody. The antibody can measure polypeptide level or activity by either binding, directly or indirectly, to the polypeptide or by competing with the polypeptide for a substrate.

[0784] Additionally, the receptor to which the polypeptide of the present invention binds can be identified by numerous methods known to those of skill in the art, for example, ligand panning and FACS sorting (Coligan, et al., Current Protocols in Immun., 1(2), Chapter 5, (1991)). For example, expression cloning is employed wherein polyadenylated RNA is prepared from a cell responsive to the polypeptides, for example, NIH3T3 cells which are known to contain multiple receptors for the FGF family proteins, and SC-3 cells, and a cDNA library created from this RNA is divided into pools and used to transfect COS cells or other cells that are not responsive to the polypeptides. Transfected cells which are grown on glass slides are exposed to the polypeptide of the present invention, after they have been labeled. The polypeptides can be labeled by a variety of means including iodination or inclusion of a recognition site for a site-specific protein kinase.

[0785] Following fixation and incubation, the slides are subjected to auto-radiographic analysis. Positive pools are identified and sub-pools are prepared and re-transfected using an iterative sub-pooling and re-screening process, eventually yielding a single clones that encodes the putative receptor.

[0786] As an alternative approach for receptor identification, the labeled polypeptides can be photoaffinity linked with cell membrane or extract preparations that express the receptor molecule. Cross-linked material is resolved by PAGE analysis and exposed to X-ray film. The labeled complex containing the receptors of the polypeptides can be excised, resolved into peptide fragments, and subjected to protein microsequencing. The amino acid sequence obtained from microsequencing would be used to design a set of degenerate oligonucleotide probes to screen a cDNA library to identify the genes encoding the putative receptors.

[0787] Moreover, the techniques of gene-shuffling, motif-shuffling, exon-shuffling, and/or codon-shuffling (collectively referred to as “DNA shuffling”) may be employed to modulate the activities of the polypeptide of the present invention thereby effectively generating agonists and antagonists of the polypeptide of the present invention. See generally, U.S. Pat. Nos. 5,605,793, 5,811,238, 5,830,721, 5,834,252, and 5,837,458, and Patten, P. A., et al., Curr. Opinion Biotechnol. 8:724-33 (1997); Harayama, S. Trends Biotechnol. 16(2):76-82 (1998); Hansson, L. O., et al., J. Mol. Biol. 287:265-76 (1999); and Lorenzo, M. M. and Blasco, R. Biotechniques 24(2):308-13 (1998); each of these patents and publications are hereby incorporated by reference). In one embodiment, alteration of polynucleotides and corresponding polypeptides may be achieved by DNA shuffling. DNA shuffling involves the assembly of two or more DNA segments into a desired molecule by homologous, or site-specific, recombination. In another embodiment, polynucleotides and corresponding polypeptides may be altered by being subjected to random mutagenesis by error-prone PCR, random nucleotide insertion or other methods prior to recombination. In another embodiment, one or more components, motifs, sections, parts, domains, fragments, etc., of the polypeptide of the present invention may be recombined with one or more components, motifs, sections, parts, domains, fragments, etc. of one or more heterologous molecules. In preferred embodiments, the heterologous molecules are family members. In further preferred embodiments, the heterologous molecule is a growth factor such as, for example, platelet-derived growth factor (PDGF), insulin-like growth factor (IGF-I), transforming growth factor (TGF)-alpha, epidermal growth factor (EGF), fibroblast growth factor (FGF), TGF-beta, bone morphogenetic protein (BMP)-2, BMP-4, BMP-5, BMP-6, BMP-7, activins A and B, decapentaplegic(dpp), 60A, OP-2, dorsalin, growth differentiation factors (GDFs), nodal, MIS, inhibin-alpha, TGF-beta1, TGF-beta2, TGF-beta3, TGF-beta5, and glial-derived neurotrophic factor (GDNF).

[0788] Other preferred fragments are biologically active fragments of the polypeptide of the present invention. Biologically active fragments are those exhibiting activity similar, but not necessarily identical, to an activity of the polypeptide of the present invention. The biological activity of the fragments may include an improved desired activity, or a decreased undesirable activity.

[0789] Additionally, this invention provides a method of screening compounds to identify those which modulate the action of the polypeptide of the present invention. An example of such an assay comprises combining a mammalian fibroblast cell, a the polypeptide of the present invention, the compound to be screened and ³[H] thymidine under cell culture conditions where the fibroblast cell would normally proliferate. A control assay may be performed in the absence of the compound to be screened and compared to the amount of fibroblast proliferation in the presence of the compound to determine if the compound stimulates proliferation by determining the uptake of 3 [H] thymidine in each case. The amount of fibroblast cell proliferation is measured by liquid scintillation chromatography which measures the incorporation of ³[H] thymidine. Both agonist and antagonist compounds may be identified by this procedure.

[0790] In another method, a mammalian cell or membrane preparation expressing a receptor for a polypeptide of the present invention is incubated with a labeled polypeptide of the present invention in the presence of the compound. The ability of the compound to enhance or block this interaction could then be measured. Alternatively, the response of a known second messenger system following interaction of a compound to be screened and the receptor is measured and the ability of the compound to bind to the receptor and elicit a second messenger response is measured to determine if the compound is a potential agonist or antagonist. Such second messenger systems include but are not limited to, cAMP guanylate cyclase, ion channels or phosphoinositide hydrolysis.

[0791] All of these above assays can be used as diagnostic or prognostic markers. The molecules discovered using these assays can be used to treat disease or to bring about a particular result in a patient (e.g., blood vessel growth) by activating or inhibiting the polypeptide/molecule. Moreover, the assays can discover agents which may inhibit or enhance the production of the polypeptides of the invention from suitably manipulated cells or tissues.

[0792] Therefore, the invention includes a method of identifying compounds which bind to a polypeptide of the invention comprising the steps of: (a) incubating a candidate binding compound with a polypeptide of the present invention; and (b) determining if binding has occurred. Moreover, the invention includes a method of identifying agonists/antagonists comprising the steps of: (a) incubating a candidate compound with a polypeptide of the present invention, (b) assaying a biological activity, and (b) determining if a biological activity of the polypeptide has been altered.

Targeted Delivery

[0793] In another embodiment, the invention provides a method of delivering compositions to targeted cells expressing a receptor for a polypeptide of the invention, or cells expressing a cell bound form of a polypeptide of the invention.

[0794] As discussed herein, polypeptides or antibodies of the invention may be associated with heterologous polypeptides, heterologous nucleic acids, toxins, or prodrugs via hydrophobic, hydrophilic, ionic and/or covalent interactions. In one embodiment, the invention provides a method for the specific delivery of compositions of the invention to cells by administering polypeptides of the invention (including antibodies) that are associated with heterologous polypeptides or nucleic acids. In one example, the invention provides a method for delivering a therapeutic protein into the targeted cell. In another example, the invention provides a method for delivering a single stranded nucleic acid (e.g., antisense or ribozymes) or double stranded nucleic acid (e.g., DNA that can integrate into the cell's genome or replicate episomally and that can be transcribed) into the targeted cell.

[0795] In another embodiment, the invention provides a method for the specific destruction of cells (e.g., the destruction of tumor cells) by administering polypeptides of the invention (e.g., polypeptides of the invention or antibodies of the invention) in association with toxins or cytotoxic prodrugs.

[0796] By “toxin” is meant compounds that bind and activate endogenous cytotoxic effector systems, radioisotopes, holotoxins, modified toxins, catalytic subunits of toxins, or any molecules or enzymes not normally present in or on the surface of a cell that under defined conditions cause the cell's death. Toxins that may be used according to the methods of the invention include, but are not limited to, radioisotopes known in the art, compounds such as, for example, antibodies (or complement fixing containing portions thereof) that bind an inherent or induced endogenous cytotoxic effector system, thymidine kinase, endonuclease, RNAse, alpha toxin, ricin, abrin, Pseudomonas exotoxin A, diphtheria toxin, saporin, momordin, gelonin, pokeweed antiviral protein, alpha-sarcin and cholera toxin. By “cytotoxic prodrug” is meant a non-toxic compound that is converted by an enzyme, normally present in the cell, into a cytotoxic compound. Cytotoxic prodrugs that may be used according to the methods of the invention include, but are not limited to, glutamyl derivatives of benzoic acid mustard alkylating agent, phosphate derivatives of etoposide or mitomycin C, cytosine arabinoside, daunorubisin, and phenoxyacetamide derivatives of doxorubicin.

Drug Screening

[0797] Further contemplated is the use of the polypeptides of the present invention, or the polynucleotides encoding these polypeptides, to screen for molecules which modify the activities of the polypeptides of the present invention. Such a method would include contacting the polypeptide of the present invention with a selected compound(s) suspected of having antagonist or agonist activity, and assaying the activity of these polypeptides following binding.

[0798] This invention is particularly useful for screening therapeutic compounds by using the polypeptides of the present invention, or binding fragments thereof, in any of a variety of drug screening techniques. The polypeptide or fragment employed in such a test may be affixed to a solid support, expressed on a cell surface, free in solution, or located intracellularly. One method of drug screening utilizes eukaryotic or prokaryotic host cells which are stably transformed with recombinant nucleic acids expressing the polypeptide or fragment. Drugs are screened against such transformed cells in competitive binding assays. One may measure, for example, the formulation of complexes between the agent being tested and a polypeptide of the present invention.

[0799] Thus, the present invention provides methods of screening for drugs or any other agents which affect activities mediated by the polypeptides of the present invention. These methods comprise contacting such an agent with a polypeptide of the present invention or a fragment thereof and assaying for the presence of a complex between the agent and the polypeptide or a fragment thereof, by methods well known in the art. In such a competitive binding assay, the agents to screen are typically labeled. Following incubation, free agent is separated from that present in bound form, and the amount of free or uncomplexed label is a measure of the ability of a particular agent to bind to the polypeptides of the present invention.

[0800] Another technique for drug screening provides high throughput screening for compounds having suitable binding affinity to the polypeptides of the present invention, and is described in great detail in European Patent Application 84/03564, published on Sep. 13, 1984, which is incorporated herein by reference herein. Briefly stated, large numbers of different small peptide test compounds are synthesized on a solid substrate, such as plastic pins or some other surface. The peptide test compounds are reacted with polypeptides of the present invention and washed. Bound polypeptides are then detected by methods well known in the art. Purified polypeptides are coated directly onto plates for use in the aforementioned drug screening techniques. In addition, non-neutralizing antibodies may be used to capture the peptide and immobilize it on the solid support.

[0801] This invention also contemplates the use of competitive drug screening assays in which neutralizing antibodies capable of binding polypeptides of the present invention specifically compete with a test compound for binding to the polypeptides or fragments thereof. In this manner, the antibodies are used to detect the presence of any peptide which shares one or more antigenic epitopes with a polypeptide of the invention.

Antisense And Ribozyme (Antagonists)

[0802] In specific embodiments, antagonists according to the present invention are nucleic acids corresponding to the sequences contained in SEQ ID NO:X, or the complementary strand thereof, and/or to cDNA sequences contained in cDNA ATCC Deposit No:Z identified for example, in Table 1A and/or 1B. In one embodiment, antisense sequence is generated internally, by the organism, in another embodiment, the antisense sequence is separately administered (see, for example, O'Connor, J., Neurochem. 56:560 (1991). Oligodeoxynucleotides as Antisense Inhibitors of Gene Expression, CRC Press, Boca Raton, Fla. (1988). Antisense technology can be used to control gene expression through antisense DNA or RNA, or through triple-helix formation. Antisense techniques are discussed for example, in Okano, J., Neurochem. 56:560 (1991); Oligodeoxynucleotides as Antisense Inhibitors of Gene Expression, CRC Press, Boca Raton, Fla. (1988). Triple helix formation is discussed in, for instance, Lee et al., Nucleic Acids Research 6:3073 (1979); Cooney et al., Science 241:456 (1988); and Dervan et al., Science 251:1300 (1991). The methods are based on binding of a polynucleotide to a complementary DNA or RNA.

[0803] For example, the use of c-myc and c-myb antisense RNA constructs to inhibit the growth of the non-lymphocytic leukemia cell line HL-60 and other cell lines was previously described. (Wickstrom et al. (1988); Anfossi et al. (1989)). These experiments were performed in vitro by incubating cells with the oligoribonucleotide. A similar procedure for in vivo use is described in WO 91/15580. Briefly, a pair of oligonucleotides for a given antisense RNA is produced as follows: A sequence complimentary to the first 15 bases of the open reading frame is flanked by an EcoR1 site on the 5 end and a HindIII site on the 3 end. Next, the pair of oligonucleotides is heated at 90° C. for one minute and then annealed in 2× ligation buffer (20 mM TRIS HCl pH 7.5, 10 mM MgCl2, 10 MM dithiothreitol (DTT) and 0.2 mM ATP) and then ligated to the EcoR1/Hind III site of the retroviral vector PMV7 (WO 91/15580).

[0804] For example, the 5′ coding portion of a polynucleotide that encodes the polypeptide of the present invention may be used to design an antisense RNA oligonucleotide of from about 10 to 40 base pairs in length. A DNA oligonucleotide is designed to be complementary to a region of the gene involved in transcription thereby preventing transcription and the production of the receptor. The antisense RNA oligonucleotide hybridizes to the mRNA in vivo and blocks translation of the mRNA molecule into receptor polypeptide.

[0805] In one embodiment, the antisense nucleic acid of the invention is produced intracellularly by transcription from an exogenous sequence. For example, a vector or a portion thereof, is transcribed, producing an antisense nucleic acid (RNA) of the invention. Such a vector would contain a sequence encoding the antisense nucleic acid. Such a vector can remain episomal or become chromosomally integrated, as long as it can be transcribed to produce the desired antisense RNA. Such vectors can be constructed by recombinant DNA technology methods standard in the art. Vectors can be plasmid, viral, or others known in the art, used for replication and expression in vertebrate cells. Expression of the sequence encoding the polypeptide of the present invention or fragments thereof, can be by any promoter known in the art to act in vertebrate, preferably human cells. Such promoters can be inducible or constitutive. Such promoters include, but are not limited to, the SV40 early promoter region (Bernoist and Chambon, Nature 29:304-310 (1981), the promoter contained in the 3′ long terminal repeat of Rous sarcoma virus (Yamamoto et al., Cell 22:787-797 (1980), the herpes thymidine promoter (Wagner et al., Proc. Natl. Acad. Sci. U.S.A. 78:1441-1445 (1981), the regulatory sequences of the metallothionein gene (Brinster, et al., Nature 296:39-42 (1982)), etc.

[0806] The antisense nucleic acids of the invention comprise a sequence complementary to at least a portion of an RNA transcript of a gene of the present invention. However, absolute complementarity, although preferred, is not required. A sequence “complementary to at least a portion of an RNA,” referred to herein, means a sequence having sufficient complementarity to be able to hybridize with the RNA, forming a stable duplex; in the case of double stranded antisense nucleic acids, a single strand of the duplex DNA may thus be tested, or triplex formation may be assayed. The ability to hybridize will depend on both the degree of complementarity and the length of the antisense nucleic acid. Generally, the larger the hybridizing nucleic acid, the more base mismatches with a RNA it may contain and still form a stable duplex (or triplex as the case may be). One skilled in the art can ascertain a tolerable degree of mismatch by use of standard procedures to determine the melting point of the hybridized complex.

[0807] Oligonucleotides that are complementary to the 5′ end of the message, e.g., the 5′ untranslated sequence up to and including the AUG initiation codon, should work most efficiently at inhibiting translation. However, sequences complementary to the 3′ untranslated sequences of mRNAs have been shown to be effective at inhibiting translation of mRNAs as well. See generally, Wagner, R., 1994, Nature 372:333-335. Thus, oligonucleotides complementary to either the 5′- or 3′-non-translated, non-coding regions of polynucleotide sequences described herein could be used in an antisense approach to inhibit translation of endogenous mRNA. Oligonucleotides complementary to the 5′ untranslated region of the mRNA should include the complement of the AUG start codon. Antisense oligonucleotides complementary to mRNA coding regions are less efficient inhibitors of translation but could be used in accordance with the invention. Whether designed to hybridize to the 5′-, 3′- or coding region of mRNA of the present invention, antisense nucleic acids should be at least six nucleotides in length, and are preferably oligonucleotides ranging from 6 to about 50 nucleotides in length. In specific aspects the oligonucleotide is at least 10 nucleotides, at least 17 nucleotides, at least 25 nucleotides or at least 50 nucleotides.

[0808] The polynucleotides of the invention can be DNA or RNA or chimeric mixtures or derivatives or modified versions thereof, single-stranded or double-stranded. The oligonucleotide can be modified at the base moiety, sugar moiety, or phosphate backbone, for example, to improve stability of the molecule, hybridization, etc. The oligonucleotide may include other appended groups such as peptides (e.g., for targeting host cell receptors in vivo), or agents facilitating transport across the cell membrane (see, e.g., Letsinger et al., 1989, Proc. Natl. Acad. Sci. U.S.A. 86:6553-6556; Lemaitre et al., 1987, Proc. Natl. Acad. Sci. 84:648-652; PCT Publication No. WO88/09810, published Dec. 15, 1988) or the blood-brain barrier (see, e.g., PCT Publication No. WO89/10134, published Apr. 25, 1988), hybridization-triggered cleavage agents. (See, e.g., Krol et al., 1988, BioTechniques 6:958-976) or intercalating agents. (See, e.g., Zon, 1988, Pharm. Res. 5:539-549). To this end, the oligonucleotide may be conjugated to another molecule, e.g., a peptide, hybridization triggered cross-linking agent, transport agent, hybridization-triggered cleavage agent, etc.

[0809] The antisense oligonucleotide may comprise at least one modified base moiety which is selected from the group including, but not limited to, 5-fluorouracil, 5-bromouracil, 5-chlorouracil, 5-iodouracil, hypoxanthine, xantine, 4-acetylcytosine, 5-(carboxyhydroxylmethyl)uracil, 5-carboxymethylaminomethyl-2-thiouridine, 5-carboxymethylaminomethyluracil, dihydrouracil, beta-D-galactosylqueosine, inosine, N6-isopentenyladenine, 1-methylguanine, 1-methylinosine, 2,2-dimethylguanine, 2-methyladenine, 2-methylguanine, 3-methylcytosine, 5-methylcytosine, N6-adenine, 7-methylguanine, 5-methylaminomethyluracil, 5-methoxyaminomethyl-2-thiouracil, beta-D-mannosylqueosine, 5′-methoxycarboxymethyluracil, 5-methoxyuracil, 2-methylthio-N6-isopentenyladenine, uracil-5-oxyacetic acid (v), wybutoxosine, pseudouracil, queosine, 2-thiocytosine, 5-methyl-2-thiouracil, 2-thiouracil, 4-thiouracil, 5-methyluracil, uracil-5-oxyacetic acid methylester, uracil-5-oxyacetic acid (v), 5-methyl-2-thiouracil, 3-(3-amino-3-N-2-carboxypropyl)uracil, (acp3)w, and 2,6-diaminopurine.

[0810] The antisense oligonucleotide may also comprise at least one modified sugar moiety selected from the group including, but not limited to, arabinose, 2-fluoroarabinose, xylulose, and hexose.

[0811] In yet another embodiment, the antisense oligonucleotide comprises at least one modified phosphate backbone selected from the group including, but not limited to, a phosphorothioate, a phosphorodithioate, a phosphoramidothioate, a phosphoramidate, a phosphordiamidate, a methylphosphonate, an alkyl phosphotriester, and a formacetal or analog thereof.

[0812] In yet another embodiment, the antisense oligonucleotide is an a-anomeric oligonucleotide. An a-anomeric oligonucleotide forms specific double-stranded hybrids with complementary RNA in which, contrary to the usual b-units, the strands run parallel to each other (Gautier et al., 1987, Nucl. Acids Res. 15:6625-6641). The oligonucleotide is a 2′-0-methylribonucleotide (Inoue et al., 1987, Nucl. Acids Res. 15:6131-6148), or a chimeric RNA-DNA analogue (Inoue et al., 1987, FEBS Lett. 215:327-330).

[0813] Polynucleotides of the invention may be synthesized by standard methods known in the art, e.g. by use of an automated DNA synthesizer (such as are commercially available from Biosearch, Applied Biosystems, etc.). As examples, phosphorothioate oligonucleotides may be synthesized by the method of Stein et al. (1988, Nucl. Acids Res. 16:3209), methylphosphonate oligonucleotides can be prepared by use of controlled pore glass polymer supports (Sarin et al., 1988, Proc. Natl. Acad. Sci. U.S.A. 85:7448-7451), etc.

[0814] While antisense nucleotides complementary to the coding region sequence could be used, those complementary to the transcribed untranslated region are most preferred.

[0815] Potential antagonists according to the invention also include catalytic RNA, or a ribozyme (See, e.g., PCT International Publication WO 90/11364, published Oct. 4, 1990; Sarver et al, Science 247:1222-1225 (1990). While ribozymes that cleave mRNA at site specific recognition sequences can be used to destroy mRNAs, the use of hammerhead ribozymes is preferred. Hammerhead ribozymes cleave mRNAs at locations dictated by flanking regions that form complementary base pairs with the target mRNA. The sole requirement is that the target mRNA have the following sequence of two bases: 5′-UG-3′. The construction and production of hammerhead ribozymes is well known in the art and is described more fully in Haseloff and Gerlach, Nature 334:585-591 (1988). There are numerous potential hammerhead ribozyme cleavage sites within the nucleotide sequence of SEQ ID NO:X. Preferably, the ribozyme is engineered so that the cleavage recognition site is located near the 5′ end of the mRNA; i.e., to increase efficiency and minimize the intracellular accumulation of non-functional mRNA transcripts.

[0816] As in the antisense approach, the ribozymes of the invention can be composed of modified oligonucleotides (e.g., for improved stability, targeting, etc.) and should be delivered to cells which express in vivo. DNA constructs encoding the ribozyme may be introduced into the cell in the same manner as described above for the introduction of antisense encoding DNA. A preferred method of delivery involves using a DNA construct “encoding” the ribozyme under the control of a strong constitutive promoter, such as, for example, pol III or pol II promoter, so that transfected cells will produce sufficient quantities of the ribozyme to destroy endogenous messages and inhibit translation. Since ribozymes unlike antisense molecules, are catalytic, a lower intracellular concentration is required for efficiency.

[0817] Antagonist/agonist compounds may be employed to inhibit the cell growth and proliferation effects of the polypeptides of the present invention on neoplastic cells and tissues, i.e. stimulation of angiogenesis of tumors, and, therefore, retard or prevent abnormal cellular growth and proliferation, for example, in tumor formation or growth.

[0818] The antagonist/agonist may also be employed to prevent hyper-vascular diseases, and prevent the proliferation of epithelial lens cells after extracapsular cataract surgery. Prevention of the mitogenic activity of the polypeptides of the present invention may also be desirous in cases such as restenosis after balloon angioplasty.

[0819] The antagonist/agonist may also be employed to prevent the growth of scar tissue during wound healing.

[0820] The antagonist/agonist may also be employed to treat the diseases described herein.

[0821] Thus, the invention provides a method of treating disorders or diseases, including but not limited to the disorders or diseases listed throughout this application, associated with overexpression of a polynucleotide of the present invention by administering to a patient (a) an antisense molecule directed to the polynucleotide of the present invention, and/or (b) a ribozyme directed to the polynucleotide of the present invention.

Binding Peptides and Other Molecules

[0822] The invention also encompasses screening methods for identifying polypeptides and nonpolypeptides that bind polypeptides of the invention, and the binding molecules identified thereby. These binding molecules are useful, for example, as agonists and antagonists of the polypeptides of the invention. Such agonists and antagonists can be used, in accordance with the invention, in the therapeutic embodiments described in detail, below.

[0823] This method comprises the steps of:
[0824] a. contacting polypeptides of the invention with a plurality of molecules; and
[0825] b. identifying a molecule that binds the polypeptides of the invention.

[0826] The step of contacting the polypeptides of the invention with the plurality of molecules may be effected in a number of ways. For example, one may contemplate immobilizing the polypeptides on a solid support and bringing a solution of the plurality of molecules in contact with the immobilized polypeptides. Such a procedure would be akin to an affinity chromatographic process, with the affinity matrix being comprised of the immobilized polypeptides of the invention. The molecules having a selective affinity for the polypeptides can then be purified by affinity selection. The nature of the solid support, process for attachment of the polypeptides to the solid support, solvent, and conditions of the affinity isolation or selection are largely conventional and well known to those of ordinary skill in the art.

[0827] Alternatively, one may also separate a plurality of polypeptides into substantially separate fractions comprising a subset of or individual polypeptides. For instance, one can separate the plurality of polypeptides by gel electrophoresis, column chromatography, or like method known to those of ordinary skill for the separation of polypeptides. The individual polypeptides can also be produced by a transformed host cell in such a way as to be expressed on or about its outer surface (e.g., a recombinant phage). Individual isolates can then be “probed” by the polypeptides of the invention, optionally in the presence of an inducer should one be required for expression, to determine if any selective affinity interaction takes place between the polypeptides and the individual clone. Prior to contacting the polypeptides with each fraction comprising individual polypeptides, the polypeptides could first be transferred to a solid support for additional convenience. Such a solid support may simply be a piece of filter membrane, such as one made of nitrocellulose or nylon. In this manner, positive clones could be identified from a collection of transformed host cells of an expression library, which harbor a DNA construct encoding a polypeptide having a selective affinity for polypeptides of the invention. Furthermore, the amino acid sequence of the polypeptide having a selective affinity for the polypeptides of the invention can be determined directly by conventional means or the coding sequence of the DNA encoding the polypeptide can frequently be determined more conveniently. The primary sequence can then be deduced from the corresponding DNA sequence. If the amino acid sequence is to be determined from the polypeptide itself, one may use microsequencing techniques. The sequencing technique may include mass spectroscopy.

[0828] In certain situations, it may be desirable to wash away any unbound polypeptides from a mixture of the polypeptides of the invention and the plurality of polypeptides prior to attempting to determine or to detect the presence of a selective affinity interaction. Such a wash step may be particularly desirable when the polypeptides of the invention or the plurality of polypeptides are bound to a solid support.

[0829] The plurality of molecules provided according to this method may be provided by way of diversity libraries, such as random or combinatorial peptide or nonpeptide libraries which can be screened for molecules that specifically bind polypeptides of the invention. Many libraries are known in the art that can be used, e.g., chemically synthesized libraries, recombinant (e.g., phage display libraries), and in vitro translation-based libraries. Examples of chemically synthesized libraries are described in Fodor et al., 1991, Science 251:767-773; Houghten et al., 1991, Nature 354:84-86; Lam et al., 1991, Nature 354:82-84; Medynski, 1994, Bio/Technology 12:709-710; Gallop et al., 1994, J. Medicinal Chemistry 37(9):1233-1251; Ohlmeyer et al., 1993, Proc. Natl. Acad. Sci. USA 90:10922-10926; Erb et al., 1994, Proc. Natl. Acad. Sci. USA 91:11422-11426; Houghten et al., 1992, Biotechniques 13:412; Jayawickreme et al., 1994, Proc. Natl. Acad. Sci. USA 91:1614-1618; Salmon et al., 1993, Proc. Natl. Acad. Sci. USA 90:11708-11712; PCT Publication No. WO 93/20242; and Brenner and Lerner, 1992, Proc. Natl. Acad. Sci. USA 89:5381-5383.

[0830] Examples of phage display libraries are described in Scott and Smith, 1990, Science 249:386-390; Devlin et al., 1990, Science, 249:404-406; Christian, R. B., et al., 1992, J. Mol. Biol. 227:711-718); Lenstra, 1992, J. Immunol. Meth. 152:149-157; Kay et al., 1993, Gene 128:59-65; and PCT Publication No. WO 94/18318 dated Aug. 18, 1994.

[0831] In vitro translation-based libraries include but are not limited to those described in PCT Publication No. WO 91/05058 dated Apr. 18, 1991; and Mattheakis et al., 1994, Proc. Natl. Acad. Sci. USA 91:9022-9026.

[0832] By way of examples of nonpeptide libraries, a benzodiazepine library (see e.g., Bunin et al., 1994, Proc. Natl. Acad. Sci. USA 91:4708-4712) can be adapted for use. Peptoid libraries (Simon et al., 1992, Proc. Natl. Acad. Sci. USA 89:9367-9371) can also be used. Another example of a library that can be used, in which the amide functionalities in peptides have been permethylated to generate a chemically transformed combinatorial library, is described by Ostresh et al. (1994, Proc. Natl. Acad. Sci. USA 91:11138-11142).

[0833] The variety of non-peptide libraries that are useful in the present invention is great. For example, Ecker and Crooke, 1995, Bio/Technology 13:351-360 list benzodiazepines, hydantoins, piperazinediones, biphenyls, sugar analogs, beta-mercaptoketones, arylacetic acids, acylpiperidines, benzopyrans, cubanes, xanthines, aminimides, and oxazolones as among the chemical species that form the basis of various libraries.

[0834] Non-peptide libraries can be classified broadly into two types: decorated monomers and oligomers. Decorated monomer libraries employ a relatively simple scaffold structure upon which a variety functional groups is added. Often the scaffold will be a molecule with a known useful pharmacological activity. For example, the scaffold might be the benzodiazepine structure.

[0835] Non-peptide oligomer libraries utilize a large number of monomers that are assembled together in ways that create new shapes that depend on the order of the monomers. Among the monomer units that have been used are carbamates, pyrrolinones, and morpholinos. Peptoids, peptide-like oligomers in which the side chain is attached to the alpha amino group rather than the alpha carbon, form the basis of another version of non-peptide oligomer libraries. The first non-peptide oligomer libraries utilized a single type of monomer and thus contained a repeating backbone. Recent libraries have utilized more than one monomer, giving the libraries added flexibility.

[0836] Screening the libraries can be accomplished by any of a variety of commonly known methods. See, e.g., the following references, which disclose screening of peptide libraries: Parmley and Smith, 1989, Adv. Exp. Med. Biol. 251:215-218; Scott and Smith, 1990, Science 249:386-390; Fowlkes et al., 1992; BioTechniques 13:422-427; Oldenburg et al., 1992, Proc. Natl. Acad. Sci. USA 89:5393-5397; Yu et al., 1994, Cell 76:933-945; Staudt et al., 1988, Science 241:577-580; Bock et al., 1992, Nature 355:564-566; Tuerk et al., 1992, Proc. Natl. Acad. Sci. USA 89:6988-6992; Ellington et al., 1992, Nature 355:850-852; U.S. Pat. No. 5,096,815, U.S. Pat. No. 5,223,409, and U.S. Pat. No. 5,198,346, all to Ladner et al.; Rebar and Pabo, 1993, Science 263:671-673; and CT Publication No. WO 94/18318.

[0837] In a specific embodiment, screening to identify a molecule that binds polypeptides of the invention can be carried out by contacting the library members with polypeptides of the invention immobilized on a solid phase and harvesting those library members that bind to the polypeptides of the invention. Examples of such screening methods, termed “panning” techniques are described by way of example in Parmley and Smith, 1988, Gene 73:305-318; Fowlkes et al., 1992, BioTechniques 13:422-427; PCT Publication No. WO 94/18318; and in references cited herein.

[0838] In another embodiment, the two-hybrid system for selecting interacting proteins in yeast (Fields and Song, 1989, Nature 340:245-246; Chien et al., 1991, Proc. Natl. Acad. Sci. USA 88:9578-9582) can be used to identify molecules that specifically bind to polypeptides of the invention.

[0839] Where the binding molecule is a polypeptide, the polypeptide can be conveniently selected from any peptide library, including random peptide libraries, combinatorial peptide libraries, or biased peptide libraries. The term “biased” is used herein to mean that the method of generating the library is manipulated so as to restrict one or more parameters that govern the diversity of the resulting collection of molecules, in this case peptides.

[0840] Thus, a truly random peptide library would generate a collection of peptides in which the probability of finding a particular amino acid at a given position of the peptide is the same for all 20 amino acids. A bias can be introduced into the library, however, by specifying, for example, that a lysine occur every fifth amino acid or that positions 4, 8, and 9 of a decapeptide library be fixed to include only arginine. Clearly, many types of biases can be contemplated, and the present invention is not restricted to any particular bias. Furthermore, the present invention contemplates specific types of peptide libraries, such as phage displayed peptide libraries and those that utilize a DNA construct comprising a lambda phage vector with a DNA insert.

[0841] As mentioned above, in the case of a binding molecule that is a polypeptide, the polypeptide may have about 6 to less than about 60 amino acid residues, preferably about 6 to about 10 amino acid residues, and most preferably, about 6 to about 22 amino acids. In another embodiment, a binding polypeptide has in the range of 15-100 amino acids, or 20-50 amino acids.

[0842] The selected binding polypeptide can be obtained by chemical synthesis or recombinant expression.

Other Activities

[0843] A polypeptide, polynucleotide, agonist, or antagonist of the present invention, as a result of the ability to stimulate vascular endothelial cell growth, may be employed in treatment for stimulating re-vascularization of ischemic tissues due to various disease conditions such as thrombosis, arteriosclerosis, and other cardiovascular conditions. The polypeptide, polynucleotide, agonist, or antagonist of the present invention may also be employed to stimulate angiogenesis and limb regeneration, as discussed above.

[0844] A polypeptide, polynucleotide, agonist, or antagonist of the present invention may also be employed for treating wounds due to injuries, burns, post-operative tissue repair, and ulcers since they are mitogenic to various cells of different origins, such as fibroblast cells and skeletal muscle cells, and therefore, facilitate the repair or replacement of damaged or diseased tissue.

[0845] A polypeptide, polynucleotide, agonist, or antagonist of the present invention may also be employed stimulate neuronal growth and to treat and prevent neuronal damage which occurs in certain neuronal disorders or neuro-degenerative conditions such as Alzheimer's disease, Parkinson's disease, and AIDS-related complex. A polypeptide, polynucleotide, agonist, or antagonist of the present invention may have the ability to stimulate chondrocyte growth, therefore, they may be employed to enhance bone and periodontal regeneration and aid in tissue transplants or bone grafts.

[0846] A polypeptide, polynucleotide, agonist, or antagonist of the present invention may be also be employed to prevent skin aging due to sunburn by stimulating keratinocyte growth.

[0847] A polypeptide, polynucleotide, agonist, or antagonist of the present invention may also be employed for preventing hair loss, since FGF family members activate hair-forming cells and promotes melanocyte growth. Along the same lines, a polypeptide, polynucleotide, agonist, or antagonist of the present invention may be employed to stimulate growth and differentiation of hematopoietic cells and bone marrow cells when used in combination with other cytokines.

[0848] A polypeptide, polynucleotide, agonist, or antagonist of the present invention may also be employed to maintain organs before transplantation or for supporting cell culture of primary tissues. A polypeptide, polynucleotide, agonist, or antagonist of the present invention may also be employed for inducing tissue of mesodermal origin to differentiate in early embryos.

[0849] A polypeptide, polynucleotide, agonist, or antagonist of the present invention may also increase or decrease the differentiation or proliferation of embryonic stem cells, besides, as discussed above, hematopoietic lineage.

[0850] A polypeptide, polynucleotide, agonist, or antagonist of the present invention may also be used to modulate mammalian characteristics, such as body height, weight, hair color, eye color, skin, percentage of adipose tissue, pigmentation, size, and shape (e.g., cosmetic surgery). Similarly, a polypeptide, polynucleotide, agonist, or antagonist of the present invention may be used to modulate mammalian metabolism affecting catabolism, anabolism, processing, utilization, and storage of energy.

[0851] A polypeptide, polynucleotide, agonist, or antagonist of the present invention may be used to change a mammal's mental state or physical state by influencing biorhythms, caricadic rhythms, depression (including depressive disorders), tendency for violence, tolerance for pain, reproductive capabilities (preferably by Activin or Inhibin-like activity), hormonal or endocrine levels, appetite, libido, memory, stress, or other cognitive qualities.

[0852] A polypeptide, polynucleotide, agonist, or antagonist of the present invention may also be used as a food additive or preservative, such as to increase or decrease storage capabilities, fat content, lipid, protein, carbohydrate, vitamins, minerals, cofactors or other nutritional components.

[0853] The above-recited applications have uses in a wide variety of hosts. Such hosts include, but are not limited to, human, murine, rabbit, goat, guinea pig, camel, horse, mouse, rat, hamster, pig, micro-pig, chicken, goat, cow, sheep, dog, cat, non-human primate, and human. In specific embodiments, the host is a mouse, rabbit, goat, guinea pig, chicken, rat, hamster, pig, sheep, dog or cat. In preferred embodiments, the host is a mammal. In most preferred embodiments, the host is a human.

### Other Preferred Embodiments

[0854] Other preferred embodiments of the claimed invention include an isolated nucleic acid molecule comprising a nucleotide sequence which is at least 95% identical to a sequence of at least about 50 contiguous nucleotides in the nucleotide sequence of SEQ ID NO:X or the complementary strand thereto, the nucleotide sequence as defined in Table 1B or columns 8 and 9 of Table 2 or the complementary strand thereto, and/or cDNA contained in ATCC Deposit No:Z.

[0855] Also preferred is a nucleic acid molecule wherein said sequence of contiguous nucleotides is included in the nucleotide sequence of the portion of SEQ ID NO:X as defined in column 5, “ORF (From-To)”, in Table 1B.

[0856] Also preferred is a nucleic acid molecule wherein said sequence of contiguous nucleotides is included in the nucleotide sequence of the portion of SEQ ID NO:X as defined in columns 8 and 9, “NT From” and “NT To” respectively, in Table 2.

[0857] Also preferred is an isolated nucleic acid molecule comprising a nucleotide sequence which is at least 95% identical to a sequence of at least about 150 contiguous nucleotides in the nucleotide sequence of SEQ ID NO:X or the complementary strand thereto, the nucleotide sequence as defined in Table 1B or columns 8 and 9 of Table 2 or the complementary strand thereto, and/or cDNA contained in ATCC Deposit No:Z.

[0858] Further preferred is an isolated nucleic acid molecule comprising a nucleotide sequence which is at least 95% identical to a sequence of at least about 500 contiguous nucleotides in the nucleotide sequence of SEQ ID NO:X or the complementary strand thereto, the nucleotide sequence as defined in Table 1B or columns 8 and 9 of Table 2 or the complementary strand thereto, and/or cDNA contained in ATCC Deposit No:Z.

[0859] A further preferred embodiment is a nucleic acid molecule comprising a nucleotide sequence which is at least 95% identical to the nucleotide sequence of the portion of SEQ ID NO:X defined in column 5, “ORF (From-To)”, in Table 1B.

[0860] A further preferred embodiment is a nucleic acid molecule comprising a nucleotide sequence which is at least 95% identical to the nucleotide sequence of the portion of SEQ ID NO:X defined in columns 8 and 9, “NT From” and “NT To”, respectively, in Table 2.

[0861] A further preferred embodiment is an isolated nucleic acid molecule comprising a nucleotide sequence which is at least 95% identical to the complete nucleotide sequence of SEQ ID NO:X or the complementary strand thereto, the nucleotide sequence as defined in Table 1B or columns 8 and 9 of Table 2 or the complementary strand thereto, and/or cDNA contained in ATCC Deposit No:Z.

[0862] Also preferred is an isolated nucleic acid molecule which hybridizes under stringent hybridization conditions to a nucleic acid molecule comprising a nucleotide sequence of SEQ ID NO:X or the complementary strand thereto, the nucleotide sequence as defined in Table 1B or columns 8 and 9 of Table 2 or the complementary strand thereto, and/or cDNA contained in ATCC Deposit No:Z, wherein said nucleic acid molecule which hybridizes does not hybridize under stringent hybridization conditions to a nucleic acid molecule having a nucleotide sequence consisting of only A residues or of only T residues.

[0863] Also preferred is a composition of matter comprising a DNA molecule which comprises the cDNA contained in ATCC Deposit No:Z.

[0864] Also preferred is an isolated nucleic acid molecule comprising a nucleotide sequence which is at least 95% identical to a sequence of at least 50 contiguous nucleotides of the cDNA sequence contained in ATCC Deposit No:Z.

[0865] Also preferred is an isolated nucleic acid molecule, wherein said sequence of at least 50 contiguous nucleotides is included in the nucleotide sequence of an open reading frame sequence encoded by cDNA contained in ATCC Deposit No:Z.

[0866] Also preferred is an isolated nucleic acid molecule comprising a nucleotide sequence which is at least 95% identical to sequence of at least 150 contiguous nucleotides in the nucleotide sequence encoded by cDNA contained in ATCC Deposit No:Z.

[0867] A further preferred embodiment is an isolated nucleic acid molecule comprising a nucleotide sequence which is at least 95% identical to sequence of at least 500 contiguous nucleotides in the nucleotide sequence encoded by cDNA contained in ATCC Deposit No:Z.

[0868] A further preferred embodiment is an isolated nucleic acid molecule comprising a nucleotide sequence which is at least 95% identical to the complete nucleotide sequence encoded by cDNA contained in ATCC Deposit No:Z.

[0869] A further preferred embodiment is a method for detecting in a biological sample a nucleic acid molecule comprising a nucleotide sequence which is at least 95% identical to a sequence of at least 50 contiguous nucleotides in a sequence selected from the group consisting of: a nucleotide sequence of SEQ ID NO:X or the complementary strand thereto; the nucleotide sequence as defined in Table 1B or columns 8 and 9 of Table 2 or the complementary strand thereto; and a nucleotide sequence encoded by cDNA contained in ATCC Deposit No:Z; which method comprises a step of comparing a nucleotide sequence of at least one nucleic acid molecule in said sample with a sequence selected from said group and determining whether the sequence of said nucleic acid molecule in said sample is at least 95% identical to said selected sequence.

[0870] Also preferred is the above method wherein said step of comparing sequences comprises determining the extent of nucleic acid hybridization between nucleic acid molecules in said sample and a nucleic acid molecule comprising said sequence selected from said group. Similarly, also preferred is the above method wherein said step of comparing sequences is performed by comparing the nucleotide sequence determined from a nucleic acid molecule in said sample with said sequence selected from said group. The nucleic acid molecules can comprise DNA molecules or RNA molecules.

[0871] A further preferred embodiment is a method for identifying the species, tissue or cell type of a biological sample which method comprises a step of detecting nucleic acid molecules in said sample, if any, comprising a nucleotide sequence that is at least 95% identical to a sequence of at least 50 contiguous nucleotides in a sequence selected from the group consisting of: a nucleotide sequence of SEQ ID NO:X or the complementary strand thereto; the nucleotide sequence as defined in Table 1B or columns 8 and 9 of Table 2 or the complementary strand thereto; and a nucleotide sequence of the cDNA contained in ATCC Deposit No:Z.

[0872] The method for identifying the species, tissue or cell type of a biological sample can comprise a step of detecting nucleic acid molecules comprising a nucleotide sequence in a panel of at least two nucleotide sequences, wherein at least one sequence in said panel is at least 95% identical to a sequence of at least 50 contiguous nucleotides in a sequence selected from said group.

[0873] Also preferred is a method for diagnosing in a subject a pathological condition associated with abnormal structure or expression of a nucleotide sequence of SEQ ID NO:X or the complementary strand thereto; the nucleotide sequence as defined in Table 1B or columns 8 and 9 of Table 2 or the complementary strand thereto; or the cDNA contained in ATCC Deposit No:Z which encodes a protein, wherein the method comprises a step of detecting in a biological sample obtained from said subject nucleic acid molecules, if any, comprising a nucleotide sequence that is at least 95% identical to a sequence of at least 50 contiguous nucleotides in a sequence selected from the group consisting of: a nucleotide sequence of SEQ ID NO:X or the complementary strand thereto; the nucleotide sequence as defined in Table 1B or columns 8 and 9 of Table 2 or the complementary strand thereto; and a nucleotide sequence of cDNA contained in ATCC Deposit No:Z.

[0874] The method for diagnosing a pathological condition can comprise a step of detecting nucleic acid molecules comprising a nucleotide sequence in a panel of at least two nucleotide sequences, wherein at least one sequence in said panel is at least 95% identical to a sequence of at least 50 contiguous nucleotides in a sequence selected from said group.

[0875] Also preferred is a composition of matter comprising isolated nucleic acid molecules wherein the nucleotide sequences of said nucleic acid molecules comprise a panel of at least two nucleotide sequences, wherein at least one sequence in said panel is at least 95% identical to a sequence of at least 50 contiguous nucleotides in a sequence selected from the group consisting of: a nucleotide sequence of SEQ ID NO:X or the complementary strand thereto; the nucleotide sequence as defined in Table 1B or columns 8 and 9 of Table 2 or the complementary strand thereto; and a nucleotide sequence encoded by cDNA contained in ATCC Deposit No:Z. The nucleic acid molecules can comprise DNA molecules or RNA molecules.

[0876] Also preferred is a composition of matter comprising isolated nucleic acid molecules wherein the nucleotide sequences of said nucleic acid molecules comprise a DNA microarray or “chip” of at least 1, 2, 3, 4, 5, 6, 7, 8, 9, 10, 15, 20, 25, 30, 40, 50, 100, 150, 200, 250, 300, 500, 1000, 2000, 3000, or 4000 nucleotide sequences, wherein at least one sequence in said DNA microarray or “chip” is at least 95% identical to a sequence of at least 50 contiguous nucleotides in a sequence selected from the group consisting of: a nucleotide sequence of SEQ ID NO:X wherein X is any integer as defined in Table 1A and/or 1B; and a nucleotide sequence encoded by a human cDNA clone identified by a cDNA “Clone ID” in Table 1A and/or 1B.

[0877] Also preferred is an isolated polypeptide comprising an amino acid sequence at least 90% identical to a sequence of at least about 10 contiguous amino acids in the polypeptide sequence of SEQ ID NO:Y; a polypeptide encoded by SEQ ID NO:X or the complementary strand thereto; the polypeptide encoded by the nucleotide sequence as defined in columns 8 and 9 of Table 2; and/or a polypeptide encoded by cDNA contained in ATCC Deposit No:Z.

[0878] Also preferred is an isolated polypeptide comprising an amino acid sequence at least 95% identical to a sequence of at least about 30 contiguous amino acids in the amino acid sequence of SEQ ID NO:Y; a polypeptide encoded by SEQ ID NO:X or the complementary strand thereto; the polypeptide encoded by the nucleotide sequence as defined in columns 8 and 9 of Table 2; and/or a polypeptide encoded by cDNA contained in ATCC Deposit No:Z.

[0879] Further preferred is an isolated polypeptide comprising an amino acid sequence at least 95% identical to a sequence of at least about 100 contiguous amino acids in the amino acid sequence of SEQ ID NO:Y; a polypeptide encoded by SEQ ID NO:X or the complementary strand thereto; the polypeptide encoded by the nucleotide sequence as defined in columns 8 and 9 of Table 2; and/or a polypeptide encoded by cDNA contained in ATCC Deposit No:Z.

[0880] Further preferred is an isolated polypeptide comprising an amino acid sequence at least 95% identical to the complete amino acid sequence of SEQ ID NO:Y; a polypeptide encoded by SEQ ID NO:X or the complementary strand thereto; the polypeptide encoded by the nucleotide sequence as defined in columns 8 and 9 of Table 2; and/or a polypeptide encoded by cDNA contained in ATCC Deposit No:Z.

[0881] Further preferred is an isolated polypeptide comprising an amino acid sequence at least 90% identical to a sequence of at least about 10 contiguous amino acids in the complete amino acid sequence of a polypeptide encoded by contained in ATCC Deposit No:Z Also preferred is a polypeptide wherein said sequence of contiguous amino acids is included in the amino acid sequence of a portion of said polypeptide encoded by cDNA contained in ATCC Deposit No:Z; a polypeptide encoded by SEQ ID NO:X or the complementary strand thereto; the polypeptide encoded by the nucleotide sequence as defined in columns 8 and 9 of Table 2; and/or the polypeptide sequence of SEQ ID NO:Y.

[0882] Also preferred is an isolated polypeptide comprising an amino acid sequence at least 95% identical to a sequence of at least about 30 contiguous amino acids in the amino acid sequence of a polypeptide encoded by the cDNA contained in ATCC Deposit No:Z.

[0883] Also preferred is an isolated polypeptide comprising an amino acid sequence at least 95% identical to a sequence of at least about 100 contiguous amino acids in the amino acid sequence of a polypeptide encoded by cDNA contained in ATCC Deposit No:Z.

[0884] Also preferred is an isolated polypeptide comprising an amino acid sequence at least 95% identical to the amino acid sequence of a polypeptide encoded by the cDNA contained in ATCC Deposit No:Z.

[0885] Further preferred is an isolated antibody which binds specifically to a polypeptide comprising an amino acid sequence that is at least 90% identical to a sequence of at least 10 contiguous amino acids in a sequence selected from the group consisting of: a polypeptide sequence of SEQ ID NO:Y; a polypeptide encoded by SEQ ID NO:X or the complementary strand thereto; the polypeptide encoded by the nucleotide sequence as defined in columns 8 and 9 of Table 2; and a polypeptide encoded by the cDNA contained in ATCC Deposit No:Z.

[0886] Further preferred is a method for detecting in a biological sample a polypeptide comprising an amino acid sequence which is at least 90% identical to a sequence of at least 10 contiguous amino acids in a sequence selected from the group consisting of: a polypeptide sequence of SEQ ID NO:Y; a polypeptide encoded by SEQ ID NO:X or the complementary strand thereto; the polypeptide encoded by the nucleotide sequence as defined in columns 8 and 9 of Table 2; and a polypeptide encoded by the cDNA contained in ATCC Deposit No:Z; which method comprises a step of comparing an amino acid sequence of at least one polypeptide molecule in said sample with a sequence selected from said group and determining whether the sequence of said polypeptide molecule in said sample is at least 90% identical to said sequence of at least 10 contiguous amino acids.

[0887] Also preferred is the above method wherein said step of comparing an amino acid sequence of at least one polypeptide molecule in said sample with a sequence selected from said group comprises determining the extent of specific binding of polypeptides in said sample to an antibody which binds specifically to a polypeptide comprising an amino acid sequence that is at least 90% identical to a sequence of at least 10 contiguous amino acids in a sequence selected from the group consisting of: a polypeptide sequence of SEQ ID NO:Y; a polypeptide encoded by SEQ ID NO:X or the complementary strand thereto; the polypeptide encoded by the nucleotide sequence as defined in columns 8 and 9 of Table 2; and a polypeptide encoded by the cDNA contained in ATCC Deposit No:Z.

[0888] Also preferred is the above method wherein said step of comparing sequences is performed by comparing the amino acid sequence determined from a polypeptide molecule in said sample with said sequence selected from said group.

[0889] Also preferred is a method for identifying the species, tissue or cell type of a biological sample which method comprises a step of detecting polypeptide molecules in said sample, if any, comprising an amino acid sequence that is at least 90% identical to a sequence of at least 10 contiguous amino acids in a sequence selected from the group consisting of: polypeptide sequence of SEQ ID NO:Y; a polypeptide encoded by SEQ ID NO:X or the complementary strand thereto; the polypeptide encoded by the nucleotide sequence as defined in columns 8 and 9 of Table 2; and a polypeptide encoded by the cDNA contained in ATCC Deposit No:Z.

[0890] Also preferred is the above method for identifying the species, tissue or cell type of a biological sample, which method comprises a step of detecting polypeptide molecules comprising an amino acid sequence in a panel of at least two amino acid sequences, wherein at least one sequence in said panel is at least 90% identical to a sequence of at least 10 contiguous amino acids in a sequence selected from the above group.

[0891] Also preferred is a method for diagnosing in a subject a pathological condition associated with abnormal structure or expression of a nucleic acid sequence identified in Table 1A, 1B or Table 2 encoding a polypeptide, which method comprises a step of detecting in a biological sample obtained from said subject polypeptide molecules comprising an amino acid sequence in a panel of at least two amino acid sequences, wherein at least one sequence in said panel is at least 90% identical to a sequence of at least 10 contiguous amino acids in a sequence selected from the group consisting of: polypeptide sequence of SEQ ID NO:Y; a polypeptide encoded by SEQ ID NO:X or the complementary strand thereto; the polypeptide encoded by the nucleotide sequence as defined in columns 8 and 9 of Table 2; and a polypeptide encoded by the cDNA contained in ATCC Deposit No:Z.

[0892] In any of these methods, the step of detecting said polypeptide molecules includes using an antibody.

[0893] Also preferred is an isolated nucleic acid molecule comprising a nucleotide sequence which is at least 95% identical to a nucleotide sequence encoding a polypeptide wherein said polypeptide comprises an amino acid sequence that is at least 90% identical to a sequence of at least 10 contiguous amino acids in a sequence selected from the group consisting of: polypeptide sequence of SEQ ID NO:Y; a polypeptide encoded by SEQ ID NO:X or the complementary strand thereto; the polypeptide encoded by the nucleotide sequence as defined in columns 8 and 9 of Table 2; and a polypeptide encoded by the cDNA contained in ATCC Deposit No:Z.

[0894] Also preferred is an isolated nucleic acid molecule, wherein said nucleotide sequence encoding a polypeptide has been optimized for expression of said polypeptide in a prokaryotic host.

[0895] Also preferred is a polypeptide molecule, wherein said polypeptide comprises an amino acid sequence selected from the group consisting of: polypeptide sequence of SEQ ID NO:Y; a polypeptide encoded by SEQ ID NO:X or the complementary strand thereto; the polypeptide encoded by the nucleotide sequence as defined in columns 8 and 9 of Table 2; and a polypeptide encoded by the cDNA contained in ATCC Deposit No:Z.

[0896] Further preferred is a method of making a recombinant vector comprising inserting any of the above isolated nucleic acid molecule into a vector. Also preferred is the recombinant vector produced by this method. Also preferred is a method of making a recombinant host cell comprising introducing the vector into a host cell, as well as the recombinant host cell produced by this method.

[0897] Also preferred is a method of making an isolated polypeptide comprising culturing this recombinant host cell under conditions such that said polypeptide is expressed and recovering said polypeptide. Also preferred is this method of making an isolated polypeptide, wherein said recombinant host cell is a eukaryotic cell and said polypeptide is a human protein comprising an amino acid sequence selected from the group consisting of: polypeptide sequence of SEQ ID NO:Y; a polypeptide encoded by SEQ ID NO:X or the complementary strand thereto; the polypeptide encoded by the nucleotide sequence as defined in columns 8 and 9 of Table 2; and a polypeptide encoded by the cDNA contained in ATCC Deposit No:Z. The isolated polypeptide produced by this method is also preferred.

[0898] Also preferred is a method of treatment of an individual in need of an increased level of a protein activity, which method comprises administering to such an individual a Therapeutic comprising an amount of an isolated polypeptide, polynucleotide, immunogenic fragment or analogue thereof, binding agent, antibody, or antigen binding fragment of the claimed invention effective to increase the level of said protein activity in said individual.

[0899] Also preferred is a method of treatment of an individual in need of a decreased level of a protein activity, which method comprised administering to such an individual a Therapeutic comprising an amount of an isolated polypeptide, polynucleotide, immunogenic fragment or analogue thereof, binding agent, antibody, or antigen binding fragment of the claimed invention effective to decrease the level of said protein activity in said individual.

[0900] Also preferred is a method of treatment of an individual in need of a specific delivery of toxic compositions to diseased cells (e.g., tumors, leukemias or lymphomas), which method comprises administering to such an individual a Therapeutic comprising an amount of an isolated polypeptide of the invention, including, but not limited to a binding agent, or antibody of the claimed invention that are associated with toxin or cytotoxic prodrugs.

[0901] Having generally described the invention, the same will be more readily understood by reference to the following examples, which are provided by way of illustration and are not intended as limiting.

Description of Table 6

[0902] Table 6 summarizes some of the ATCC Deposits, Deposit dates, and ATCC designation numbers of deposits made with the ATCC in connection with the present application. These deposits were made in addition to those described in the Table 1A.

TABLE 6

| ATCC Deposits | Deposit Date | ATCC Designation Number |
|---|---|---|
| LP01, LP02, LP03, LP04, | May-20-97 | 209059, 209060, 209061, |
| LP05, LP06, LP07, LP08, | | 209062, 209063, 209064, |
| LP09, LP10, LP11, | | 209065, 209066, 209067, |
| | | 209068, 209069 |
| LP12 | Jan-12-98 | 209579 |
| LP13 | Jan-12-98 | 209578 |
| LP14 | Jul-16-98 | 203067 |
| LP15 | Jul-16-98 | 203068 |
| LP16 | Feb-1-99 | 203609 |
| LP17 | Feb-1-99 | 203610 |
| LP20 | Nov-17-98 | 203485 |
| LP21 | Jun-18-99 | PTA-252 |
| LP22 | Jun-18-99 | PTA-253 |
| LP23 | Dec-22-99 | PTA-1081 |

### EXAMPLES

### Example 1

### Isolation of a Selected cDNA Clone From the Deposited Sample

[0903] Each ATCC Deposit No:Z is contained in a plasmid vector. Table 7 identifies the vectors used to construct the cDNA library from which each clone was isolated. In many cases, the vector used to construct the library is a phage vector from which a plasmid has been excised.

[0904] The following correlates the related plasmid for each phage vector used in constructing the cDNA library. For example, where a particular clone is identified in Table 7 as being isolated in the vector “Lambda Zap,” the corresponding deposited clone is in “pBluescript.”

Vector Used to Construct Library Corresponding Deposited Plasmid

| | |
|---|---|
| Lambda Zap | pBluescript (pBS) |
| Uni-Zap XR | pBluescript (pBS) |
| Zap Express | pBK |
| lafmid BA | plafmid BA |
| pSport1 | pSport1 |
| pCMVSport 2.0 | pCMVSport 2.0 |
| pCMVSport 3.0 | pCMVSport 3.0 |
| pCR ® 2.1 | pCR ® 2.1 |

[0905] Vectors Lambda Zap (U.S. Pat. Nos. 5,128,256 and 5,286,636), Uni-Zap XR (U.S. Pat. Nos. 5,128,256 and 5,286,636), Zap Express (U.S. Pat. Nos. 5,128,256 and 5,286,636), pBluescript (pBS) (Short, J. M. et al., Nucleic Acids Res. 16:7583-7600 (1988); Alting-Mees, M. A. and Short, J. M., Nucleic Acids Res. 17:9494 (1989)) and pBK (Alting-Mees, M. A. et al., Strategies 5:58-61 (1992)) are commercially available from Stratagene Cloning Systems, Inc., 11011 N. Torrey Pines Road, La Jolla, Calif., 92037. pBS contains an ampicillin resistance gene and pBK contains a neomycin resistance gene. Both can be transformed into E. coli strain XL-1 Blue, also available from Stratagene. pBS comes in 4 forms SK+, SK−, KS+ and KS. The S and K refers to the orientation of the polylinker to the T7 and T3 primer sequences which flank the polylinker region (“S” is for Sacl and “K” is for KpnI which are the first sites on each respective end of the linker). “+” or “−” refer to the orientation of the f1 origin of replication (“ori”), such that in one orientation, single stranded rescue initiated from the f1 ori generates sense strand DNA and in the other, antisense.

[0906] Vectors pSport1, pCMVSport 2.0 and pCMVSport 3.0, were obtained from Life Technologies, Inc., P.O. Box 6009, Gaithersburg, Md. 20897. All Sport vectors contain an ampicillin resistance gene and may be transformed into E. coli strain DH10B, also available from Life Technologies. (See, for instance, Gruber, C. E., et al., Focus 15:59 (1993)). Vector lafmid BA (Bento Soares, Columbia University, NY) contains an ampicillin resistance gene and can be transformed into E. coli strain XL-1 Blue. Vector pCR® 2.1, which is available from Invitrogen, 1600 Faraday Avenue, Carlsbad, Calif. 92008, contains an ampicillin resistance gene and may be transformed into E. coli strain DH10B, available from Life Technologies. (See, for instance, Clark, J. M., Nuc. Acids Res. 16:9677-9686 (1988) and Mead, D. et al., Bio/Technology 9: (1991)). Preferably, a polynucleotide of the present invention does not comprise the phage vector sequences identified for the particular clone in Table 7, as well as the corresponding plasmid vector sequences designated above.

[0907] The deposited material in the sample assigned the ATCC Deposit Number cited by reference to Table 1A, Table 2, Table 6 and Table 7 for any given cDNA clone also may contain one or more additional plasmids, each comprising a cDNA clone different from that given clone. Thus, deposits sharing the same ATCC Deposit Number contain at least a plasmid for each ATCC Deposit No:Z.

TABLE 7

| | | | ATCC |
|---|---|---|---|
| Libraries owned by Catalog | Catalog Description | Vector | Deposit |
| HUKA HUKB HUKC HUKD | Human Uterine Cancer | Lambda ZAP II | LP01 |
| HUKE HUKF HUKG | | | |
| HCNA HCNB | Human Colon | Lambda Zap II | LP01 |
| HFFA | Human Fetal Brain, random | Lambda Zap II | LP01 |
| | primed | | |
| HTWA | Resting T-Cell | Lambda ZAP II | LP01 |
| HBQA | Early Stage Human Brain, | Lambda ZAP II | LP01 |
| | random primed | | |
| HLMB HLMF HLMG HLMH | breast lymph node CDNA | Lambda ZAP II | LP01 |
| HLMI HLMJ HLMM HLMN | library | | |
| HCQA HCQB | human colon cancer | Lamda ZAP II | LP01 |
| HMEA HMEC HMED HMEE | Human Microvascular | Lambda ZAP II | LP01 |
| HMEF HMEG HMEI HMEJ | Endothelial Cells, fract. A | | |
| HMEK HMEL | | | |
| HUSA HUSC | Human Umbilical Vein | Lambda ZAP II | LP01 |
| | Endothelial Cells, fract. A | | |
| HLQA HLQB | Hepatocellular Tumor | Lambda ZAP II | LP01 |
| HHGA HHGB HHGC HHGD | Hemangiopericytoma | Lambda ZAP II | LP01 |
| HSDM | Human Striatum Depression, re- | Lambda ZAP II | LP01 |
| | rescue | | |
| HUSH | H Umbilical Vein Endothelial | Lambda ZAP II | LP01 |
| | Cells, frac A, re-excision | | |
| HSGS | Salivary gland, subtracted | Lambda ZAP II | LP01 |
| HFXA HFXB HFXC HFXD | Brain frontal cortex | Lambda ZAP II | LP01 |
| HFXE HFXF HFXG HFXH | | | |
| HPQA HPQB HPQC | PERM TF274 | Lambda ZAP II | LP01 |
| HFXJ HFXK | Brain Frontal Cortex, re-excision | Lambda ZAP II | LP01 |
| HCWA HCWB HCWC HCWD | CD34 positive cells (Cord | ZAP Express | LP02 |
| HCWE HCWF HCWG HCWH | Blood) | | |
| HCWI HCWJ HCWK | | | |
| HCUA HCUB HCUC | CD34 depleted Buffy Coat | ZAP Express | LP02 |
| | (Cord Blood) | | |
| HRSM | A-14 cell line | ZAP Express | LP02 |
| HRSA | A1-CELL LINE | ZAP Express | LP02 |
| HCUD HCUE HCUF HCUG | CD34 depleted Buffy Coat | ZAP Express | LP02 |
| HCUH HCUI | (Cord Blood), re-excision | | |
| HBXE HBXF HBXG | H. Whole Brain #2, re-excision | ZAP Express | LP02 |
| HRLM | L8 cell line | ZAP Express | LP02 |
| HBXA HBXB HBXC HBXD | Human Whole Brain #2 - Oligo | ZAP Express | LP02 |
| | dT >1.5 Kb | | |
| HUDA HUDB HUDC | Testes | ZAP Express | LP02 |
| HHTM HHTN HHTO | H. hypothalamus, frac A; re- | ZAP Express | LP02 |
| | excision | | |
| HHTL | H. hypothalamus, frac A | ZAP Express | LP02 |
| HASA HASD | Human Adult Spleen | Uni-ZAP XR | LP03 |
| HFKC HFKD HFKE HFKF | Human Fetal Kidney | Uni-ZAP XR | LP03 |
| HFKG | | | |
| HE8A HE8B HE8C HE8D | Human 8 Week Whole Embryo | Uni-ZAP XR | LP03 |
| HE8E HE8F HE8M HE8N | | | |
| HGBA HGBD HGBE HGBF | Human Gall Bladder | Uni-ZAP XR | LP03 |
| HGBG HGBH HGBI | | | |
| HLHA HLHB HLHC HLHD | Human Fetal Lung III | Uni-ZAP XR | LP03 |
| HLHE HLHF HLHG HLHH | | | |
| HLHQ | | | |
| HPMA HPMB HPMC HPMD | Human Placenta | Uni-ZAP XR | LP03 |
| HPME HPMF HPMG HPMH | | | |
| HPRA HPRB HPRC HPRD | Human Prostate | Uni-ZAP XR | LP03 |
| HSIA HSIC HSID HSIE | Human Adult Small Intestine | Uni-ZAP XR | LP03 |
| HTEA HTEB HTEC HTED | Human Testes | Uni-ZAP XR | LP03 |
| HTEE HTEF HTEG HTEH | | | |
| HTEI HTEJ HTEK | | | |
| HTPA HTPB HTPC HTPD | Human Pancreas Tumor | Uni-ZAP XR | LP03 |
| HTPE | | | |
| HTTA HTTB HTTC HTTD | Human Testes Tumor | Uni-ZAP XR | LP03 |
| HTTE HTTF | | | |
| HAPA HAPB HAPC HAPM | Human Adult Pulmonary | Uni-ZAP XR | LP03 |
| HETA HETB HETC HETD | Human Endometrial Tumor | Uni-ZAP XR | LP03 |
| HETE HETF HETG HETH | | | |
| HETI | | | |
| HHFB HHFC HHFD HHFE | Human Fetal Heart | Uni-ZAP XR | LP03 |
| HHFF HHFG HHFH HHFI | | | |
| HHPB HHPC HHPD HHPE | Human Hippocampus | Uni-ZAP XR | LP03 |
| HHPF HHPG HHPH | | | |
| HCE1 HCE2 HCE3 HCE4 | Human Cerebellum | Uni-ZAP XR | LP03 |
| HCE5 HCEB HCEC HCED | | | |
| HCEE HCEF HCEG | | | |
| HUVB HUVC HUVD HUVE | Human Umbilical Vein, Endo. | Uni-ZAP XR | LP03 |
| | remake | | |
| HSTA HSTB HSTC HSTD | Human Skin Tumor | Uni-ZAP XR | LP03 |
| HTAA HTAB HTAC HTAD | Human Activated T-Cells | Uni-ZAP XR | LP03 |
| HTAE | | | |
| HFEA HFEB HFEC | Human Fetal Epithelium (Skin) | Uni-ZAP XR | LP03 |
| HJPA HJPB HJPC HJPD | HUMAN JURKAT | Uni-ZAP XR | LP03 |
| | MEMBRANE BOUND | | |
| | POLYSOMES | | |
| HESA | Human epithelioid sarcoma | Uni-Zap XR | LP03 |
| HLTA HLTB HLTC HLTD | Human T-Cell Lymphoma | Uni-ZAP XR | LP03 |
| HLTE HLTF | | | |
| HFTA HFTB HFTC HFTD | Human Fetal Dura Mater | Uni-ZAP XR | LP03 |
| HRDA HRDB HRDC HRDD | Human Rhabdomyosarcoma | Uni-ZAP XR | LP03 |
| HRDE HRDF | | | |
| HCAA HCAB HCAC | Cem cells cyclohexamide treated | Uni-ZAP XR | LP03 |
| HRGA HRGB HRGC HRGD | Raji Cells, cyclohexamide | Uni-ZAP XR | LP03 |
| | treated | | |
| HSUA HSUB HSUC HSUM | Supt Cells, cyclohexamide | Uni-ZAP XR | LP03 |
| | treated | | |
| HT4A HT4C HT4D | Activated T-Cells, 12 hrs. | Uni-ZAP XR | LP03 |
| HE9A HE9B HE9C HE9D | Nine Week Old Early Stage | Uni-ZAP XR | LP03 |
| HE9E HE9F HE9G HE9H | Human | | |
| HE9M HE9N | | | |
| HATA HATB HATC HATD | Human Adrenal Gland Tumor | Uni-ZAP XR | LP03 |
| HATE | | | |
| HT5A | Activated T-Cells, 24 hrs. | Uni-ZAP XR | LP03 |
| HFGA HFGM | Human Fetal Brain | Uni-ZAP XR | LP03 |
| HNEA HNEB HNEC HNED | Human Neutrophil | Uni-ZAP XR | LP03 |
| HNEE | | | |
| HBGB HBGD | Human Primary Breast Cancer | Uni-ZAP XR | LP03 |
| HBNA HBNB | Human Normal Breast | Uni-ZAP XR | LP03 |
| HCAS | Cem Cells, cyclohexamide | Uni-ZAP XR | LP03 |
| | treated, subtra | | |
| HHPS | Human Hippocampus, | pBS | LP03 |
| | subtracted | | |
| HKCS HKCU | Human Colon Cancer, | pBS | LP03 |
| | subtracted | | |
| HRGS | Raji cells, cyclohexamide | pBS | LP03 |
| | treated, subtracted | | |
| HSUT | Supt cells, cyclohexamide | pBS | LP03 |
| | treated, differentially expressed | | |
| HT4S | Activated T-Cells, 12 hrs, | Uni-ZAP XR | LP03 |
| | subtracted | | |
| HCDA HCDB HCDC HCDD | Human Chondrosarcoma | Uni-ZAP XR | LP03 |
| HCDE | | | |
| HOAA HOAB HOAC | Human Osteosarcoma | Uni-ZAP XR | LP03 |
| HTLA HTLB HTLC HTLD | Human adult testis, large inserts | Uni-ZAP XR | LP03 |
| HTLE HTLF | | | |
| HLMA HLMC HLMD | Breast Lymph node cDNA | Uni-ZAP XR | LP03 |
| | library | | |
| H6EA H6EB H6EC | HL-60, PMA 4 H | Uni-ZAP XR | LP03 |
| HTXA HTXB HTXC HTXD | Activated T-Cell | Uni-ZAP XR | LP03 |
| HTXE HTXF HTXG HTXH | (12 hs)/Thiouridine labelledEco | | |
| HNFA HNFB HNFC HNFD | Human Neutrophil, Activated | Uni-ZAP XR | LP03 |
| HNFE HNFF HNFG HNFH | | | |
| HNFJ | | | |
| HTOB HTOC | HUMAN TONSILS, | Uni-ZAP XR | LP03 |
| | FRACTION 2 | | |
| HMGB | Human OB MG63 control | Uni-ZAP XR | LP03 |
| | fraction I | | |
| HOPB | Human OB HOS control fraction I | Uni-ZAP XR | LP03 |
| HORB | Human OB HOS treated (10 nM | Uni-ZAP XR | LP03 |
| | E2) fraction I | | |
| HSVA HSVB HSVC | Human Chronic Synovitis | Uni-ZAP XR | LP03 |
| HROA | HUMAN STOMACH | Uni-ZAP XR | LP03 |
| HBJA HBJB HBJC HBJD HBJE | HUMAN B CELL | Uni-ZAP XR | LP03 |
| HBJF HBJG HBJH HBJI HBJJ | LYMPHOMA | | |
| HBJK | | | |
| HCRA HCRB HCRC | human corpus colosum | Uni-ZAP XR | LP03 |
| HODA HODB HODC HODD | human ovarian cancer | Uni-ZAP XR | LP03 |
| HDSA | Dermatofibrosarcoma | Uni-ZAP XR | LP03 |
| | Protuberance | | |
| HMWA HMWB HMWC | Bone Marrow Cell Line | Uni-ZAP XR | LP03 |
| HMWD HMWE HMWF | (R54; 11) | | |
| HMWG HMWH HMWI HMWJ | | | |
| HSOA | stomach cancer (human) | Uni-ZAP XR | LP03 |
| HERA | SKIN | Uni-ZAP XR | LP03 |
| HMDA | Brain-medulloblastoma | Uni-ZAP XR | LP03 |
| HGLA HGLB HGLD | Glioblastoma | Uni-ZAP XR | LP03 |
| HEAA | H. Atrophic Endometrium | Uni-ZAP XR | LP03 |
| HBCA HBCB | H. Lymph node breast Cancer | Uni-ZAP XR | LP03 |
| HPWT | Human Prostate BPH, re- | Uni-ZAP XR | LP03 |
| | excision | | |
| HFVG HFVH HFVI | Fetal Liver, subtraction II | pBS | LP03 |
| HNFI | Human Neutrophils, Activated, | pBS | LP03 |
| | re-excision | | |
| HBMB HBMC HBMD | Human Bone Marrow, re- | pBS | LP03 |
| | excision | | |
| HKML HKMM HKMN | H. Kidney Medulla, re-excision | pBS | LP03 |
| HKIX HKIY | H. Kidney Cortex, subtracted | pBS | LP03 |
| HADT | H. Amygdala Depression, | pBS | LP03 |
| | subtracted | | |
| H6AS | Hl-60, untreated, subtracted | Uni-ZAP XR | LP03 |
| H6ES | HL-60, PMA 4 H, subtracted | Uni-ZAP XR | LP03 |
| H6BS | HL-60, RA 4 h, Subtracted | Uni-ZAP XR | LP03 |
| H6CS | HL-60, PMA 1 d, subtracted | Uni-ZAP XR | LP03 |
| HTXJ HTXK | Activated T- | Uni-ZAP XR | LP03 |
| | cell(12 h)/Thiouridine-re- | | |
| | excision | | |
| HMSA HMSB HMSC HMSD | Monocyte activated | Uni-ZAP XR | LP03 |
| HMSE HMSF HMSG HMSH | | | |
| HMSI HMSJ HMSK | | | |
| HAGA HAGB HAGC HAGD | Human Amygdala | Uni-ZAP XR | LP03 |
| HAGE HAGF | | | |
| HSRA HSRB HSRE | STROMAL - | Uni-ZAP XR | LP03 |
| | OSTEOCLASTOMA | | |
| HSRD HSRF HSRG HSRH | Human Osteoclastoma Stromal | Uni-ZAP XR | LP03 |
| | Cells - unamplified | | |
| HSQA HSQB HSQC HSQD | Stromal cell TF274 | Uni-ZAP XR | LP03 |
| HSQE HSQF HSQG | | | |
| HSKA HSKB HSKC HSKD | Smooth muscle, serum treated | Uni-ZAP XR | LP03 |
| HSKE HSKF HSKZ | | | |
| HSLA HSLB HSLC HSLD | Smooth muscle, control | Uni-ZAP XR | LP03 |
| HSLE HSLF HSLG | | | |
| HSDA HSDD HSDE HSDF | Spinal cord | Uni-ZAP XR | LP03 |
| HSDG HSDH | | | |
| HPWS | Prostate-BPH subtracted II | pBS | LP03 |
| HSKW HSKX HSKY | Smooth Muscle - HASTE | pBS | LP03 |
| | normalized | | |
| HFPB HFPC HFPD | H. Frontal cortex, epileptic; re- | Uni-ZAP XR | LP03 |
| | excision | | |
| HSDI HSDJ HSDK | Spinal Cord, re-excision | Uni-ZAP XR | LP03 |
| HSKN HSKO | Smooth Muscle Serum Treated, | pBS | LP03 |
| | Norm | | |
| HSKG HSKH HSKI | Smooth muscle, serum | pBS | LP03 |
| | induced, re-exc | | |
| HFCA HFCB HFCC HFCD | Human Fetal Brain | Uni-ZAP XR | LP04 |
| HFCE HFCF | | | |
| HPTA HPTB HPTD | Human Pituitary | Uni-ZAP XR | LP04 |
| HTHB HTHC HTHD | Human Thymus | Uni-ZAP XR | LP04 |
| HE6B HE6C HE6D HE6E HE6F | Human Whole Six Week Old | Uni-ZAP XR | LP04 |
| HE6G HE6S | Embryo | | |
| HSSA HSSB HSSC HSSD | Human Synovial Sarcoma | Uni-ZAP XR | LP04 |
| HSSE HSSF HSSG HSSH HSSI | | | |
| HSSJ HSSK | | | |
| HE7T | 7 Week Old Early Stage Human, | Uni-ZAP XR | LP04 |
| | subtracted | | |
| HEPA HEPB HEPC | Human Epididymus | Uni-ZAP XR | LP04 |
| HSNA HSNB HSNC HSNM | Human Synovium | Uni-ZAP XR | LP04 |
| HSNN | | | |
| HPFB HPFC HPFD HPFE | Human Prostate Cancer, Stage C | Uni-ZAP XR | LP04 |
| | fraction | | |
| HE2A HE2D HE2E HE2H HE2I | 12 Week Old Early Stage | Uni-ZAP XR | LP04 |
| HE2M HE2N HE2O | Human | | |
| HE2B HE2C HE2F HE2G HE2P | 12 Week Old Early Stage | Uni-ZAP XR | LP04 |
| HE2Q | Human, II | | |
| HPTS HPTT HPTU | Human Pituitary, subtracted | Uni-ZAP XR | LP04 |
| HAUA HAUB HAUC | Amniotic Cells - TNF induced | Uni-ZAP XR | LP04 |
| HAQA HAQB HAQC HAQD | Amniotic Cells - Primary | Uni-ZAP XR | LP04 |
| | Culture | | |
| HWTA HWTB HWTC | wilm's tumor | Uni-ZAP XR | LP04 |
| HBSD | Bone Cancer, re-excision | Uni-ZAP XR | LP04 |
| HSGB | Salivary gland, re-excision | Uni-ZAP XR | LP04 |
| HSJA HSJB HSJC | Smooth muscle-ILb induced | Uni-ZAP XR | LP04 |
| HSXA HSXB HSXC HSXD | Human Substantia Nigra | Uni-ZAP XR | LP04 |
| HSHA HSHB HSHC | Smooth muscle, IL1b induced | Uni-ZAP XR | LP04 |
| HOUA HOUB HOUC HOUD | Adipocytes | Uni-ZAP XR | LP04 |
| HOUE | | | |
| HPWA HPWB HPWC HPWD | Prostate BPH | Uni-ZAP XR | LP04 |
| HPWE | | | |
| HELA HELB HELC HELD | Endothelial cells-control | Uni-ZAP XR | LP04 |
| HELE HELF HELG HELH | | | |
| HEMA HEMB HEMC HEMD | Endothelial-induced | Uni-ZAP XR | LP04 |
| HEME HEMF HEMG HEMH | | | |
| HBIA HBIB HBIC | Human Brain, Striatum | Uni-ZAP XR | LP04 |
| HHSA HHSB HHSC HHSD | Human | Uni-ZAP XR | LP04 |
| HHSE | Hypothalmus, Schizophrenia | | |
| HNGA HNGB HNGC HNGD | neutrophils control | Uni-ZAP XR | LP04 |
| HNGE HNGF HNGG HNGH | | | |
| HNGI HNGJ | | | |
| HNHA HNHB HNHC HNHD | Neutrophils IL-1 and LPS | Uni-ZAP XR | LP04 |
| HNHE HNHF HNHG HNHH | induced | | |
| HNHI HNHJ | | | |
| HSDB HSDC | STRIATUM DEPRESSION | Uni-ZAP XR | LP04 |
| HHPT | Hypothalamus | Uni-ZAP XR | LP04 |
| HSAT HSAU HSAV HSAW | Anergic T-cell | Uni-ZAP XR | LP04 |
| HSAX HSAY HSAZ | | | |
| HBMS HBMT HBMU HBMV | Bone marrow | Uni-ZAP XR | LP04 |
| HBMW HBMX | | | |
| HOEA HOEB HOEC HOED | Osteoblasts | Uni-ZAP XR | LP04 |
| HOEE HOEF HOEJ | | | |
| HAIA HAIB HAIC HAID HAIE | Epithelial-TNFa and INF | Uni-ZAP XR | LP04 |
| HAIF | induced | | |
| HTGA HTGB HTGC HTGD | Apoptotic T-cell | Uni-ZAP XR | LP04 |
| HMCA HMCB HMCC HMCD | Macrophage-oxLDL | Uni-ZAP XR | LP04 |
| HMCE | | | |
| HMAA HMAB HMAC HMAD | Macrophage (GM-CSF treated) | Uni-ZAP XR | LP04 |
| HMAE HMAF HMAG | | | |
| HPHA | Normal Prostate | Uni-ZAP XR | LP04 |
| HPIA HPIB HPIC | LNCAP prostate cell line | Uni-ZAP XR | LP04 |
| HPJA HPJB HPJC | PC3 Prostate cell line | Uni-ZAP XR | LP04 |
| HOSE HOSF HOSG | Human Osteoclastoma, re- | Uni-ZAP XR | LP04 |
| | excision | | |
| HTGE HTGF | Apoptotic T-cell, re-excision | Uni-ZAP XR | LP04 |
| HMAJ HMAK | H Macrophage (GM-CSF | Uni-ZAP XR | LP04 |
| | treated), re-excision | | |
| HACB HACC HACD | Human Adipose Tissue, re- | Uni-ZAP XR | LP04 |
| | excision | | |
| HFPA | H. Frontal Cortex, Epileptic | Uni-ZAP XR | LP04 |
| HFAA HFAB HFAC HFAD | Alzheimer's, spongy change | Uni-ZAP XR | LP04 |
| HFAE | | | |
| HFAM | Frontal Lobe, Dementia | Uni-ZAP XR | LP04 |
| HMIA HMIB HMIC | Human Manic Depression | Uni-ZAP XR | LP04 |
| | Tissue | | |
| HTSA HTSE HTSF HTSG | Human Thymus | pBS | LP05 |
| HTSH | | | |
| HPBA HPBB HPBC HPBD | Human Pineal Gland | pBS | LP05 |
| HPBE | | | |
| HSAA HSAB HSAC | HSA 172 Cells | pBS | LP05 |
| HSBA HSBB HSBC HSBM | HSC172 cells | pBS | LP05 |
| HJAA HJAB HJAC HJAD | Jurkat T-cell G1 phase | pBS | LP05 |
| HJBA HJBB HJBC HJBD | Jurkat T-Cell, S phase | pBS | LP05 |
| HAFA HAFB | Aorta endothelial cells + TNF-a | pBS | LP05 |
| HAWA HAWB HAWC | Human White Adipose | pBS | LP05 |
| HTNA HTNB | Human Thyroid | pBS | LP05 |
| HONA | Normal Ovary, Premenopausal | pBS | LP05 |
| HARA HARB | Human Adult Retina | pBS | LP05 |
| HLJA HLJB | Human Lung | pCMVSport 1 | LP06 |
| HOFM HOFN HOFO | H. Ovarian Tumor, II, OV5232 | pCMVSport 2.0 | LP07 |
| HOGA HOGB HOGC | OV 10-3-95 | pCMVSport 2.0 | LP07 |
| HCGL | CD34+cells, II | pCMVSport 2.0 | LP07 |
| HDLA | Hodgkin's Lymphoma I | pCMVSport 2.0 | LP07 |
| HDTA HDTB HDTC HDTD | Hodgkin's Lymphoma II | pCMVSport 2.0 | LP07 |
| HDTE | | | |
| HKAA HKAB HKAC HKAD | Keratinocyte | pCMVSport2.0 | LP07 |
| HKAE HKAF HKAG HKAH | | | |
| HCIM | CAPFINDER, Crohn's Disease, | pCMVSport 2.0 | LP07 |
| | lib 2 | | |
| HKAL | Keratinocyte, lib 2 | pCMVSport2.0 | LP07 |
| HKAT | Keratinocyte, lib 3 | pCMVSport2.0 | LP07 |
| HNDA | Nasal polyps | pCMVSport2.0 | LP07 |
| HDRA | H. Primary Dendritic Cells, lib 3 | pCMVSport2.0 | LP07 |
| HOHA HOHB HOHC | Human Osteoblasts II | pCMVSport2.0 | LP07 |
| HLDA HLDB HLDC | Liver, Hepatoma | pCMVSport3.0 | LP08 |
| HLDN HLDO HLDP | Human Liver, normal | pCMVSport3.0 | LP08 |
| HMTA | pBMC stimulated w/ poly I/C | pCMVSport3.0 | LP08 |
| HNTA | NTERA2, control | pCMVSport3.0 | LP08 |
| HDPA HDPB HDPC HDPD | Primary Dendritic Cells, lib 1 | pCMVSport3.0 | LP08 |
| HDPF HDPG HDPH HDPI | | | |
| HDPJ HDPK | | | |
| HDPM HDPN HDPO HDPP | Primary Dendritic cells, frac 2 | pCMVSport3.0 | LP08 |
| HMUA HMUB HMUC | Myoloid Progenitor Cell Line | pCMVSport3.0 | LP08 |
| HHEA HHEB HHEC HHED | T Cell helper I | pCMVSport3.0 | LP08 |
| HHEM HHEN HHEO HHEP | T cell helper II | pCMVSport3.0 | LP08 |
| HEQA HEQB HEQC | Human endometrial stromal cells | pCMVSport3.0 | LP08 |
| HJMA HJMB | Human endometrial stromal | pCMVSport3.0 | LP08 |
| | cells-treated with progesterone | | |
| HSWA HSWB HSWC | Human endometrial stromal | pCMVSport3.0 | LP08 |
| | cells-treated with estradiol | | |
| HSYA HSYB HSYC | Human Thymus Stromal Cells | pCMVSport3.0 | LP08 |
| HLWA HLWB HLWC | Human Placenta | pCMVSport3.0 | LP08 |
| HRAA HRAB HRAC | Rejected Kidney, lib 4 | pCMVSport3.0 | LP08 |
| HMTM | PCR, pBMC I/C treated | PCRII | LP09 |
| HMJA | H. Meniingima, M6 | pSport 1 | LP10 |
| HMKA HMKB HMKC HMKD | H. Meningima, M1 | pSport 1 | LP10 |
| HMKE | | | |
| HUSG HUSI | Human umbilical vein | pSport 1 | LP10 |
| | endothelial cells, IL-4 induced | | |
| HUSX HUSY | Human Umbilical Vein | pSport 1 | LP10 |
| | Endothelial Cells, uninduced | | |
| HOFA | Ovarian Tumor I, OV5232 | pSport 1 | LP10 |
| HCFA HCFB HCFC HCFD | T-Cell PHA 16 hrs | pSport 1 | LP10 |
| HCFL HCFM HCFN HCFO | T-Cell PHA 24 hrs | pSport 1 | LP10 |
| HADA HADC HADD HADE | Human Adipose | pSport 1 | LP10 |
| HADF HADG | | | |
| HOVA HOVB HOVC | Human Ovary | pSport 1 | LP10 |
| HTWB HTWC HTWD HTWE | Resting T-Cell Library, II | pSport 1 | LP10 |
| HTWF | | | |
| HMMA | Spleen metastic melanoma | pSport 1 | LP10 |
| HLYA HLYB HLYC HLYD | Spleen, Chronic lymphocytic | pSport 1 | LP10 |
| HLYE | leukemia | | |
| HCGA | CD34+ cell, I | pSport 1 | LP10 |
| HEOM HEON | Human Eosinophils | pSport 1 | LP10 |
| HTDA | Human Tonsil, Lib 3 | pSport 1 | LP10 |
| HSPA | Salivary Gland, Lib 2 | pSport 1 | LP10 |
| HCHA HCHB HCHC | Breast Cancer cell line, MDA 36 | pSport 1 | LP10 |
| HCHM HCHN | Breast Cancer Cell line, | pSport 1 | LP10 |
| | angiogenic | | |
| HCIA | Crohn's Disease | pSport 1 | LP10 |
| HDAA HDAB HDAC | HEL cell line | pSport 1 | LP10 |
| HABA | Human Astrocyte | pSport 1 | LP10 |
| HUFA HUFB HUFC | Ulcerative Colitis | pSport 1 | LP10 |
| HNTM | NTERA2 + retinoic acid, 14 | pSport 1 | LP10 |
| | days | | |
| HDQA | Primary Dendritic | pSport 1 | LP10 |
| | cells, CapFinder2, frac 1 | | |
| HDQM | Primary Dendritic Cells, | pSport 1 | LP10 |
| | CapFinder, frac 2 | | |
| HLDX | Human Liver, normal, CapFinder | pSport 1 | LP10 |
| HULA HULB HULC | Human Dermal Endothelial | pSport1 | LP10 |
| | Cells, untreated | | |
| HUMA | Human Dermal Endothelial | pSport1 | LP10 |
| | cells, treated | | |
| HCJA | Human Stromal Endometrial | pSport1 | LP10 |
| | fibroblasts, untreated | | |
| HCJM | Human Stromal endometrial | pSport1 | LP10 |
| | fibroblasts, treated w/ estradiol | | |
| HEDA | Human Stromal endometrial | pSport1 | LP10 |
| | fibroblasts, treated with | | |
| | progesterone | | |
| HFNA | Human ovary tumor cell | pSport1 | LP10 |
| | OV350721 | | |
| HKGA HKGB HKGC HKGD | Merkel Cells | pSport1 | LP10 |
| HISA HISB HISC | Pancreas Islet Cell Tumor | pSport1 | LP10 |
| HLSA | Skin, burned | pSport1 | LP10 |
| HBZA | Prostate, BPH, Lib 2 | pSport 1 | LP10 |
| HBZS | Prostate BPH, Lib 2, subtracted | pSport 1 | LP10 |
| HFIA HFIB HFIC | Synovial Fibroblasts (control) | pSport 1 | LP10 |
| HFIH HFII HFIJ | Synovial hypoxia | pSport 1 | LP10 |
| HFIT HFIU HFIV | Synovial IL-1/TNF stimulated | pSport 1 | LP10 |
| HGCA | Messangial cell, frac 1 | pSport1 | LP10 |
| HMVA HMVB HMVC | Bone Marrow Stromal Cell, | pSport1 | LP10 |
| | untreated | | |
| HFIX HFIY HFIZ | Synovial Fibroblasts (Il1/TNF), | pSport1 | LP10 |
| | subt | | |
| HFOX HFOY HFOZ | Synovial hypoxia-RSF | pSport1 | LP10 |
| | subtracted | | |
| HMQA HMQB HMQC HMQD | Human Activated Monocytes | Uni-ZAP XR | LP11 |
| HLIA HLIB HLIC | Human Liver | pCMVSport 1 | LP012 |
| HHBA HHBB HHBC HHBD | Human Heart | pCMVSport 1 | LP012 |
| HHBE | | | |
| HBBA HBBB | Human Brain | pCMVSport 1 | LP012 |
| HLJA HLJB HLJC HLJD HLJE | Human Lung | pCMVSport 1 | LP012 |
| HOGA HOGB HOGC | Ovarian Tumor | pCMVSport 2.0 | LP012 |
| HTJM | Human Tonsils, Lib 2 | pCMVSport 2.0 | LP012 |
| HAMF HAMG | KMH2 | pCMVSport 3.0 | LP012 |
| HAJA HAJB HAJC | L428 | pCMVSport 3.0 | LP012 |
| HWBA HWBB HWBC HWBD | Dendritic cells, pooled | pCMVSport 3.0 | LP012 |
| HWBE | | | |
| HWAA HWAB HWAC HWAD | Human Bone Marrow, treated | pCMVSport 3.0 | LP012 |
| HWAE | | | |
| HYAA HYAB HYAC | B Cell lymphoma | pCMVSport 3.0 | LP012 |
| HWHG HWHH HWHI | Healing groin wound, 6.5 hours | pCMVSport 3.0 | LP012 |
| | post incision | | |
| HWHP HWHQ HWHR | Healing groin wound; 7.5 hours | pCMVSport 3.0 | LP012 |
| | post incision | | |
| HARM | Healing groin wound - zero hr | pCMVSport 3.0 | LP012 |
| | post-incision (control) | | |
| HBIM | Olfactory epithelium; | pCMVSport 3.0 | LP012 |
| | nasalcavity | | |
| HWDA | Healing Abdomen wound; | pCMVSport 3.0 | LP012 |
| | 70&90 min post incision | | |
| HWEA | Healing Abdomen Wound; 15 | pCMVSport 3.0 | LP012 |
| | days post incision | | |
| HWJA | Healing Abdomen | pCMVSport 3.0 | LP012 |
| | Wound; 21&29 days | | |
| HNAL | Human Tongue, frac 2 | pSport1 | LP012 |
| HMJA | H. Meniingima, M6 | pSport1 | LP012 |
| HMKA HMKB HMKC HMKD | H. Meningima, M1 | pSport1 | LP012 |
| HMKE | | | |
| HOFA | Ovarian Tumor I, OV5232 | pSport1 | LP012 |
| HCFA HCFB HCFC HCFD | T-Cell PHA 16 hrs | pSport1 | LP012 |
| HCFL HCFM HCFN HCFO | T-Cell PHA 24 hrs | pSport1 | LP012 |
| HMMA HMMB HMMC | Spleen metastic melanoma | pSport1 | LP012 |
| HTDA | Human Tonsil, Lib 3 | pSport1 | LP012 |
| HDBA | Human Fetal Thymus | pSport1 | LP012 |
| HDUA | Pericardium | pSport1 | LP012 |
| HBZA | Prostate, BPH, Lib 2 | pSport1 | LP012 |
| HWCA | Larynx tumor | pSport1 | LP012 |
| HWKA | Normal lung | pSport1 | LP012 |
| HSMB | Bone marrow stroma, treated | pSport1 | LP012 |
| HBHM | Normal trachea | pSport1 | LP012 |
| HLFC | Human Larynx | pSport1 | LP012 |
| HLRB | Siebben Polyposis | pSport1 | LP012 |
| HNIA | Mammary Gland | pSport1 | LP012 |
| HNJB | Palate carcinoma | pSport1 | LP012 |
| HNKA | Palate normal | pSport1 | LP012 |
| HMZA | Pharynx carcinoma | pSport1 | LP012 |
| HABG | Cheek Carcinoma | pSport1 | LP012 |
| HMZM | Pharynx Carcinoma | pSport1 | LP012 |
| HDRM | Larynx Carcinoma | pSport1 | LP012 |
| HVAA | Pancreas normal PCA4 No | pSport1 | LP012 |
| HICA | Tongue carcinoma | pSport1 | LP012 |
| HUKA HUKB HUKC HUKD | Human Uterine Cancer | Lambda ZAP II | LP013 |
| HUKE | | | |
| HFFA | Human Fetal Brain, random | Lambda ZAP II | LP013 |
| | primed | | |
| HTUA | Activated T-cell labeled with 4- | Lambda ZAP II | LP013 |
| | thioluri | | |
| HBQA | Early Stage Human Brain, | Lambda ZAP II | LP013 |
| | random primed | | |
| HMEB | Human microvascular | Lambda ZAP II | LP013 |
| | Endothelial cells, fract. B | | |
| HUSH | Human Umbilical Vein | Lambda ZAP II | LP013 |
| | Endothelial cells, fract. A, re- | | |
| | excision | | |
| HLQC HLQD | Hepatocellular tumor, re- | Lambda ZAP II | LP013 |
| | excision | | |
| HTWJ HTWK HTWL | Resting T-cell, re-excision | Lambda ZAP II | LP013 |
| HF6S | Human Whole 6 week Old | pBluescript | LP013 |
| | Embryo (II), subt | | |
| HHPS | Human Hippocampus, | pBluescript | LP013 |
| | subtracted | | |
| HL1S | LNCAP, differential expression | pBluescript | LP013 |
| HLHS HLHT | Early Stage Human Lung, | pBluescript | LP013 |
| | Subtracted | | |
| HSUS | Supt cells, cyclohexamide | pBluescript | LP013 |
| | treated, subtracted | | |
| HSUT | Supt cells, cyclohexamide | pBluescript | LP013 |
| | treated, differentially expressed | | |
| HSDS | H. Striatum Depression, | pBluescript | LP013 |
| | subtracted | | |
| HPTZ | Human Pituitary, Subtracted VII | pBluescript | LP013 |
| HSDX | H. Striatum Depression, subt II | pBluescript | LP013 |
| HSDZ | H. Striatum Depression, subt | pBluescript | LP013 |
| HPBA HPBB HPBC HPBD | Human Pineal Gland | pBluescriptSK− | LP013 |
| HPBE | | | |
| HRTA | Colorectal Tumor | pBluescript SK− | LP013 |
| HSBA HSBB HSBC HSBM | HSC172 cells | pBluescript SK− | LP013 |
| HJAA HJAB HJAC HJAD | Jurkat T-cell G1 phase | pBluescript SK− | LP013 |
| HJBA HJBB HJBC HJBD | Jurkat T-cell, S1 phase | pBluescript SK− | LP013 |
| HTNA HTNB | Human Thyroid | pBluescript SK− | LP013 |
| HAHA HAHB | Human Adult Heart | Uni-ZAP XR | LP013 |
| HE6A | Whole 6 week Old Embryo | Uni-ZAP XR | LP013 |
| HFCA HFCB HFCC HFCD | Human Fetal Brain | Uni-ZAP XR | LP013 |
| HFCE | | | |
| HFKC HFKD HFKE HFKF | Human Fetal Kidney | Uni-ZAP XR | LP013 |
| HFKG | | | |
| HGBA HGBD HGBE HGBF | Human Gall Bladder | Uni-ZAP XR | LP013 |
| HGBG | | | |
| HPRA HPRB HPRC HPRD | Human Prostate | Uni-ZAP XR | LP013 |
| HTEA HTEB HTEC HTED | Human Testes | Uni-ZAP XR | LP013 |
| HTEE | | | |
| HTTA HTTB HTTC HTTD | Human Testes Tumor | Uni-ZAP XR | LP013 |
| HTTE | | | |
| HYBA HYBB | Human Fetal Bone | Uni-ZAP XR | LP013 |
| HFLA | Human Fetal Liver | Uni-ZAP XR | LP013 |
| HHFB HHFC HHFD HHFE | Human Fetal Heart | Uni-ZAP XR | LP013 |
| HHFF | | | |
| HUVB HUVC HUVD HUVE | Human Umbilical Vein, End. | Uni-ZAP XR | LP013 |
| | remake | | |
| HTHB HTHC HTHD | Human Thymus | Uni-ZAP XR | LP013 |
| HSTA HSTB HSTC HSTD | Human Skin Tumor | Uni-ZAP XR | LP013 |
| HTAA HTAB HTAC HTAD | Human Activated T-cells | Uni-ZAP XR | LP013 |
| HTAE | | | |
| HFEA HFEB HFEC | Human Fetal Epithelium (skin) | Uni-ZAP XR | LP013 |
| HJPA HJPB HJPC HJPD | Human Jurkat Membrane Bound | Uni-ZAP XR | LP013 |
| | Polysomes | | |
| HESA | Human Epithelioid Sarcoma | Uni-ZAP XR | LP013 |
| HALS | Human Adult Liver, Subtracted | Uni-ZAP XR | LP013 |
| HFTA HFTB HFTC HFTD | Human Fetal Dura Mater | Uni-ZAP XR | LP013 |
| HCAA HCAB HCAC | Cem cells, cyclohexamide | Uni-ZAP XR | LP013 |
| | treated | | |
| HRGA HRGB HRGC HRGD | Raji Cells, cyclohexamide | Uni-ZAP XR | LP013 |
| | treated | | |
| HE9A HE9B HE9C HE9D | Nine Week Old Early Stage | Uni-ZAP XR | LP013 |
| HE9E | Human | | |
| HSFA | Human Fibrosarcoma | Uni-ZAP XR | LP013 |
| HATA HATB HATC HATD | Human Adrenal Gland Tumor | Uni-ZAP XR | LP013 |
| HATE | | | |
| HTRA | Human Trachea Tumor | Uni-ZAP XR | LP013 |
| HE2A HE2D HE2E HE2H HE2I | 12 Week Old Early Stage | Uni-ZAP XR | LP013 |
| | Human | | |
| HE2B HE2C HE2F HE2G HE2P | 12 Week Old Early Stage | Uni-ZAP XR | LP013 |
| | Human, II | | |
| HNEA HNEB HNEC HNED | Human Neutrophil | Uni-ZAP XR | LP013 |
| HNEE | | | |
| HBGA | Human Primary Breast Cancer | Uni-ZAP XR | LP013 |
| HPTS HPTT HPTU | Human Pituitary, subtracted | Uni-ZAP XR | LP013 |
| HMQA HMQB HMQC HMQD | Human Activated Monocytes | Uni-ZAP XR | LP013 |
| HOAA HOAB HOAC | Human Osteosarcoma | Uni-ZAP XR | LP013 |
| HTOA HTOD HTOE HTOF | human tonsils | Uni-ZAP XR | LP013 |
| HTOG | | | |
| HMGB | Human OB MG63 control | Uni-ZAP XR | LP013 |
| | fraction I | | |
| HOPB | Human OB HOS control fraction I | Uni-ZAP XR | LP013 |
| HOQB | Human OB HOS treated (1 nM | Uni-ZAP XR | LP013 |
| | E2) fraction I | | |
| HAUA HAUB HAUC | Amniotic Cells - TNF induced | Uni-ZAP XR | LP013 |
| HAQA HAQB HAQC HAQD | Amniotic Cells - Primary | Uni-ZAP XR | LP013 |
| | Culture | | |
| HROA HROC | HUMAN STOMACH | Uni-ZAP XR | LP013 |
| HBJA HBJB HBJC HBJD HBJE | HUMAN B CELL | Uni-ZAP XR | LP013 |
| | LYMPHOMA | | |
| HODA HODB HODC HODD | human ovarian cancer | Uni-ZAP XR | LP013 |
| HCPA | Corpus Callosum | Uni-ZAP XR | LP013 |
| HSOA | stomach cancer (human) | Uni-ZAP XR | LP013 |
| HERA | SKIN | Uni-ZAP XR | LP013 |
| HMDA | Brain-medulloblastoma | Uni-ZAP XR | LP013 |
| HGLA HGLB HGLD | Glioblastoma | Uni-ZAP XR | LP013 |
| HWTA HWTB HWTC | wilm's tumor | Uni-ZAP XR | LP013 |
| HEAA | H. Atrophic Endometrium | Uni-ZAP XR | LP013 |
| HAPN HAPO HAPP HAPQ | Human Adult Pulmonary; re- | Uni-ZAP XR | LP013 |
| HAPR | excision | | |
| HLTG HLTH | Human T-cell lymphoma; re- | Uni-ZAP XR | LP013 |
| | excision | | |
| HAHC HAHD HAHE | Human Adult Heart; re-excision | Uni-ZAP XR | LP013 |
| HAGA HAGB HAGC HAGD | Human Amygdala | Uni-ZAP XR | LP013 |
| HAGE | | | |
| HSJA HSJB HSJC | Smooth muscle-ILb induced | Uni-ZAP XR | LP013 |
| HSHA HSHB HSHC | Smooth muscle, IL1b induced | Uni-ZAP XR | LP013 |
| HPWA HPWB HPWC HPWD | Prostate BPH | Uni-ZAP XR | LP013 |
| HPWE | | | |
| HPIA HPIB HPIC | LNCAP prostate cell line | Uni-ZAP XR | LP013 |
| HPJA HPJB HPJC | PC3 Prostate cell line | Uni-ZAP XR | LP013 |
| HBTA | Bone Marrow Stroma, | Uni-ZAP XR | LP013 |
| | TNF&LPS ind | | |
| HMCF HMCG HMCH HMCI | Macrophage-oxLDL; re-excision | Uni-ZAP XR | LP013 |
| HMCJ | | | |
| HAGG HAGH HAGI | Human Amygdala; re-excision | Uni-ZAP XR | LP013 |
| HACA | H. Adipose Tissue | Uni-ZAP XR | LP013 |
| HKFB | K562 + PMA (36 hrs), re- | ZAP Express | LP013 |
| | excision | | |
| HCWT HCWU HCWV | CD34 positive cells (cord | ZAP Express | LP013 |
| | blood), re-ex | | |
| HBWA | Whole brain | ZAP Express | LP013 |
| HBXA HBXB HBXC HBXD | Human Whole Brain #2 - Oligo | ZAP Express | LP013 |
| | dT >1.5 Kb | | |
| HAVM | Temporal cortex-Alzheizmer | pT-Adv | LP014 |
| HAVT | Hippocampus, Alzheimer | pT-Adv | LP014 |
| | Subtracted | | |
| HHAS | CHME Cell Line | Uni-ZAP XR | LP014 |
| HAJR | Larynx normal | pSport 1 | LP014 |
| HWLE HWLF HWLG HWLH | Colon Normal | pSport 1 | LP014 |
| HCRM HCRN HCRO | Colon Carcinoma | pSport 1 | LP014 |
| HWLI HWLJ HWLK | Colon Normal | pSport 1 | LP014 |
| HWLQ HWLR HWLS HWLT | Colon Tumor | pSport 1 | LP014 |
| HBFM | Gastrocnemius Muscle | pSport 1 | LP014 |
| HBOD HBOE | Quadriceps Muscle | pSport 1 | LP014 |
| HBKD HBKE | Soleus Muscle | pSport 1 | LP014 |
| HCCM | Pancreatic Langerhans | pSport 1 | LP014 |
| HWGA | Larynx carcinoma | pSport 1 | LP014 |
| HWGM HWGN | Larynx carcinoma | pSport 1 | LP014 |
| HWLA HWLB HWLC | Normal colon | pSport 1 | LP014 |
| HWLM HWLN | Colon Tumor | pSport 1 | LP014 |
| HVAM HVAN HVAO | Pancreas Tumor | pSport 1 | LP014 |
| HWGQ | Larynx carcinoma | pSport 1 | LP014 |
| HAQM HAQN | Salivary Gland | pSport 1 | LP014 |
| HASM | Stomach; normal | pSport 1 | LP014 |
| HBCM | Uterus; normal | pSport 1 | LP014 |
| HCDM | Testis; normal | pSport 1 | LP014 |
| HDJM | Brain; normal | pSport 1 | LP014 |
| HEFM | Adrenal Gland, normal | pSport 1 | LP014 |
| HBAA | Rectum normal | pSport 1 | LP014 |
| HFDM | Rectum tumour | pSport 1 | LP014 |
| HGAM | Colon, normal | pSport 1 | LP014 |
| HHMM | Colon, tumour | pSport 1 | LP014 |
| HCLB HCLC | Human Lung Cancer | Lambda Zap II | LP015 |
| HRLA | L1 Cell line | ZAP Express | LP015 |
| HHAM | Hypothalamus, Alzheimer's | pCMVSport 3.0 | LP015 |
| HKBA | Ku 812F Basophils Line | pSport 1 | LP015 |
| HS2S | Saos2, Dexamethosome Treated | pSport 1 | LP016 |
| HA5A | Lung Carcinoma A549 | pSport 1 | LP016 |
| | TNFalpha activated | | |
| HTFM | TF-1 Cell Line GM-CSF Treated | pSport 1 | LP016 |
| HYAS | Thyroid Tumour | pSport 1 | LP016 |
| HUTS | Larynx Normal | pSport 1 | LP016 |
| HXOA | Larynx Tumor | pSport 1 | LP016 |
| HEAH | Ea.hy.926 cell line | pSport 1 | LP016 |
| HINA | Adenocarcinoma Human | pSport 1 | LP016 |
| HRMA | Lung Mesothelium | pSport 1 | LP016 |
| HLCL | Human Pre-Differentiated | Uni-Zap XR | LP017 |
| | Adipocytes | | |
| HS2A | Saos2 Cells | pSport 1 | LP020 |
| HS2I | Saos2 Cells; Vitamin D3 Treated | pSport 1 | LP020 |
| HUCM | CHME Cell Line, untreated | pSport 1 | LP020 |
| HEPN | Aryepiglottis Normal | pSport 1 | LP020 |
| HPSN | Sinus Piniformis Tumour | pSport 1 | LP020 |
| HNSA | Stomach Normal | pSport 1 | LP020 |
| HNSM | Stomach Tumour | pSport 1 | LP020 |
| HNLA | Liver Normal Met5No | pSport 1 | LP020 |
| HUTA | Liver Tumour Met 5 Tu | pSport 1 | LP020 |
| HOCN | Colon Normal | pSport 1 | LP020 |
| HOCT | Colon Tumor | pSport 1 | LP020 |
| HTNT | Tongue Tumour | pSport 1 | LP020 |
| HLXN | Larynx Normal | pSport 1 | LP020 |
| HLXT | Larynx Tumour | pSport 1 | LP020 |
| HTYN | Thymus | pSport 1 | LP020 |
| HPLN | Placenta | pSport 1 | LP020 |
| HTNG | Tongue Normal | pSport 1 | LP020 |
| HZAA | Thyroid Normal (SDCA2 No) | pSport 1 | LP020 |
| HWES | Thyroid Thyroiditis | pSport 1 | LP020 |
| HFHD | Ficolled Human Stromal Cells, | pTrip1Ex2 | LP021 |
| | 5Fu treated | | |
| HFHM, HFHN | Ficolled Human Stromal Cells, | pTrip1Ex2 | LP021 |
| | Untreated | | |
| HPCI | Hep G2 Cells, lambda library | lambda Zap-CMV | LP021 |
| | | XR | |
| HBCA, HBCB, HBCC | H. Lymph node breast Cancer | Uni-ZAP XR | LP021 |
| HCOK | Chondrocytes | pSPORT1 | LP022 |
| HDCA, HDCB, HDCC | Dendritic Cells From CD34 | pSPORT1 | LP022 |
| | Cells | | |
| HDMA, HDMB | CD40 activated monocyte | pSPORT1 | LP022 |
| | dendritic cells | | |
| HDDM, HDDN, HDDO | LPS activated derived dendritic | pSPORT1 | LP022 |
| | cells | | |
| HPCR | Hep G2 Cells, PCR library | lambda Zap-CMV | LP022 |
| | | XR | |
| HAAA, HAAB, HAAC | Lung, Cancer (4005313A3): | pSPORT1 | LP022 |
| | Invasive Poorly Differentiated | | |
| | Lung Adenocarcinoma | | |
| HIPA, HIPB, HIPC | Lung, Cancer (4005163 B7): | pSPORT1 | LP022 |
| | Invasive, Poorly Diff. | | |
| | Adenocarcinoma, Metastatic | | |
| HOOH, HOOI | Ovary, Cancer: (4004562 B6) | pSPORT1 | LP022 |
| | Papillary Serous Cystic | | |
| | Neoplasm, Low Malignant Pot | | |
| HIDA | Lung, Normal: (4005313 B1) | pSPORT1 | LP022 |
| HUJA, HUJB, HUJC, HUJD, HUJE | B-Cells | pCMVSport 3.0 | LP022 |
| HNOA, HNOB, HNOC, HNOD | Ovary, Normal: (9805C040R) | pSPORT1 | LP022 |
| HNLM | Lung, Normal: (4005313 B1) | pSPORT1 | LP022 |
| HSCL | Stromal Cells | pSPORT1 | LP022 |
| HAAX | Lung, Cancer: (4005313 A3) | pSPORT1 | LP022 |
| | Invasive Poorly-differentiated | | |
| | Metastatic lung adenocarcinoma | | |
| HUUA, HUUB, HUUC, HUUD | B-cells (unstimulated) | pTrip1Ex2 | LP022 |
| HWWA, HWWB, HWWC, HWWD, | B-cells (stimulated) | pSPORT1 | LP022 |
| HWWE, HWWF, HWWG | | | |
| HCCC | Colon, Cancer: (9808C064R) | pCMVSport 3.0 | LP023 |
| HPDO HPDP HPDQ HPDR | Ovary, Cancer (9809C332): | pSport 1 | LP023 |
| HPD | Poorly differentiated | | |
| | adenocarcinoma | | |
| HPCO HPCP HPCQ HPCT | Ovary, Cancer (15395A1F): | pSport 1 | LP023 |
| | Grade II Papillary Carcinoma | | |
| HOCM HOCO HOCP HOCQ | Ovary, Cancer: (15799A1F) | pSport 1 | LP023 |
| | Poorly differentiated carcinoma | | |
| HCBM HCBN HCBO | Breast, Cancer: (4004943 A5) | pSport 1 | LP023 |
| HNBT HNBU HNBV | Breast, Normal: (4005522B2) | pSport 1 | LP023 |
| HBCP HBCQ | Breast, Cancer: (4005522 A2) | pSport 1 | LP023 |
| HBCJ | Breast, Cancer: (9806C012R) | pSport 1 | LP023 |
| HSAM HSAN | Stromal cells 3.88 | pSport 1 | LP023 |
| HVCA HVCB HVCC HVCD | Ovary, Cancer: (4004332 A2) | pSport 1 | LP023 |
| HSCK HSEN HSEO | Stromal cells (HBM3.18) | pSport 1 | LP023 |
| HSCP HSCQ | stromal cell clone 2.5 | pSport 1 | LP023 |
| HUXA | Breast Cancer: (4005385 A2) | pSport 1 | LP023 |
| HCOM HCON HCOO HCOP | Ovary, Cancer (4004650 A3): | pSport 1 | LP023 |
| HCOQ | Well-Differentiated | | |
| | Micropapillary Serous | | |
| | Carcinoma | | |
| HBNM | Breast, Cancer: (9802C020E) | pSport 1 | LP023 |
| HVVA HVVB HVVC HVVD | Human Bone Marrow, treated | pSport 1 | LP023 |
| HVVE | | | |

[0908] Two nonlimiting examples are provided below for isolating a particular clone from the deposited sample of plasmid cDNAs cited for that clone in Table 7. First, a plasmid is directly isolated by screening the clones using a polynucleotide probe corresponding to the nucleotide sequence of SEQ ID NO:X.

[0909] Particularly, a specific polynucleotide with 30-40 nucleotides is synthesized using an Applied Biosystems DNA synthesizer according to the sequence reported. The oligonucleotide is labeled, for instance, with ³²P-γ-ATP using T4 polynucleotide kinase and purified according to routine methods. (E.g., Maniatis et al., Molecular Cloning: A Laboratory Manual, Cold Spring Harbor Press, Cold Spring, N.Y. (1982)). The plasmid mixture is transformed into a suitable host, as indicated above (such as XL-1 Blue (Stratagene)) using techniques known to those of skill in the art, such as those provided by the vector supplier or in related publications or patents cited above. The transformants are plated on 1.5% agar plates (containing the appropriate selection agent, e.g., ampicillin) to a density of about 150 transformants (colonies) per plate. These plates are screened using Nylon membranes according to routine methods for bacterial colony screening (e.g., Sambrook et al., Molecular Cloning: A Laboratory Manual, 2nd Edit., (1989), Cold Spring Harbor Laboratory Press, pages 1.93 to 1.104), or other techniques known to those of skill in the art.

[0910] Alternatively, two primers of 17-20 nucleotides derived from both ends of the nucleotide sequence of SEQ ID NO:X are synthesized and used to amplify the desired cDNA using the deposited cDNA plasmid as a template. The polymerase chain reaction is carried out under routine conditions, for instance, in 25 μl of reaction mixture with 0.5 ug of the above cDNA template. A convenient reaction mixture is 1.5-5 mM MgCl₂, 0.01% (w/v) gelatin, 20 μM each of dATP, dCTP, dGTP, dTTP, 25 pmol of each primer and 0.25 Unit of Taq polymerase. Thirty five cycles of PCR (denaturation at 94° C. for 1 min; annealing at 55° C. for 1 min; elongation at 72° C. for 1 min) are performed with a Perkin-Elmer Cetus automated thermal cycler. The amplified product is analyzed by agarose gel electrophoresis and the DNA band with expected molecular weight is excised and purified. The PCR product is verified to be the selected sequence by subcloning and sequencing the DNA product.

[0911] Several methods are available for the identification of the 5′ or 3′ non-coding portions of a gene which may not be present in the deposited clone. These methods include but are not limited to, filter probing, clone enrichment using specific probes, and protocols similar or identical to 5′ and 3′ “RACE” protocols which are well known in the art. For instance, a method similar to 5′ RACE is available for generating the missing 5′ end of a desired full-length transcript. (Fromont-Racine et al., Nucleic Acids Res. 21(7):1683-1684 (1993)).

[0912] Briefly, a specific RNA oligonucleotide is ligated to the 5′ ends of a population of RNA presumably containing full-length gene RNA transcripts. A primer set containing a primer specific to the ligated RNA oligonucleotide and a primer specific to a known sequence of the gene of interest is used to PCR amplify the 5′ portion of the desired full-length gene. This amplified product may then be sequenced and used to generate the full length gene.

[0913] This above method starts with total RNA isolated from the desired source, although poly-A+ RNA can be used. The RNA preparation can then be treated with phosphatase if necessary to eliminate 5′ phosphate groups on degraded or damaged RNA which may interfere with the later RNA ligase step. The phosphatase should then be inactivated and the RNA treated with tobacco acid pyrophosphatase in order to remove the cap structure present at the 5′ ends of messenger RNAs. This reaction leaves a 5′ phosphate group at the 5′ end of the cap cleaved RNA which can then be ligated to an RNA oligonucleotide using T4 RNA ligase.

[0914] This modified RNA preparation is used as a template for first strand cDNA synthesis using a gene specific oligonucleotide. The first strand synthesis reaction is used as a template for PCR amplification of the desired 5′ end using a primer specific to the ligated RNA oligonucleotide and a primer specific to the known sequence of the gene of interest. The resultant product is then sequenced and analyzed to confirm that the 5′ end sequence belongs to the desired gene.

### Example 2

### Isolation of Genomic Clones Corresponding to a Polynucleotide

[0915] A human genomic P1 library (Genomic Systems, Inc.) is screened by PCR using primers selected for the sequence corresponding to SEQ ID NO:X according to the method described in Example 1. (See also, Sambrook.)

### Example 3

### Tissue Specific Expression Analysis

[0916] The Human Genome Sciences, Inc. (HGS) database is derived from sequencing tissue and/or disease specific cDNA libraries. Libraries generated from a particular tissue are selected and the specific tissue expression pattern of EST groups or assembled contigs within these libraries is determined by comparison of the expression patterns of those groups or contigs within the entire database. ESTs and assembled contigs which show tissue specific expression are selected.

[0917] The original clone from which the specific EST sequence was generated, or in the case of an assembled contig, the clone from which the 5′ most EST sequence was generated, is obtained from the catalogued library of clones and the insert amplified by PCR using methods known in the art. The PCR product is denatured and then transferred in 96 or 384 well format to a nylon membrane (Schleicher and Scheull) generating an array filter of tissue specific clones. Housekeeping genes, maize genes, and known tissue specific genes are included on the filters. These targets can be used in signal normalization and to validate assay sensitivity. Additional targets are included to monitor probe length and specificity of hybridization.

[0918] Radioactively labeled hybridization probes are generated by first strand cDNA synthesis per the manufacturer's instructions (Life Technologies) from mRNA/RNA samples prepared from the specific tissue being analyzed (e.g., prostate, prostate cancer, ovarian, ovarian cancer, etc.). The hybridization probes are purified by gel exclusion chromatography, quantitated, and hybridized with the array filters in hybridization bottles at 65° C. overnight. The filters are washed under stringent conditions and signals are captured using a Fuji phosphorimager.

[0919] Data is extracted using AIS software and following background subtraction, signal normalization is performed. This includes a normalization of filter-wide expression levels between different experimental runs. Genes that are differentially expressed in the tissue of interest are identified.

### Example 4

### Chromosomal Mapping of the Polynucleotides

[0920] An oligonucleotide primer set is designed according to the sequence at the 5′ end of SEQ ID NO:X. This primer preferably spans about 100 nucleotides. This primer set is then used in a polymerase chain reaction under the following set of conditions: 30 seconds, 95° C.; 1 minute, 56° C.; 1 minute, 70° C. This cycle is repeated 32 times followed by one 5 minute cycle at 70° C. Human, mouse, and hamster DNA is used as template in addition to a somatic cell hybrid panel containing individual chromosomes or chromosome fragments (Bios, Inc). The reactions are analyzed on either 8% polyacrylamide gels or 3.5% agarose gels. Chromosome mapping is determined by the presence of an approximately 100 bp PCR fragment in the particular somatic cell hybrid.

### Example 5

### Bacterial Expression of a Polypeptide

[0921] A polynucleotide encoding a polypeptide of the present invention is amplified using PCR oligonucleotide primers corresponding to the 5′ and 3′ ends of the DNA sequence, as outlined in Example 1, to synthesize insertion fragments. The primers used to amplify the cDNA insert should preferably contain restriction sites, such as BamHI and XbaI, at the 5′ end of the primers in order to clone the amplified product into the expression vector. For example, BamHI and XbaI correspond to the restriction enzyme sites on the bacterial expression vector pQE-9. (Qiagen, Inc., Chatsworth, Calif.). This plasmid vector encodes antibiotic resistance (Ampr), a bacterial origin of replication (ori), an IPTG-regulatable promoter/operator (P/O), a ribosome binding site (RBS), a 6-histidine tag (6-His), and restriction enzyme cloning sites.

[0922] The pQE-9 vector is digested with BamHI and XbaI and the amplified fragment is ligated into the pQE-9 vector maintaining the reading frame initiated at the bacterial RBS. The ligation mixture is then used to transform the E. coli strain M15/rep4 (Qiagen, Inc.) which contains multiple copies of the plasmid pREP4, which expresses the lacI repressor and also confers kanamycin resistance (Kan^{r}). Transformants are identified by their ability to grow on LB plates and ampicillin/kanamycin resistant colonies are selected. Plasmid DNA is isolated and confirmed by restriction analysis.

[0923] Clones containing the desired constructs are grown overnight (O/N) in liquid culture in LB media supplemented with both Amp (100 ug/ml) and Kan (25 ug/ml). The O/N culture is used to inoculate a large culture at a ratio of 1:100 to 1:250. The cells are grown to an optical density 600 (O.D.⁶⁰⁰) of between 0.4 and 0.6. IPTG (Isopropyl-B-D-thiogalacto pyranoside) is then added to a final concentration of 1 mM. IPTG induces by inactivating the lacI repressor, clearing the P/O leading to increased gene expression.

[0924] Cells are grown for an extra 3 to 4 hours. Cells are then harvested by centrifugation (20 mins at 6000×g). The cell pellet is solubilized in the chaotropic agent 6 Molar Guanidine HCl by stirring for 3-4 hours at 4° C. The cell debris is removed by centrifugation, and the supernatant containing the polypeptide is loaded onto a nickel-nitrilo-tri-acetic acid (“Ni-NTA”) affinity resin column (available from QIAGEN, Inc., supra). Proteins with a 6×His tag bind to the Ni-NTA resin with high affinity and can be purified in a simple one-step procedure (for details see: The QIAexpressionist (1995) QIAGEN, Inc., supra).

[0925] Briefly, the supernatant is loaded onto the column in 6 M guanidine-HCl, pH 8. The column is first washed with 10 volumes of 6 M guanidine-HCl, pH 8, then washed with 10 volumes of 6 M guanidine-HCl pH 6, and finally the polypeptide is eluted with 6 M guanidine-HCl, pH 5.

[0926] The purified protein is then renatured by dialyzing it against phosphate-buffered saline (PBS) or 50 mM Na-acetate, pH 6 buffer plus 200 mM NaCl. Alternatively, the protein can be successfully refolded while immobilized on the Ni-NTA column. The recommended conditions are as follows: renature using a linear 6M-1M urea gradient in 500 mM NaCl, 20% glycerol, 20 mM Tris/HCl pH 7.4, containing protease inhibitors. The renaturation should be performed over a period of 1.5 hours or more. After renaturation the proteins are eluted by the addition of 250 mM immidazole. Immidazole is removed by a final dialyzing step against PBS or 50 mM sodium acetate pH 6 buffer plus 200 mM NaCl. The purified protein is stored at 4° C. or frozen at −80° C.

[0927] In addition to the above expression vector, the present invention further includes an expression vector, called pHE4a (ATCC Accession Number 209645, deposited on Feb. 25, 1998) which contains phage operator and promoter elements operatively linked to a polynucleotide of the present invention, called pHE4a. (ATCC Accession Number 209645, deposited on Feb. 25, 1998.) This vector contains: 1) a neomycinphosphotransferase gene as a selection marker, 2) an E. coli origin of replication, 3) a T5 phage promoter sequence, 4) two lac operator sequences, 5) a Shine-Delgarno sequence, and 6) the lactose operon repressor gene (lacIq). The origin of replication (oriC) is derived from pUC19 (LTI, Gaithersburg, Md.). The promoter and operator sequences are made synthetically.

[0928] DNA can be inserted into the pHE4a by restricting the vector with NdeI and XbaI, BamHI, XhoI, or Asp718, running the restricted product on a gel, and isolating the larger fragment (the stuffer fragment should be about 310 base pairs). The DNA insert is generated according to the PCR protocol described in Example 1, using PCR primers having restriction sites for NdeI (5′ primer) and XbaI, BamHI, XhoI, or Asp718 (3′ primer). The PCR insert is gel purified and restricted with compatible enzymes. The insert and vector are ligated according to standard protocols.

[0929] The engineered vector could easily be substituted in the above protocol to express protein in a bacterial system.

### Example 6

### Purification of a Polypeptide from an Inclusion Body

[0930] The following alternative method can be used to purify a polypeptide expressed in E coli when it is present in the form of inclusion bodies. Unless otherwise specified, all of the following steps are conducted at 4-10° C.

[0931] Upon completion of the production phase of the E. coli fermentation, the cell culture is cooled to 4-10° C. and the cells harvested by continuous centrifugation at 15,000 rpm (Heraeus Sepatech). On the basis of the expected yield of protein per unit weight of cell paste and the amount of purified protein required, an appropriate amount of cell paste, by weight, is suspended in a buffer solution containing 100 mM Tris, 50 mM EDTA, pH 7.4. The cells are dispersed to a homogeneous suspension using a high shear mixer.

[0932] The cells are then lysed by passing the solution through a microfluidizer (Microfuidics, Corp. or APV Gaulin, Inc.) twice at 4000-6000 psi. The homogenate is then mixed with NaCl solution to a final concentration of 0.5 M NaCl, followed by centrifugation at 7000×g for 15 min. The resultant pellet is washed again using 0.5M NaCl, 100 mM Tris, 50 mM EDTA, pH 7.4.

[0933] The resulting washed inclusion bodies are solubilized with 1.5 M guanidine hydrochloride (GuHCl) for 2-4 hours. After 7000×g centrifugation for 15 min., the pellet is discarded and the polypeptide containing supernatant is incubated at 4° C. overnight to allow further GuHCl extraction.

[0934] Following high speed centrifugation (30,000×g) to remove insoluble particles, the GuHCl solubilized protein is refolded by quickly mixing the GuHCl extract with 20 volumes of buffer containing 50 mM sodium, pH 4.5, 150 mM NaCl, 2 mM EDTA by vigorous stirring. The refolded diluted protein solution is kept at 4° C. without mixing for 12 hours prior to further purification steps.

[0935] To clarify the refolded polypeptide solution, a previously prepared tangential filtration unit equipped with 0.16 μm membrane filter with appropriate surface area (e.g., Filtron), equilibrated with 40 mM sodium acetate, pH 6.0 is employed. The filtered sample is loaded onto a cation exchange resin (e.g., Poros HS-50, Perseptive Biosystems). The column is washed with 40 mM sodium acetate, pH 6.0 and eluted with 250 mM, 500 mM, 1000 mM, and 1500 mM NaCl in the same buffer, in a stepwise manner. The absorbance at 280 nm of the effluent is continuously monitored. Fractions are collected and further analyzed by SDS-PAGE.

[0936] Fractions containing the polypeptide are then pooled and mixed with 4 volumes of water. The diluted sample is then loaded onto a previously prepared set of tandem columns of strong anion (Poros HQ-50, Perseptive Biosystems) and weak anion (Poros CM-20, Perseptive Biosystems) exchange resins. The columns are equilibrated with 40 mM sodium acetate, pH 6.0. Both columns are washed with 40 mM sodium acetate, pH 6.0, 200 mM NaCl. The CM-20 column is then eluted using a 10 column volume linear gradient ranging from 0.2 M NaCl, 50 mM sodium acetate, pH 6.0 to 1.0 M NaCl, 50 mM sodium acetate, pH 6.5. Fractions are collected under constant A₂₈₀ monitoring of the effluent. Fractions containing the polypeptide (determined, for instance, by 16% SDS-PAGE) are then pooled.

[0937] The resultant polypeptide should exhibit greater than 95% purity after the above refolding and purification steps. No major contaminant bands should be observed from Commassie blue stained 16% SDS-PAGE gel when 5 μg of purified protein is loaded. The purified protein can also be tested for endotoxin/LPS contamination, and typically the LPS content is less than 0.1 ng/ml according to LAL assays.

### Example 7

### Cloning and Expression of a Polypeptide in a Baculovirus Expression System

[0938] In this example, the plasmid shuttle vector pA2 is used to insert a polynucleotide into a baculovirus to express a polypeptide. This expression vector contains the strong polyhedrin promoter of the Autographa californica nuclear polyhedrosis virus (AcMNPV) followed by convenient restriction sites such as BamHI, Xba I and Asp718. The polyadenylation site of the simian virus 40 (“SV40”) is used for efficient polyadenylation. For easy selection of recombinant virus, the plasmid contains the beta-galactosidase gene from E. coli under control of a weak Drosophila promoter in the same orientation, followed by the polyadenylation signal of the polyhedrin gene. The inserted genes are flanked on both sides by viral sequences for cell-mediated homologous recombination with wild-type viral DNA to generate a viable virus that express the cloned polynucleotide.

[0939] Many other baculovirus vectors can be used in place of the vector above, such as pAc373, pVL941, and pAcIM1, as one skilled in the art would readily appreciate, as long as the construct provides appropriately located signals for transcription, translation, secretion and the like, including a signal peptide and an in-frame AUG as required. Such vectors are described, for instance, in Luckow et al., Virology 170:31-39 (1989).

[0940] Specifically, the cDNA sequence contained in the deposited clone, including the AUG initiation codon, is amplified using the PCR protocol described in Example 1. If a naturally occurring signal sequence is used to produce the polypeptide of the present invention, the pA2 vector does not need a second signal peptide. Alternatively, the vector can be modified (pA2 GP) to include a baculovirus leader sequence, using the standard methods described in Summers et al., “A Manual of Methods for Baculovirus Vectors and Insect Cell Culture Procedures,” Texas Agricultural Experimental Station Bulletin No. 1555 (1987).

[0941] The amplified fragment is isolated from a 1% agarose gel using a commercially available kit (“Geneclean,” BIO 101 Inc., La Jolla, Calif.). The fragment then is digested with appropriate restriction enzymes and again purified on a 1% agarose gel.

[0942] The plasmid is digested with the corresponding restriction enzymes and optionally, can be dephosphorylated using calf intestinal phosphatase, using routine procedures known in the art. The DNA is then isolated from a 1% agarose gel using a commercially available kit (“Geneclean” BIO 101 Inc., La Jolla, Calif.).

[0943] The fragment and the dephosphorylated plasmid are ligated together with T4 DNA ligase. E. coli HB101 or other suitable E. coli hosts such as XL-1 Blue (Stratagene Cloning Systems, La Jolla, Calif.) cells are transformed with the ligation mixture and spread on culture plates. Bacteria containing the plasmid are identified by digesting DNA from individual colonies and analyzing the digestion product by gel electrophoresis. The sequence of the cloned fragment is confirmed by DNA sequencing.

[0944] Five μg of a plasmid containing the polynucleotide is co-transfected with 1.0 μg of a commercially available linearized baculovirus DNA (“BaculoGold™ baculovirus DNA, Pharmingen, San Diego, Calif.), using the lipofection method described by Felgner et al., Proc. Natl. Acad. Sci. USA 84:7413-7417 (1987). One μg of BaculoGold™ virus DNA and 5 μg of the plasmid are mixed in a sterile well of a microtiter plate containing 50 μl of serum-free Grace's medium (Life Technologies Inc., Gaithersburg, Md.). Afterwards, 10 μl Lipofectin plus 90 μl Grace's medium are added, mixed and incubated for 15 minutes at room temperature. Then the transfection mixture is added drop-wise to Sf9 insect cells (ATCC CRL 1711) seeded in a 35 mm tissue culture plate with 1 ml Grace's medium without serum. The plate is then incubated for 5 hours at 27° C. The transfection solution is then removed from the plate and 1 ml of Grace's insect medium supplemented with 10% fetal calf serum is added. Cultivation is then continued at 27° C. for four days.

[0945] After four days the supernatant is collected and a plaque assay is performed, as described by Summers and Smith, supra. An agarose gel with “Blue Gal” (Life Technologies Inc., Gaithersburg) is used to allow easy identification and isolation of gal-expressing clones, which produce blue-stained plaques. (A detailed description of a “plaque assay” of this type can also be found in the user's guide for insect cell culture and baculovirology distributed by Life Technologies Inc., Gaithersburg, page 9-10.) After appropriate incubation, blue stained plaques are picked with the tip of a micropipettor (e.g., Eppendorf). The agar containing the recombinant viruses is then resuspended in a microcentrifuge tube containing 200 μl of Grace's medium and the suspension containing the recombinant baculovirus is used to infect Sf9 cells seeded in 35 mm dishes. Four days later the supernatants of these culture dishes are harvested and then they are stored at 4° C.

[0946] To verify the expression of the polypeptide, Sf9 cells are grown in Grace's medium supplemented with 10% heat-inactivated FBS. The cells are infected with the recombinant baculovirus containing the polynucleotide at a multiplicity of infection (“MOI”) of about 2. If radiolabeled proteins are desired, 6 hours later the medium is removed and is replaced with SF900 II medium minus methionine and cysteine (available from Life Technologies Inc., Rockville, Md.). After 42 hours, 5 μCi of ³⁵S-methionine and 5 μCi ³⁵S-cysteine (available from Amersham) are added. The cells are further incubated for 16 hours and then are harvested by centrifugation. The proteins in the supernatant as well as the intracellular proteins are analyzed by SDS-PAGE followed by autoradiography (if radiolabeled).

[0947] Microsequencing of the amino acid sequence of the amino terminus of purified protein may be used to determine the amino terminal sequence of the produced protein.

### Example 8

### Expression of a Polypeptide in Mammalian Cells

[0948] The polypeptide of the present invention can be expressed in a mammalian cell. A typical mammalian expression vector contains a promoter element, which mediates the initiation of transcription of mRNA, a protein coding sequence, and signals required for the termination of transcription and polyadenylation of the transcript. Additional elements include enhancers, Kozak sequences and intervening sequences flanked by donor and acceptor sites for RNA splicing. Highly efficient transcription is achieved with the early and late promoters from SV40, the long terminal repeats (LTRs) from Retroviruses, e.g., RSV, HTLVI, HIVI and the early promoter of the cytomegalovirus (CMV). However, cellular elements can also be used (e.g., the human actin promoter).

[0949] Suitable expression vectors for use in practicing the present invention include, for example, vectors such as pSVL and pMSG (Pharmacia, Uppsala, Sweden), pRSVcat (ATCC 37152), pSV2dhfr (ATCC 37146), pBC12MI (ATCC 67109), pCMVSport 2.0, and pCMVSport 3.0. Mammalian host cells that could be used include, human Hela, 293, H9 and Jurkat cells, mouse NIH3T3 and C127 cells, Cos 1, Cos 7 and CV1, quail QC1-3 cells, mouse L cells and Chinese hamster ovary (CHO) cells.

[0950] Alternatively, the polypeptide can be expressed in stable cell lines containing the polynucleotide integrated into a chromosome. The co-transfection with a selectable marker such as DHFR, gpt, neomycin, or hygromycin allows the identification and isolation of the transfected cells.

[0951] The transfected gene can also be amplified to express large amounts of the encoded protein. The DHFR (dihydrofolate reductase) marker is useful in developing cell lines that carry several hundred or even several thousand copies of the gene of interest. (See, e.g., Alt, F. W., et al., J. Biol. Chem. 253:1357-1370 (1978); Hamlin, J. L. and Ma, C., Biochem. et Biophys. Acta, 1097:107-143 (1990); Page, M. J. and Sydenham, M. A., Biotechnology 9:64-68 (1991)). Another useful selection marker is the enzyme glutamine synthase (GS) (Murphy et al., Biochem J. 227:277-279 (1991); Bebbington et al., Bio/Technology 10:169-175 (1992). Using these markers, the mammalian cells are grown in selective medium and the cells with the highest resistance are selected. These cell lines contain the amplified gene(s) integrated into a chromosome. Chinese hamster ovary (CHO) and NSO cells are often used for the production of proteins.

[0952] Derivatives of the plasmid pSV2-dhfr (ATCC Accession No. 37146), the expression vectors pC4 (ATCC Accession No. 209646) and pC6 (ATCC Accession No. 209647) contain the strong promoter (LTR) of the Rous Sarcoma Virus (Cullen et al., Molecular and Cellular Biology, 438-447 (March, 1985)) plus a fragment of the CMV-enhancer (Boshart et al., Cell 41:521-530 (1985)). Multiple cloning sites, e.g., with the restriction enzyme cleavage sites BamHI, XbaI and Asp718, facilitate the cloning of the gene of interest. The vectors also contain the 3′ intron, the polyadenylation and termination signal of the rat preproinsulin gene, and the mouse DHFR gene under control of the SV40 early promoter.

[0953] Specifically, the plasmid pC6, for example, is digested with appropriate restriction enzymes and then dephosphorylated using calf intestinal phosphates by procedures known in the art. The vector is then isolated from a 1% agarose gel.

[0954] A polynucleotide of the present invention is amplified according to the protocol outlined in Example 1. If a naturally occurring signal sequence is used to produce the polypeptide of the present invention, the vector does not need a second signal peptide. Alternatively, if a naturally occurring signal sequence is not used, the vector can be modified to include a heterologous signal sequence. (See, e.g., International Publication No. WO 96/34891.)

[0955] The amplified fragment is isolated from a 1% agarose gel using a commercially available kit (“Geneclean,” BIO 101 Inc., La Jolla, Calif.). The fragment then is digested with appropriate restriction enzymes and again purified on a 1% agarose gel.

[0956] The amplified fragment is then digested with the same restriction enzyme and purified on a 1% agarose gel. The isolated fragment and the dephosphorylated vector are then ligated with T4 DNA ligase. E. coli HB101 or XL-1 Blue cells are then transformed and bacteria are identified that contain the fragment inserted into plasmid pC6 using, for instance, restriction enzyme analysis.

[0957] Chinese hamster ovary cells lacking an active DHFR gene is used for transfection. Five μg of the expression plasmid pC6 or pC4 is cotransfected with 0.5 μg of the plasmid pSVneo using lipofectin (Felgner et al., supra). The plasmid pSV2-neo contains a dominant selectable marker, the neo gene from Tn5 encoding an enzyme that confers resistance to a group of antibiotics including G418. The cells are seeded in alpha minus MEM supplemented with 1 mg/ml G418. After 2 days, the cells are trypsinized and seeded in hybridoma cloning plates (Greiner, Germany) in alpha minus MEM supplemented with 10, 25, or 50 ng/ml of methotrexate plus 1 mg/ml G418. After about 10-14 days single clones are trypsinized and then seeded in 6-well petri dishes or 10 ml flasks using different concentrations of methotrexate (50 nM, 100 nM, 200 nM, 400 nM, 800 nM). Clones growing at the highest concentrations of methotrexate are then transferred to new 6-well plates containing even higher concentrations of methotrexate (1 μM, 2 μM, 5 μM, 10 mM, 20 mM). The same procedure is repeated until clones are obtained which grow at a concentration of 100-200 μM. Expression of the desired gene product is analyzed, for instance, by SDS-PAGE and Western blot or by reversed phase HPLC analysis.

### Example 9

### Protein Fusions

[0958] The polypeptides of the present invention are preferably fused to other proteins. These fusion proteins can be used for a variety of applications. For example, fusion of the present polypeptides to His-tag, HA-tag, protein A, IgG domains, and maltose binding protein facilitates purification. (See Example 5; see also EP A 394,827; Traunecker, et al., Nature 331:84-86 (1988)). Similarly, fusion to IgG-1, IgG-3, and albumin increases the halflife time in vivo. Nuclear localization signals fused to the polypeptides of the present invention can target the protein to a specific subcellular localization, while covalent heterodimer or homodimers can increase or decrease the activity of a fusion protein. Fusion proteins can also create chimeric molecules having more than one function. Finally, fusion proteins can increase solubility and/or stability of the fused protein compared to the non-fused protein. All of the types of fusion proteins described above can be made by modifying the following protocol, which outlines the fusion of a polypeptide to an IgG molecule, or the protocol described in Example 5.

[0959] Briefly, the human Fc portion of the IgG molecule can be PCR amplified, using primers that span the 5′ and 3′ ends of the sequence described below. These primers also should have convenient restriction enzyme sites that will facilitate cloning into an expression vector, preferably a mammalian expression vector.

[0960] For example, if pC4 (ATCC Accession No. 209646) is used, the human Fc portion can be ligated into the BamHI cloning site. Note that the 3′ BamHI site should be destroyed. Next, the vector containing the human Fc portion is re-restricted with BamHI, linearizing the vector, and a polynucleotide of the present invention, isolated by the PCR protocol described in Example 1, is ligated into this BamHI site. Note that the polynucleotide is cloned without a stop codon, otherwise a fusion protein will not be produced.

[0961] If the naturally occurring signal sequence is used to produce the polypeptide of the present invention, pC4 does not need a second signal peptide. Alternatively, if the naturally occurring signal sequence is not used, the vector can be modified to include a heterologous signal sequence. (See, e.g., International Publication No. WO 96/34891.)

[0962] Human IgG Fc Region:

| | |
|---|---|
| GGGATCCGGAGCCCAAATCTTCTGACAAAACTCACA | (SEQ ID NO: 1) |
| CATGCCCACCGTGCCCAGCACCTGAATTCGAGGGTG | |
| CACCGTCAGTCTTCCTCTTCCCCCCAAAACCCAAGG | |
| ACACCCTCATGATCTCCCGGACTCCTGAGGTCACAT | |
| GCGTGGTGGTGGACGTAAGCCACGAAGACCCTGAGG | |
| TCAAGTTCAACTGGTACGTGGACGGCGTGGAGGTGC | |
| ATAATGCCAAGACAAAGCCGCGGGAGGAGCAGTACA | |
| ACAGCACGTACCGTGTGGTCAGCGTCCTCACCGTCC | |
| TGCACCAGGACTGGCTGAATGGCAAGGAGTACAAGT | |
| GCAAGGTCTCCAACAAAGCCCTCCCAACCCCCATCG | |
| AGAAAACCATCTCCAAAGCCAAAGGGCAGCCCCGAG | |
| AACCACAGGTGTACACCCTGCCCCCATCCCGGGATG | |
| AGCTGACCAAGAACCAGGTCAGCCTGACCTGCCTGG | |
| TCAAAGGCTTCTATCCAAGCGACATCGCCGTGGAGT | |
| GGGAGAGCAATGGGCAGCCGGAGAACAACTACAAGA | |
| CCACGCCTCCCGTGCTGGACTCCGACGGCTCCTTCT | |
| TCCTCTACAGCAAGCTCACCGTGGACAAGAGCAGGT | |
| GGCAGCAGGGGAACGTCTTCTCATGCTCCGTGATGC | |
| ATGAGGCTCTGCACAACCACTACACGCAGAAGAGCC | |
| TCTCCCTGTCTCCGGGTAAATGAGTGCGACGGCCGC | |
| GACTCTAGAGGAT | |

### Example 10

### Production of an Antibody from a Polypeptide

a) Hybridoma Technology

[0963] The antibodies of the present invention can be prepared by a variety of methods. (See, Current Protocols, Chapter 2.) As one example of such methods, cells expressing a polypeptide of the present invention are administered to an animal to induce the production of sera containing polyclonal antibodies. In a preferred method, a preparation of a polypeptide of the present invention is prepared and purified to render it substantially free of natural contaminants. Such a preparation is then introduced into an animal in order to produce polyclonal antisera of greater specific activity.

[0964] Monoclonal antibodies specific for a polypeptide of the present invention are prepared using hybridoma technology (Kohler et al., Nature 256:495 (1975); Kohler et al., Eur. J. Immunol. 6:511 (1976); Kohler et al., Eur. J. Immunol. 6:292 (1976); Hammerling et al., in: Monoclonal Antibodies and T-Cell Hybridomas, Elsevier, N.Y., pp. 563-681 (1981)). In general, an animal (preferably a mouse) is immunized with a polypeptide of the present invention or, more preferably, with a secreted polypeptide-expressing cell. Such polypeptide-expressing cells are cultured in any suitable tissue culture medium, preferably in Earle's modified Eagle's medium supplemented with 10% fetal bovine serum (inactivated at about 56° C.), and supplemented with about 10 g/l of nonessential amino acids, about 1,000 U/ml of penicillin, and about 100 μg/ml of streptomycin.

[0965] The splenocytes of such mice are extracted and fused with a suitable myeloma cell line. Any suitable myeloma cell line may be employed in accordance with the present invention; however, it is preferable to employ the parent myeloma cell line (SP20), available from the ATCC. After fusion, the resulting hybridoma cells are selectively maintained in HAT medium, and then cloned by limiting dilution as described by Wands et al. (Gastroenterology 80:225-232 (1981)). The hybridoma cells obtained through such a selection are then assayed to identify clones which secrete antibodies capable of binding the polypeptide of the present invention.

[0966] Alternatively, additional antibodies capable of binding to a polypeptide of the present invention can be produced in a two-step procedure using anti-idiotypic antibodies. Such a method makes use of the fact that antibodies are themselves antigens, and therefore, it is possible to obtain an antibody that binds to a second antibody. In accordance with this method, protein specific antibodies are used to immunize an animal, preferably a mouse. The splenocytes of such an animal are then used to produce hybridoma cells, and the hybridoma cells are screened to identify clones which produce an antibody whose ability to bind to the polypeptide-specific antibody can be blocked by said polypeptide. Such antibodies comprise anti-idiotypic antibodies to the polypeptide-specific antibody and are used to immunize an animal to induce formation of further polypeptide-specific antibodies.

[0967] For in vivo use of antibodies in humans, an antibody is “humanized”. Such antibodies can be produced using genetic constructs derived from hybridoma cells producing the monoclonal antibodies described above. Methods for producing chimeric and humanized antibodies are known in the art and are discussed herein. (See, for review, Morrison, Science 229:1202 (1985); Oi et al., BioTechniques 4:214 (1986); Cabilly et al., U.S. Pat. No. 4,816,567; Taniguchi et al., EP 171496; Morrison et al., EP 173494; Neuberger et al., WO 8601533; Robinson et al., International Publication No. WO 8702671; Boulianne et al., Nature 312:643 (1984); Neuberger et al., Nature 314:268 (1985)).

b) Isolation of Antibody Fragments Directed Against a Polypeptide of the Present Invention from a Library of scFvs

[0968] Naturally occurring V-genes isolated from human PBLs are constructed into a library of antibody fragments which contain reactivities against a polypeptide of the present invention to which the donor may or may not have been exposed (see e.g., U.S. Pat. No. 5,885,793 incorporated herein by reference in its entirety).

[0969] Rescue of the Library. A library of scFvs is constructed from the RNA of human PBLs as described in International Publication No. WO 92/01047. To rescue phage displaying antibody fragments, approximately 10⁹ E. coli harboring the phagemid are used to inoculate 50 ml of 2×TY containing 1% glucose and 100 μg/ml of ampicillin (2×TY-AMP-GLU) and grown to an O.D. of 0.8 with shaking. Five ml of this culture is used to inoculate 50 ml of 2×TY-AMP-GLU, 2×108 TU of delta gene 3 helper (M13 delta gene III, see International Publication No. WO 92/01047) are added and the culture incubated at 37° C. for 45 minutes without shaking and then at 37° C. for 45 minutes with shaking. The culture is centrifuged at 4000 r.p.m. for 10 min. and the pellet resuspended in 2 liters of 2×TY containing 100 μg/ml ampicillin and 50 ug/ml kanamycin and grown overnight. Phage are prepared as described in International Publication No. WO 92/01047.

[0970] M13 delta gene III is prepared as follows: M13 delta gene III helper phage does not encode gene III protein, hence the phage(mid) displaying antibody fragments have a greater avidity of binding to antigen. Infectious M13 delta gene III particles are made by growing the helper phage in cells harboring a pUC19 derivative supplying the wild type gene III protein during phage morphogenesis. The culture is incubated for 1 hour at 37° C. without shaking and then for a further hour at 37° C. with shaking. Cells are spun down (IEC-Centra 8,400 r.p.m. for 10 min), resuspended in 300 ml 2×TY broth containing 100 μg ampicillin/ml and 25 μg kanamycin/ml (2×TY-AMP-KAN) and grown overnight, shaking at 37° C. Phage particles are purified and concentrated from the culture medium by two PEG-precipitations (Sambrook et al., 1990), resuspended in 2 ml PBS and passed through a 0.45 μm filter (Minisart NML; Sartorius) to give a final concentration of approximately 1013 transducing units/ml (ampicillin-resistant clones).

[0971] Panning of the Library. Immunotubes (Nunc) are coated overnight in PBS with 4 ml of either 100 μg/ml or 10 μg/ml of a polypeptide of the present invention. Tubes are blocked with 2% Marvel-PBS for 2 hours at 37° C. and then washed 3 times in PBS. Approximately 10¹³ TU of phage is applied to the tube and incubated for 30 minutes at room temperature tumbling on an over and under turntable and then left to stand for another 1.5 hours. Tubes are washed 10 times with PBS 0.1% Tween-20 and 10 times with PBS. Phage are eluted by adding 1 ml of 100 mM triethylamine and rotating 15 minutes on an under and over turntable after which the solution is immediately neutralized with 0.5 ml of 1.0M Tris-HCl, pH 7.4. Phage are then used to infect 10 ml of mid-log E. coli TGI by incubating eluted phage with bacteria for 30 minutes at 37° C. The E. coli are then plated on TYE plates containing 1% glucose and 100 μg/ml ampicillin. The resulting bacterial library is then rescued with delta gene 3 helper phage as described above to prepare phage for a subsequent round of selection. This process is then repeated for a total of 4 rounds of affinity purification with tube-washing increased to 20 times with PBS, 0.1% Tween-20 and 20 times with PBS for rounds 3 and 4.

[0972] Characterization of Binders. Eluted phage from the 3rd and 4th rounds of selection are used to infect E. coli HB 2151 and soluble scfv is produced (Marks, et al., 1991) from single colonies for assay. ELISAs are performed with microtitre plates coated with either 10 pg/ml of the polypeptide of the present invention in 50 mM bicarbonate pH 9.6. Clones positive in ELISA are further characterized by PCR fingerprinting (see, e.g., International Publication No. WO 92/01047) and then by sequencing. These ELISA positive clones may also be further characterized by techniques known in the art, such as, for example, epitope mapping, binding affinity, receptor signal transduction, ability to block or competitively inhibit antibody/antigen binding, and competitive agonistic or antagonistic activity.

### Example 11

### Method of Determining Alterations in a Gene Corresponding to a Polynucleotide

[0973] RNA isolated from entire families or individual patients presenting with an immune disease or disorder is isolated. cDNA is then generated from these RNA samples using protocols known in the art. (See, Sambrook.) The cDNA is then used as a template for PCR, employing primers surrounding regions of interest in SEQ ID NO:X; and/or the nucleotide sequence of the cDNA contained in ATCC Deposit No:Z. Suggested PCR conditions consist of 35 cycles at 95 degrees C. for 30 seconds; 60-120 seconds at 52-58 degrees C.; and 60-120 seconds at 70 degrees C., using buffer solutions described in Sidransky et al., Science 252:706 (1991).

[0974] PCR products are then sequenced using primers labeled at their 5′ end with T4 polynucleotide kinase, employing SequiTherm Polymerase (Epicentre Technologies). The intron-exon boundaries of selected exons is also determined and genomic PCR products analyzed to confirm the results. PCR products harboring suspected mutations are then cloned and sequenced to validate the results of the direct sequencing.

[0975] PCR products are cloned into T-tailed vectors as described in Holton et al., Nucleic Acids Research, 19:1156 (1991) and sequenced with T7 polymerase (United States Biochemical). Affected individuals are identified by mutations not present in unaffected individuals.

[0976] Genomic rearrangements are also observed as a method of determining alterations in a gene corresponding to a polynucleotide. Genomic clones isolated according to Example 2 are nick-translated with digoxigenindeoxy-uridine 5′-triphosphate (Boehringer Manheim), and FISH performed as described in Johnson et al., Methods Cell Biol. 35:73-99 (1991). Hybridization with the labeled probe is carried out using a vast excess of human cot-1 DNA for specific hybridization to the corresponding genomic locus.

[0977] Chromosomes are counterstained with 4,6-diamino-2-phenylidole and propidium iodide, producing a combination of C- and R-bands. Aligned images for precise mapping are obtained using a triple-band filter set (Chroma Technology, Brattleboro, Vt.) in combination with a cooled charge-coupled device camera (Photometrics, Tucson, Ariz.) and variable excitation wavelength filters. (Johnson et al., Genet. Anal. Tech. Appl., 8:75 (1991)). Image collection, analysis and chromosomal fractional length measurements are performed using the ISee Graphical Program System. (Inovision Corporation, Durham, N.C.) Chromosome alterations of the genomic region hybridized by the probe are identified as insertions, deletions, and translocations. These alterations are used as a diagnostic marker for an associated disease.

### Example 12

### Method of Detecting Abnormal Levels of a Polypeptide in a Biological Sample

[0978] A polypeptide of the present invention can be detected in a biological sample, and if an increased or decreased level of the polypeptide is detected, this polypeptide is a marker for a particular phenotype. Methods of detection are numerous, and thus, it is understood that one skilled in the art can modify the following assay to fit their particular needs.

[0979] For example, antibody-sandwich ELISAs are used to detect polypeptides in a sample, preferably a biological sample. Wells of a microtiter plate are coated with specific antibodies, at a final concentration of 0.2 to 10 ug/ml. The antibodies are either monoclonal or polyclonal and are produced by the method described in Example 10. The wells are blocked so that non-specific binding of the polypeptide to the well is reduced.

[0980] The coated wells are then incubated for >2 hours at RT with a sample containing the polypeptide. Preferably, serial dilutions of the sample should be used to validate results. The plates are then washed three times with deionized or distilled water to remove unbound polypeptide.

[0981] Next, 50 ul of specific antibody-alkaline phosphatase conjugate, at a concentration of 25-400 ng, is added and incubated for 2 hours at room temperature. The plates are again washed three times with deionized or distilled water to remove unbound conjugate.

[0982] Add 75 ul of 4-methylumbelliferyl phosphate (MUP) or p-nitrophenyl phosphate (NPP) substrate solution to each well and incubate 1 hour at room temperature. Measure the reaction by a microtiter plate reader. Prepare a standard curve, using serial dilutions of a control sample, and plot polypeptide concentration on the X-axis (log scale) and fluorescence or absorbance of the Y-axis (linear scale). Interpolate the concentration of the polypeptide in the sample using the standard curve.

### Example 13

### Formulation

[0983] The invention also provides methods of preventing, treating and/or ameliorating an immune disease or disorder by administration to a subject of an effective amount of a Therapeutic. By therapeutic is meant polynucleotides or polypeptides of the invention (including fragments and variants), agonists or antagonists thereof, and/or antibodies thereto, in combination with a pharmaceutically acceptable carrier type (e.g., a sterile carrier).

[0984] The Therapeutic will be formulated and dosed in a fashion consistent with good medical practice, taking into account the clinical condition of the individual patient (especially the side effects of treatment with the Therapeutic alone), the site of delivery, the method of administration, the scheduling of administration, and other factors known to practitioners. The “effective amount” for purposes herein is thus determined by such considerations.

[0985] As a general proposition, the total pharmaceutically effective amount of the Therapeutic administered parenterally per dose will be in the range of about 1 ug/kg/day to 10 mg/kg/day of patient body weight, although, as noted above, this will be subject to therapeutic discretion. More preferably, this dose is at least 0.01 mg/kg/day, and most preferably for humans between about 0.01 and 1 mg/kg/day for the hormone. If given continuously, the Therapeutic is typically administered at a dose rate of about 1 ug/kg/hour to about 50 ug/kg/hour, either by 1-4 injections per day or by continuous subcutaneous infusions, for example, using a mini-pump. An intravenous bag solution may also be employed. The length of treatment needed to observe changes and the interval following treatment for responses to occur appears to vary depending on the desired effect.

[0986] Therapeutics can be are administered orally, rectally, parenterally, intracistemally, intravaginally, intraperitoneally, topically (as by powders, ointments, gels, drops or transdermal patch), bucally, or as an oral or nasal spray. “Pharmaceutically acceptable carrier” refers to a non-toxic solid, semisolid or liquid filler, diluent, encapsulating material or formulation auxiliary of any. The term “parenteral” as used herein refers to modes of administration which include intravenous, intramuscular, intraperitoneal, intrasternal, subcutaneous and intraarticular injection and infusion.

[0987] Therapeutics of the invention are also suitably administered by sustained-release systems. Suitable examples of sustained-release Therapeutics are administered orally, rectally, parenterally, intracistemally, intravaginally, intraperitoneally, topically (as by powders, ointments, gels, drops or transdermal patch), bucally, or as an oral or nasal spray. “Pharmaceutically acceptable carrier” refers to a non-toxic solid, semisolid or liquid filler, diluent, encapsulating material or formulation auxiliary of any type. The term “parenteral” as used herein refers to modes of administration which include intravenous, intramuscular, intraperitoneal, intrasternal, subcutaneous and intraarticular injection and infusion.

[0988] Therapeutics of the invention are also suitably administered by sustained-release systems. Suitable examples of sustained-release Therapeutics include suitable polymeric materials (such as, for example, semi-permeable polymer matrices in the form of shaped articles, e.g., films, or mirocapsules), suitable hydrophobic materials (for example as an emulsion in an acceptable oil) or ion exchange resins, and sparingly soluble derivatives (such as, for example, a sparingly soluble salt).

[0989] Sustained-release matrices include polylactides (U.S. Pat. No. 3,773,919, EP 58,481), copolymers of L-glutamic acid and gamma-ethyl-L-glutamate (Sidman et al., Biopolymers 22:547-556 (1983)), poly(2-hydroxyethyl methacrylate) (Langer et al., J. Biomed. Mater. Res. 15:167-277 (1981), and Langer, Chem. Tech. 12:98-105 (1982)), ethylene vinyl acetate (Langer et al., Id.) or poly-D-(−)-3-hydroxybutyric acid (EP 133,988).

[0990] In a preferred embodiment, polypeptide, polynucleotide, and antibody compositions of the invention are formulated in a biodegradable, polymeric drug delivery system, for example as described in U.S. Pat. Nos. 4,938,763; 5,278,201; 5,278,202; 5,324,519; 5,340,849; and 5,487,897 and in International Publication Numbers WO01/35929, WO00/24374, and WO00/06117 which are hereby incorporated by reference in their entirety. In specific preferred embodiments the polypeptide, polynucleotide, and antibody compositions of the invention are formulated using the ATRIGEL® Biodegradable System of Atrix Laboratories, Inc. (Fort Collins, Colo.).

[0991] Examples of biodegradable polymers which can be used in the formulation of polypeptide, polynucleotide, and antibody compositions, include but are not limited to, polylactides, polyglycolides, polycaprolactones, polyanhydrides, polyamides, polyurethanes, polyesteramides, polyorthoesters, polydioxanones, polyacetals, polyketals, polycarbonates, polyorthocarbonates, polyphosphazenes, polyhydroxybutyrates, polyhydroxyvalerates, polyalkylene oxalates, polyalkylene succinates, poly(malic acid), poly(amino acids), poly(methyl vinyl ether), poly(maleic anhydride), polyvinylpyrrolidone, polyethylene glycol, polyhydroxycellulose, chitin, chitosan, and copolymers, terpolymers, or combinations or mixtures of the above materials. The preferred polymers are those that have a lower degree of crystallization and are more hydrophobic. These polymers and copolymers are more soluble in the biocompatible solvents than the highly crystalline polymers such as polyglycolide and chitin which also have a high degree of hydrogen-bonding. Preferred materials with the desired solubility parameters are the polylactides, polycaprolactones, and copolymers of these with glycolide in which there are more amorphous regions to enhance solubility. In specific preferred embodiments, the biodegradable polymers which can be used in the formulation of polypeptide, polynucleotide, and antibody compositions are poly(lactide-co-glycolides). Polymer properties such as molecular weight, hydrophobicity, and lactide/glycolide ratio may be modified to obtain the desired polypeptide, polynucleotide, or antibody release profile (See, e.g., Ravivarapu et al., Journal of Pharmaceutical Sciences 89:732-741 (2000), which is hereby incorporated by reference in its entirety).

[0992] It is also preferred that the solvent for the biodegradable polymer be non-toxic, water miscible, and otherwise biocompatible. Examples of such solvents include, but are not limited to, N-methyl-2-pyrrolidone, 2-pyrrolidone, C2 to C6 alkanols, C1 to C15 alchohols, dils, triols, and tetraols such as ethanol, glycerine propylene glycol, butanol; C3 to C15 alkyl ketones such as acetone, diethyl ketone and methyl ethyl ketone; C3 to C15 esters such as methyl acetate, ethyl acetate, ethyl lactate; alkyl ketones such as methyl ethyl ketone, C1 to C15 amides such as dimethylformamide, dimethylacetamide and caprolactam; C3 to C20 ethers such as tetrahydrofuran, or solketal; tweens, triacetin, propylene carbonate, decylmethylsulfoxide, dimethyl sulfoxide, oleic acid, 1-dodecylazacycloheptan-2-one, Other preferred solvents are benzyl alchohol, benzyl benzoate, dipropylene glycol, tributyrin, ethyl oleate, glycerin, glycofural, isopropyl myristate, isopropyl palmitate, oleic acid, polyethylene glycol, propylene carbonate, and triethyl citrate. The most preferred solvents are N-methyl-2-pyrrolidone, 2-pyrrolidone, dimethyl sulfoxide, triacetin, and propylene carbonate because of the solvating ability and their compatibility.

[0993] Additionally, formulations comprising polypeptide, polynucleotide, and antibody compositions and a biodegradable polymer may also include release-rate modification agents and/or pore-forming agents. Examples of release-rate modification agents include, but are not limited to, fatty acids, triglycerides, other like hydrophobic compounds, organic solvents, plasticizing compounds and hydrophilic compounds. Suitable release rate modification agents include, for example, esters of mono-, di-, and tricarboxylic acids, such as 2-ethoxyethyl acetate, methyl acetate, ethyl acetate, diethyl phthalate, dimethyl phthalate, dibutyl phthalate, dimethyl adipate, dimethyl succinate, dimethyl oxalate, dimethyl citrate, triethyl citrate, acetyl tributyl citrate, acetyl triethyl citrate, glycerol triacetate, di(n-butyl) sebecate, and the like; polyhydroxy alcohols, such as propylene glycol, polyethylene glycol, glycerin, sorbitol, and the like; fatty acids; triesters of glycerol, such as triglycerides, epoxidized soybean oil, and other epoxidized vegetable oils; sterols, such as cholesterol; alcohols, such as C.sub.6-C.sub.12 alkanols, 2-ethoxyethanol. The release rate modification agent may be used singly or in combination with other such agents. Suitable combinations of release rate modification agents include, but are not limited to, glycerin/propylene glycol, sorbitol/glycerine, ethylene oxide/propylene oxide, butylene glycol/adipic acid, and the like. Preferred release rate modification agents include, but are not limited to, dimethyl citrate, triethyl citrate, ethyl heptanoate, glycerin, and hexanediol. Suitable pore-forming agents that may be used in the polymer composition include, but are not limited to, sugars such as sucrose and dextrose, salts such as sodium chloride and sodium carbonate, polymers such as hydroxylpropylcellulose, carboxymethylcellulose, polyethylene glycol, and polyvinylpyrrolidone. Solid crystals that will provide a defined pore size, such as salt or sugar, are preferred.

[0994] In specific preferred embodiments the polypeptide, polynucleotide, and antibody compositions of the invention are formulated using the BEMA™ BioErodible Mucoadhesive System, MCA™ MucoCutaneous Absorption System, SMP™ Solvent MicroParticle System, or BCP™ BioCompatible Polymer System of Atrix Laboratories, Inc. (Fort Collins, Colo.).

[0995] Sustained-release Therapeutics also include liposomally entrapped Therapeutics of the invention (see generally, Langer, Science 249:1527-1533 (1990); Treat et al., in Liposomes in the Therapy of Infectious Disease and Cancer, Lopez-Berestein and Fidler (eds.), Liss, New York, pp. 317-327 and 353-365 (1989)). Liposomes containing the Therapeutic are prepared by methods known per se: DE 3,218,121; Epstein et al., Proc. Natl. Acad. Sci. (USA) 82:3688-3692 (1985); Hwang et al., Proc. Natl. Acad. Sci. (USA) 77:4030-4034 (1980); EP 52,322; EP 36,676; EP 88,046; EP 143,949; EP 142,641; Japanese Pat. Appl. 83-118008; U.S. Pat. Nos. 4,485,045 and 4,544,545; and EP 102,324. Ordinarily, the liposomes are of the small (about 200-800 Angstroms) unilamellar type in which the lipid content is greater than about 30 mol. percent cholesterol, the selected proportion being adjusted for the optimal Therapeutic.

[0996] In yet an additional embodiment, the Therapeutics of the invention are delivered by way of a pump (see Langer, supra; Sefton, CRC Crit. Ref. Biomed. Eng. 14:201 (1987); Buchwald et al., Surgery 88:507 (1980); Saudek et al., N. Engl. J. Med. 321:574 (1989)).

[0997] Other controlled release systems are discussed in the review by Langer (Science 249:1527-1533 (1990)).

[0998] For parenteral administration, in one embodiment, the Therapeutic is formulated generally by mixing it at the desired degree of purity, in a unit dosage injectable form (solution, suspension, or emulsion), with a pharmaceutically acceptable carrier, i.e., one that is non-toxic to recipients at the dosages and concentrations employed and is compatible with other ingredients of the formulation. For example, the formulation preferably does not include oxidizing agents and other compounds that are known to be deleterious to the Therapeutic.

[0999] Generally, the formulations are prepared by contacting the Therapeutic uniformly and intimately with liquid carriers or finely divided solid carriers or both. Then, if necessary, the product is shaped into the desired formulation. Preferably the carrier is a parenteral carrier, more preferably a solution that is isotonic with the blood of the recipient. Examples of such carrier vehicles include water, saline, Ringer's solution, and dextrose solution. Non-aqueous vehicles such as fixed oils and ethyl oleate are also useful herein, as well as liposomes.

[1000] The carrier suitably contains minor amounts of additives such as substances that enhance isotonicity and chemical stability. Such materials are non-toxic to recipients at the dosages and concentrations employed, and include buffers such as phosphate, citrate, succinate, acetic acid, and other organic acids or their salts; antioxidants such as ascorbic acid; low molecular weight (less than about ten residues) polypeptides, e.g., polyarginine or tripeptides; proteins, such as serum albumin, gelatin, or immunoglobulins; hydrophilic polymers such as polyvinylpyrrolidone; amino acids, such as glycine, glutamic acid, aspartic acid, or arginine; monosaccharides, disaccharides, and other carbohydrates including cellulose or its derivatives, glucose, manose, or dextrins; chelating agents such as EDTA; sugar alcohols such as mannitol or sorbitol; counterions such as sodium; and/or nonionic surfactants such as polysorbates, poloxamers, or PEG.

[1001] The Therapeutic is typically formulated in such vehicles at a concentration of about 0.1 mg/ml to 100 mg/ml, preferably 1-10 mg/ml, at a pH of about 3 to 8. It will be understood that the use of certain of the foregoing excipients, carriers, or stabilizers will result in the formation of polypeptide salts.

[1002] Any pharmaceutical used for therapeutic administration can be sterile. Sterility is readily accomplished by filtration through sterile filtration membranes (e.g., 0.2 micron membranes). Therapeutics generally are placed into a container having a sterile access port, for example, an intravenous solution bag or vial having a stopper pierceable by a hypodermic injection needle.

[1003] Therapeutics ordinarily will be stored in unit or multi-dose containers, for example, sealed ampoules or vials, as an aqueous solution or as a lyophilized formulation for reconstitution. As an example of a lyophilized formulation, 10-ml vials are filled with 5 ml of sterile-filtered 1% (w/v) aqueous Therapeutic solution, and the resulting mixture is lyophilized. The infusion solution is prepared by reconstituting the lyophilized Therapeutic using bacteriostatic Water-for-Injection.

[1004] The invention also provides a pharmaceutical pack or kit comprising one or more containers filled with one or more of the ingredients of the Therapeutics of the invention. Associated with such container(s) can be a notice in the form prescribed by a governmental agency regulating the manufacture, use or sale of pharmaceuticals or biological products, which notice reflects approval by the agency of manufacture, use or sale for human administration. In addition, the Therapeutics may be employed in conjunction with other therapeutic compounds.

[1005] The Therapeutics of the invention may be administered alone or in combination with adjuvants. Adjuvants that may be administered with the Therapeutics of the invention include, but are not limited to, alum, alum plus deoxycholate (ImmunoAg), MTP-PE (Biocine Corp.), QS21 (Genentech, Inc.), BCG (e.g., THERACYS®), MPL and nonviable prepartions of Corynebacterium parvum. In a specific embodiment, Therapeutics of the invention are administered in combination with alum. In another specific embodiment, Therapeutics of the invention are administered in combination with QS-21. Further adjuvants that may be administered with the Therapeutics of the invention include, but are not limited to, Monophosphoryl lipid immunomodulator, AdjuVax 100a, QS-21, QS-18, CRL1005, Aluminum salts, MF-59, and Virosomal adjuvant technology. Vaccines that may be administered with the Therapeutics of the invention include, but are not limited to, vaccines directed toward protection against MMR (measles, mumps, rubella), polio, varicella, tetanus/diptheria, hepatitis A, hepatitis B, haemophilus influenzae B, whooping cough, pneumonia, influenza, Lyme's Disease, rotavirus, cholera, yellow fever, Japanese encephalitis, poliomyelitis, rabies, typhoid fever, and pertussis. Combinations may be administered either concomitantly, e.g., as an admixture, separately but simultaneously or concurrently; or sequentially. This includes presentations in which the combined agents are administered together as a therapeutic mixture, and also procedures in which the combined agents are administered separately but simultaneously, e.g., as through separate intravenous lines into the same individual. Administration “in combination” further includes the separate administration of one of the compounds or agents given first, followed by the second.

[1006] The Therapeutics of the invention may be administered alone or in combination with other therapeutic agents. Therapeutic agents that may be administered in combination with the Therapeutics of the invention, include but not limited to, chemotherapeutic agents, antibiotics, steroidal and non-steroidal anti-inflammatories, conventional immunotherapeutic agents, and/or therapeutic treatments described below. Combinations may be administered either concomitantly, e.g., as an admixture, separately but simultaneously or concurrently; or sequentially. This includes presentations in which the combined agents are administered together as a therapeutic mixture, and also procedures in which the combined agents are administered separately but simultaneously, e.g., as through separate intravenous lines into the same individual. Administration “in combination” further includes the separate administration of one of the compounds or agents given first, followed by the second.

[1007] In one embodiment, the Therapeutics of the invention are administered in combination with an anticoagulant. Anticoagulants that may be administered with the compositions of the invention include, but are not limited to, heparin, low molecular weight heparin, warfarin sodium (e.g., COUMADIN®), dicumarol, 4-hydroxycoumarin, anisindione (e.g., MIRADON™), acenocoumarol (e.g., nicoumalone, SINTHROME™), indan-1,3-dione, phenprocoumon (e.g., MARCUMAR™), ethyl biscoumacetate (e.g., TROMEXAN™), and aspirin. In a specific embodiment, compositions of the invention are administered in combination with heparin and/or warfarin. In another specific embodiment, compositions of the invention are administered in combination with warfarin. In another specific embodiment, compositions of the invention are administered in combination with warfarin and aspirin. In another specific embodiment, compositions of the invention are administered in combination with heparin. In another specific embodiment, compositions of the invention are administered in combination with heparin and aspirin.

[1008] In another embodiment, the Therapeutics of the invention are administered in combination with thrombolytic drugs. Thrombolytic drugs that may be administered with the compositions of the invention include, but are not limited to, plasminogen, lys-plasminogen, alpha2-antiplasmin, streptokinae (e.g., KABIKINASE™), antiresplace (e.g., EMINASE™), tissue plasminogen activator (t-PA, altevase, ACTIVASE™), urokinase (e.g., ABBOKINASE™), sauruplase, (Prourokinase, single chain urokinase), and aminocaproic acid (e.g., AMICAR™). In a specific embodiment, compositions of the invention are administered in combination with tissue plasminogen activator and aspirin.

[1009] In another embodiment, the Therapeutics of the invention are administered in combination with antiplatelet drugs. Antiplatelet drugs that may be administered with the compositions of the invention include, but are not limited to, aspirin, dipyridamole (e.g., PERSANTINE™), and ticlopidine (e.g., TICLID™).

[1010] In specific embodiments, the use of anti-coagulants, thrombolytic and/or antiplatelet drugs in combination with Therapeutics of the invention is contemplated for the detection, prevention, diagnosis, prognostication, treatment, and/or amelioration of thrombosis, arterial thrombosis, venous thrombosis, thromboembolism, pulmonary embolism, atherosclerosis, myocardial infarction, transient ischemic attack, unstable angina. In specific embodiments, the use of anticoagulants, thrombolytic drugs and/or antiplatelet drugs in combination with Therapeutics of the invention is contemplated for the prevention of occulsion of saphenous grafts, for reducing the risk of periprocedural thrombosis as might accompany angioplasty procedures, for reducing the risk of stroke in patients with atrial fibrillation including nonrheumatic atrial fibrillation, for reducing the risk of embolism associated with mechanical heart valves and or mitral valves disease. Other uses for the therapeutics of the invention, alone or in combination with antiplatelet, anticoagulant, and/or thrombolytic drugs, include, but are not limited to, the prevention of occlusions in extracorporeal devices (e.g., intravascular canulas, vascular access shunts in hemodialysis patients, hemodialysis machines, and cardiopulmonary bypass machines).

[1011] In certain embodiments, Therapeutics of the invention are administered in combination with antiretroviral agents, nucleoside/nucleotide reverse transcriptase inhibitors (NRTIs), non-nucleoside reverse transcriptase inhibitors (NNRTIs), and/or protease inhibitors (PIs). NRTIs that may be administered in combination with the Therapeutics of the invention, include, but are not limited to, RETROVIR™ (zidovudine/AZT), VIDEX™ (didanosine/ddI), HIVID™ (zalcitabine/ddC), ZERIT™ (stavudine/d4T), EPIVIR™ (lamivudine/3TC), and COMBIVIR™ (zidovudine/lamivudine). NNRTIs that may be administered in combination with the Therapeutics of the invention, include, but are not limited to, VIRAMUNE™ (nevirapine), RESCRIPTOR™ (delavirdine), and SUSTIVA™ (efavirenz). Protease inhibitors that may be administered in combination with the Therapeutics of the invention, include, but are not limited to, CRIXIVAN™ (indinavir), NORVIR™ (ritonavir), INVIRASE™ (saquinavir), and VIRACEPT™ (nelfinavir). In a specific embodiment, antiretroviral agents, nucleoside reverse transcriptase inhibitors, non-nucleoside reverse transcriptase inhibitors, and/or protease inhibitors may be used in any combination with Therapeutics of the invention to treat AIDS and/or to prevent or treat HIV infection.

[1012] Additional NRTIs include LODENOSINE™ (F-ddA; an acid-stable adenosine NRTI; Triangle/Abbott; COVIRACIL™ (emtricitabine/FTC; structurally related to lamivudine (3TC) but with 3- to 10-fold greater activity in vitro; Triangle/Abbott); dOTC (BCH-10652, also structurally related to lamivudine but retains activity against a substantial proportion of lamivudine-resistant isolates; Biochem Pharma); Adefovir (refused approval for anti-HIV therapy by FDA; Gilead Sciences); PREVEON® (Adefovir Dipivoxil, the active prodrug of adefovir; its active form is PMEA-pp); TENOFOVIR™ (bis-POC PMPA, a PMPA prodrug; Gilead); DAPD/DXG (active metabolite of DAPD; Triangle/Abbott); D-D4FC (related to 3TC, with activity against AZT/3TC-resistant virus); GW420867X (Glaxo Wellcome); ZIAGEN™ (abacavir/159U89; Glaxo Wellcome Inc.); CS-87 (3′azido-2′,3′-dideoxyuridine; WO 99/66936); and S-acyl-2-thioethyl (SATE)-bearing prodrug forms of βL-FD4C and β-L-FddC (WO 98/17281).

[1013] Additional NNRTIs include COACTINON™ (Emivirine/MKC-442, potent NNRTI of the HEPT class; Triangle/Abbott); CAPRAVIRE™ (AG-1549/S-1153, a next generation NNRTI with activity against viruses containing the K103N mutation; Agouron); PNU-142721 (has 20- to 50-fold greater activity than its predecessor delavirdine and is active against K103N mutants; Pharmacia & Upjohn); DPC-961 and DPC-963 (second-generation derivatives of efavirenz, designed to be active against viruses with the K103N mutation; DuPont); GW-420867X (has 25-fold greater activity than HBY097 and is active against K103N mutants; Glaxo Wellcome); CALANOLIDE A (naturally occurring agent from the latex tree; active against viruses containing either or both the Y181C and K103N mutations); and Propolis (WO 99/49830).

[1014] Additional protease inhibitors include LOPINAVIR™ (ABT378/r; Abbott Laboratories); BMS-232632 (an azapeptide; Bristol-Myres Squibb); TIPRANAVIR™ (PNU-140690, a non-peptic dihydropyrone; Pharmacia & Upjohn); PD-178390 (a nonpeptidic dihydropyrone; Parke-Davis); BMS 232632 (an azapeptide; Bristol-Myers Squibb); L-756,423 (an indinavir analog; Merck); DMP-450 (a cyclic urea compound; Avid & DuPont); AG-1776 (a peptidomimetic with in vitro activity against protease inhibitor-resistant viruses; Agouron); VX-175/GW-433908 (phosphate prodrug of amprenavir; Vertex & Glaxo Welcome); CGP61755 (Ciba); and AGENERASE™ (amprenavir; Glaxo Wellcome Inc.).

[1015] Additional antiretroviral agents include fusion inhibitors/gp41 binders. Fusion inhibitors/gp41 binders include T-20 (a peptide from residues 643-678 of the HW gp41 transmembrane protein ectodomain which binds to gp41 in its resting state and prevents transformation to the fusogenic state; Trimeris) and T-1249 (a second-generation fusion inhibitor; Trimeris).

[1016] Additional antiretroviral agents include fusion inhibitors/chemokine receptor antagonists. Fusion inhibitors/chemokine receptor antagonists include CXCR4 antagonists such as AMD 3100 (a bicyclam), SDF-1 and its analogs, and ALX40-4C (a cationic peptide), T22 (an 18 amino acid peptide; Trimeris) and the T22 analogs T134 and T140; CCR5 antagonists such as RANTES (9-68), AOP-RANTES, NNY-RANTES, and TAK-779; and CCR5/CXCR4 antagonists such as NSC 651016 (a distamycin analog). Also included are CCR2B, CCR3, and CCR6 antagonists. Chemokine recpetor agonists such as RANTES, SDF-1, MIP-1α, MIP-1β, etc., may also inhibit fusion.

[1017] Additional antiretroviral agents include integrase inhibitors. Integrase inhibitors include dicaffeoylquinic (DFQA) acids; L-chicoric acid (a dicaffeoyltartaric (DCTA) acid); quinalizarin (QLC) and related anthraquinones; ZINTEVIR™ (AR 177, an oligonucleotide that probably acts at cell surface rather than being a true integrase inhibitor; Arondex); and naphthols such as those disclosed in WO 98/50347.

[1018] Additional antiretroviral agents include hydroxyurea-like compunds such as BCX-34 (a purine nucleoside phosphorylase inhibitor; Biocryst); ribonucleotide reductase inhibitors such as DIDOX™ (Molecules for Health); inosine monophosphate dehydrogenase (IMPDH) inhibitors sucha as VX-497 (Vertex); and mycopholic acids such as CellCept (mycophenolate mofetil; Roche).

[1019] Additional antiretroviral agents include inhibitors of viral integrase, inhibitors of viral genome nuclear translocation such as arylene bis(methylketone) compounds; inhibitors of HIV entry such as AOP-RANTES, NNY-RANTES, RANTES-IgG fusion protein, soluble complexes of RANTES and glycosaminoglycans (GAG), and AMD-3100; nucleocapsid zinc finger inhibitors such as dithiane compounds; targets of HIV Tat and Rev; and pharmacoenhancers such as ABT-378.

[1020] Other antiretroviral therapies and adjunct therapies include cytokines and lymphokines such as MIP-1α, MIP-1β, SDF-1α, IL-2, PROLEUKIN™ (aldesleukin/L2-7001; Chiron), IL-4, IL-10, IL-12, and IL-13; interferons such as IFN-α2a; antagonists of TNFs, NFκB, GM-CSF, M-CSF, and IL-10; agents that modulate immune activation such as cyclosporin and prednisone; vaccines such as Remune™ (HIV Immunogen), APL 400-003 (Apollon), recombinant gp120 and fragments, bivalent (B/E) recombinant envelope glycoprotein, rgp120CM235, MN rgp120, SF-2 rgp120, gp120/soluble CD4 complex, Delta JR-FL protein, branched synthetic peptide derived from discontinuous gp120C3/C4 domain, fusion-competent immunogens, and Gag, Pol, Nef, and Tat vaccines; gene-based therapies such as genetic suppressor elements (GSEs; WO 98/54366), and intrakines (genetically modified CC chemokines targetted to the ER to block surface expression of newly synthesized CCR5 (Yang et al., PNAS 94:11567-72 (1997); Chen et al., Nat. Med. 3:1110-16 (1997)); antibodies such as the anti-CXCR4 antibody 12G5, the anti-CCR5 antibodies 2D7, 5C7, PA8, PA9, PA10, PA11, PA12, and PA14, the anti-CD4 antibodies Q4120 and RPA-T4, the anti-CCR3 antibody 7B11, the anti-gp120 antibodies 17b, 48d, 447-52D, 257-D, 268-D and 50.1, anti-Tat antibodies, anti-TNF-α antibodies, and monoclonal antibody 33A; aryl hydrocarbon (AH) receptor agonists and antagonists such as TCDD, 3,3′,4,4′,5-pentachlorobiphenyl, 3,3′,4,4′-tetrachlorobiphenyl, and α-naphthoflavone (WO 98/30213); and antioxidants such as γ-L-glutamyl-L-cysteine ethyl ester (γ-GCE; WO 99/56764).

[1021] In a further embodiment, the Therapeutics of the invention are administered in combination with an antiviral agent. Antiviral agents that may be administered with the Therapeutics of the invention include, but are not limited to, acyclovir, ribavirin, amantadine, and remantidine.

[1022] In other embodiments, Therapeutics of the invention may be administered in combination with anti-opportunistic infection agents. Anti-opportunistic agents that may be administered in combination with the Therapeutics of the invention, include, but are not limited to, TRIMETHOPRIM-SULFAMETHOXAZOLE™, DAPSONE™, PENTAMIDINE™, ATOVAQUONE™, ISONIAZID™, RIFAMPIN™, PYRAZINAMIDE™, ETHAMBUTOL™, RIFABUTINT™, CLARITHROMYCIN™, AZITHROMYCINT™, GANCICLOVIR™, FOSCARNET™, CIDOFOVIR™, FLUCONAZOLE™, ITRACONAZOLE™, KETOCONAZOLE™, ACYCLOVIR™, FAMCICOLVIR™, PYRIMETHAMINE™, LEUCOVORIN™, NEUPOGEN™ (filgrastim/G-CSF), and LEUKINE™ (sargramostim/GM-CSF). In a specific embodiment, Therapeutics of the invention are used in any combination with TRIMETHOPRIM-SULFAMETHOXAZOLE™, DAPSONE™, PENTAMIDINE™, and/or ATOVAQUONE™ to prophylactically treat or prevent an opportunistic Pneumocystis carinii pneumonia infection. In another specific embodiment, Therapeutics of the invention are used in any combination with ISONIAZID™, RIFAMPIN™, PYRAZINAMIDE™, and/or ETHAMBUTOL™ to prophylactically treat or prevent an opportunistic Mycobacterium avium complex infection. In another specific embodiment, Therapeutics of the invention are used in any combination with RIFABUTIN™, CLARITHROMYCIN™, and/or AZITHROMYCIN™ to prophylactically treat or prevent an opportunistic Mycobacterium tuberculosis infection. In another specific embodiment, Therapeutics of the invention are used in any combination with GANCICLOVIR™, FOSCARNET™, and/or CIDOFOVIR™ to prophylactically treat or prevent an opportunistic cytomegalovirus infection. In another specific embodiment, Therapeutics of the invention are used in any combination with FLUCONAZOLE™, ITRACONAZOLE™, and/or KETOCONAZOLE™ to prophylactically treat or prevent an opportunistic fungal infection. In another specific embodiment, Therapeutics of the invention are used in any combination with ACYCLOVIR™ and/or FAMCICOLVIR™ to prophylactically treat or prevent an opportunistic herpes simplex virus type I and/or type II infection. In another specific embodiment, Therapeutics of the invention are used in any combination with PYRIMETHAMINE™ and/or LEUCOVORIN™ to prophylactically treat or prevent an opportunistic Toxoplasma gondii infection. In another specific embodiment, Therapeutics of the invention are used in any combination with LEUCOVORIN™ and/or NEUPOGEN™ to prophylactically treat or prevent an opportunistic bacterial infection.

[1023] In a further embodiment, the Therapeutics of the invention are administered in combination with an antibiotic agent. Antibiotic agents that may be administered with the Therapeutics of the invention include, but are not limited to, amoxicillin, beta-lactamases, aminoglycosides, beta-lactam (glycopeptide), beta-lactamases, Clindamycin, chloramphenicol, cephalosporins, ciprofloxacin, erythromycin, fluoroquinolones, macrolides, metronidazole, penicillins, quinolones, rapamycin, rifampin, streptomycin, sulfonamide, tetracyclines, trimethoprim, trimethoprim-sulfamethoxazole, and vancomycin.

[1024] In other embodiments, the Therapeutics of the invention are administered in combination with immunestimulants. Immunostimulants that may be administered in combination with the Therapeutics of the invention include, but are not limited to, levamisole (e.g., ERGAMISOL™), isoprinosine (e.g. INOSIPLEX™), interferons (e.g. interferon alpha), and interleukins (e.g., IL-2).

[1025] In other embodiments, Therapeutics of the invention are administered in combination with immunosuppressive agents. Immunosuppressive agents that may be administered in combination with the Therapeutics of the invention include, but are not limited to, steroids, cyclosporine, cyclosporine analogs, cyclophosphamide methylprednisone, prednisone, azathioprine, FK-506, 15-deoxyspergualin, and other immunosuppressive agents that act by suppressing the function of responding T cells. Other immunosuppressive agents that may be administered in combination with the Therapeutics of the invention include, but are not limited to, prednisolone, methotrexate, thalidomide, methoxsalen, rapamycin, leflunomide, mizoribine (BREDININ™), brequinar, deoxyspergualin, and azaspirane (SKF 105685), ORTHOCLONE OKT® 3 (muromonab-CD3), SANDIMMUNE™, NEORAL™, SANGDYA™ (cyclosporine), PROGRAF® (FK506, tacrolimus), CELLCEPT® (mycophenolate motefil, of which the active metabolite is mycophenolic acid), IMURAN™ (azathioprine), glucocorticosteroids, adrenocortical steroids such as DELTASONE™ (prednisone) and HYDELTRASOL™ (prednisolone), FOLEX™ and MEXATE™ (methotrxate), OXSORALEN-ULTRA™ (methoxsalen) and RAPAMUNE™ (sirolimus). In a specific embodiment, immunosuppressants may be used to prevent rejection of organ or bone marrow transplantation.

[1026] In an additional embodiment, Therapeutics of the invention are administered alone or in combination with one or more intravenous immune globulin preparations. Intravenous immune globulin preparations that may be administered with the Therapeutics of the invention include, but not limited to, GAMMAR™, IVEEGAM™, SANDOGLOBULIN™, GAMMAGARD S/D™, ATGAM™ (antithymocyte glubulin), and GAMIMUNE™. In a specific embodiment, Therapeutics of the invention are administered in combination with intravenous immune globulin preparations in transplantation therapy (e.g., bone marrow transplant).

[1027] In certain embodiments, the Therapeutics of the invention are administered alone or in combination with an anti-inflammatory agent. Anti-inflammatory agents that may be administered with the Therapeutics of the invention include, but are not limited to, corticosteroids (e.g. betamethasone, budesonide, cortisone, dexamethasone, hydrocortisone, methylprednisolone, prednisolone, prednisone, and triamcinolone), nonsteroidal anti-inflammatory drugs (e.g., diclofenac, diflunisal, etodolac, fenoprofen, floctafenine, flurbiprofen, ibuprofen, indomethacin, ketoprofen, meclofenamate, mefenamic acid, meloxicam, nabumetone, naproxen, oxaprozin, phenylbutazone, piroxicam, sulindac, tenoxicam, tiaprofenic acid, and tolmetin.), as well as antihistamines, aminoarylcarboxylic acid derivatives, arylacetic acid derivatives, arylbutyric acid derivatives, arylcarboxylic acids, arylpropionic acid derivatives, pyrazoles, pyrazolones, salicylic acid derivatives, thiazinecarboxamides, e-acetamidocaproic acid, S-adenosylmethionine, 3-amino-4-hydroxybutyric acid, amixetrine, bendazac, benzydamine, bucolome, difenpiramide, ditazol, emorfazone, guaiazulene, nabumetone, nimesulide, orgotein, oxaceprol, paranyline, perisoxal, pifoxime, proquazone, proxazole, and tenidap.

[1028] In an additional embodiment, the compositions of the invention are administered alone or in combination with an anti-angiogenic agent. Anti-angiogenic agents that may be administered with the compositions of the invention include, but are not limited to, Angiostatin (Entremed, Rockville, Md.), Troponin-1 (Boston Life Sciences, Boston, Mass.), anti-Invasive Factor, retinoic acid and derivatives thereof, paclitaxel (Taxol), Suramin, Tissue Inhibitor of Metalloproteinase-1, Tissue Inhibitor of Metalloproteinase-2, VEGI, Plasminogen Activator Inhibitor-1, Plasminogen Activator Inhibitor-2, and various forms of the lighter “d group” transition metals.

[1029] Lighter “d group” transition metals include, for example, vanadium, molybdenum, tungsten, titanium, niobium, and tantalum species. Such transition metal species may form transition metal complexes. Suitable complexes of the above-mentioned transition metal species include oxo transition metal complexes.

[1030] Representative examples of vanadium complexes include oxo vanadium complexes such as vanadate and vanadyl complexes. Suitable vanadate complexes include metavanadate and orthovanadate complexes such as, for example, ammonium metavanadate, sodium metavanadate, and sodium orthovanadate. Suitable vanadyl complexes include, for example, vanadyl acetylacetonate and vanadyl sulfate including vanadyl sulfate hydrates such as vanadyl sulfate mono- and trihydrates.

[1031] Representative examples of tungsten and molybdenum complexes also include oxo complexes. Suitable oxo tungsten complexes include tungstate and tungsten oxide complexes. Suitable tungstate complexes include ammonium tungstate, calcium tungstate, sodium tungstate dihydrate, and tungstic acid. Suitable tungsten oxides include tungsten (IV) oxide and tungsten (VI) oxide. Suitable oxo molybdenum complexes include molybdate, molybdenum oxide, and molybdenyl complexes. Suitable molybdate complexes include ammonium molybdate and its hydrates, sodium molybdate and its hydrates, and potassium molybdate and its hydrates. Suitable molybdenum oxides include molybdenum (VI) oxide, molybdenum (VI) oxide, and molybdic acid. Suitable molybdenyl complexes include, for example, molybdenyl acetylacetonate. Other suitable tungsten and molybdenum complexes include hydroxo derivatives derived from, for example, glycerol, tartaric acid, and sugars.

[1032] A wide variety of other anti-angiogenic factors may also be utilized within the context of the present invention. Representative examples include, but are not limited to, platelet factor 4; protamine sulphate; sulphated chitin derivatives (prepared from queen crab shells), (Murata et al., Cancer Res. 51:22-26, (1991)); Sulphated Polysaccharide Peptidoglycan Complex (SP-PG) (the function of this compound may be enhanced by the presence of steroids such as estrogen, and tamoxifen citrate); Staurosporine; modulators of matrix metabolism, including for example, proline analogs, cishydroxyproline, d,L-3,4-dehydroproline, Thiaproline, alpha,alpha-dipyridyl, aminopropionitrile fumarate; 4-propyl-5-(4-pyridinyl)-2(3H)-oxazolone; Methotrexate; Mitoxantrone; Heparin; Interferons; 2 Macroglobulin-serum; ChIMP-3 (Pavloff et al., J. Bio. Chem. 267:17321-17326, (1992)); Chymostatin (Tomkinson et al., Biochem J. 286:475-480, (1992)); Cyclodextrin Tetradecasulfate; Eponemycin; Camptothecin; Fumagillin (Ingber et al., Nature 348:555-557, (1990)); Gold Sodium Thiomalate (“GST”; Matsubara and Ziff, J. Clin. Invest. 79:1440-1446, (1987)); anticollagenase-serum; alpha2-antiplasmin (Holmes et al., J. Biol. Chem. 262(4):1659-1664, (1987)); Bisantrene (National Cancer Institute); Lobenzarit disodium (N-(2)-carboxyphenyl-4-chloroanthronilic acid disodium or “CCA”; (Takeuchi et al., Agents Actions 36:312-316, (1992)); and metalloproteinase inhibitors such as BB94.

[1033] Additional anti-angiogenic factors that may also be utilized within the context of the present invention include Thalidomide, (Celgene, Warren, N.J.); Angiostatic steroid; AGM-1470 (H. Brem and J. Folkman J Pediatr. Surg. 28:445-51 (1993)); an integrin alpha v beta 3 antagonist (C. Storgard et al., J. Clin. Invest. 103:47-54 (1999)); carboxynaminolmidazole; Carboxyamidotriazole (CAI) (National Cancer Institute, Bethesda, Md.); Conbretastatin A-4 (CA4P) (OXiGENE, Boston, Mass.); Squalamine (Magainin Pharmaceuticals, Plymouth Meeting, Pa.); TNP-470, (Tap Pharmaceuticals, Deerfield, Ill.); ZD-0101 AstraZeneca (London, UK); APRA (CT2584); Benefin, Byrostatin-1 (SC339555); CGP-41251 (PKC 412); CM101; Dexrazoxane (ICRF187); DMXAA; Endostatin; Flavopridiol; Genestein; GTE; ImmTher; Iressa (ZD1839); Octreotide (Somatostatin); Panretin; Penacillamine; Photopoint; PI-88; Prinomastat (AG-3340) Purlytin; Suradista (FCE26644); Tamoxifen (Nolvadex); Tazarotene; Tetrathiomolybdate; Xeloda (Capecitabine); and 5-Fluorouracil.

[1034] Anti-angiogenic agents that may be administed in combination with the compounds of the invention may work through a variety of mechanisms including, but not limited to, inhibiting proteolysis of the extracellular matrix, blocking the function of endothelial cell-extracellular matrix adhesion molecules, by antagonizing the function of angiogenesis inducers such as growth factors, and inhibiting integrin receptors expressed on proliferating endothelial cells. Examples of anti-angiogenic inhibitors that interfere with extracellular matrix proteolysis and which may be administered in combination with the compositons of the invention include, but are not Imited to, AG-3340 (Agouron, La Jolla, Calif.), BAY-12-9566 (Bayer, West Haven, Conn.), BMS-275291 (Bristol Myers Squibb, Princeton, N.J.), CGS-27032A (Novartis, East Hanover, N.J.), Marimastat (British Biotech, Oxford, UK), and Metastat (Aeterna, St-Foy, Quebec). Examples of anti-angiogenic inhibitors that act by blocking the function of endothelial cell-extracellular matrix adhesion molecules and which may be administered in combination with the compositons of the invention include, but are not Imited to, EMD-121974 (Merck KcgaA Dammstadt, Germany) and Vitaxin (Ixsys, La Jolla, Calif./Medimmune, Gaithersburg, Md.). Examples of anti-angiogenic agents that act by directly antagonizing or inhibiting angiogenesis inducers and which may be administered in combination with the compositons of the invention include, but are not lmited to, Angiozyme (Ribozyme, Boulder, Colo.), Anti-VEGF antibody (Genentech, S. San Francisco, Calif.), PTK-787/ZK-225846 (Novartis, Basel, Switzerland), SU-101 (Sugen, S. San Francisco, Calif.), SU-5416 (Sugen/Pharmacia Upjohn, Bridgewater, N.J.), and SU-6668 (Sugen). Other anti-angiogenic agents act to indirectly inhibit angiogenesis. Examples of indirect inhibitors of angiogenesis which may be administered in combination with the compositons of the invention include, but are not limited to, IM-862 (Cytran, Kirkland, Wash.), Interferon-alpha, IL-12 (Roche, Nutley, N.J.), and Pentosan polysulfate (Georgetown University, Washington, D.C.).

[1035] In particular embodiments, the use of compositions of the invention in combination with anti-angiogenic agents is contemplated for the treatment, prevention, and/or amelioration of an autoimmune disease, such as for example, an autoimmune disease described herein.

[1036] In a particular embodiment, the use of compositions of the invention in combination with anti-angiogenic agents is contemplated for the treatment, prevention, and/or amelioration of arthritis. In a more particular embodiment, the use of compositions of the invention in combination with anti-angiogenic agents is contemplated for the treatment, prevention, and/or amelioration of rheumatoid arthritis.

[1037] In another embodiment, the polynucleotides encoding a polypeptide of the present invention are administered in combination with an angiogenic protein, or polynucleotides encoding an angiogenic protein. Examples of angiogenic proteins that may be administered with the compositions of the invention include, but are not limited to, acidic and basic fibroblast growth factors, VEGF-1, VEGF-2, VEGF-3, epidermal growth factor alpha and beta, platelet-derived endothelial cell growth factor, platelet-derived growth factor, tumor necrosis factor alpha, hepatocyte growth factor, insulin-like growth factor, colony stimulating factor, macrophage colony stimulating factor, granulocyte/macrophage colony stimulating factor, and nitric oxide synthase.

[1038] In additional embodiments, compositions of the invention are administered in combination with a chemotherapeutic agent. Chemotherapeutic agents that may be administered with the Therapeutics of the invention include, but are not limited to alkylating agents such as nitrogen mustards (for example, Mechlorethamine, cyclophosphamide, Cyclophosphamide Ifosfamide, Melphalan (L-sarcolysin), and Chlorambucil), ethylenimines and methylmelamines (for example, Hexamethylmelamine and Thiotepa), alkyl sulfonates (for example, Busulfan), nitrosoureas (for example, Carmustine (BCNU), Lomustine (CCNU), Semustine (methyl-CCNU), and Streptozocin (streptozotocin)), triazenes (for example, Dacarbazine (DTIC; dimethyltriazenoimidazolecarboxamide)), folic acid analogs (for example, Methotrexate (amethopterin)), pyrimidine analogs (for example, Fluorouacil (5-fluorouracil; 5-FU), Floxuridine (fluorodeoxyuridine; FudR), and Cytarabine (cytosine arabinoside)), purine analogs and related inhibitors (for example, Mercaptopurine (6-mercaptopurine; 6-MP), Thioguanine (6-thioguanine; TG), and Pentostatin (2′-deoxycoformycin)), vinca alkaloids (for example, Vinblastine (VLB, vinblastine sulfate)) and Vincristine (vincristine sulfate)), epipodophyllotoxins (for example, Etoposide and Teniposide), antibiotics (for example, Dactinomycin (actinomycin D), Daunorubicin (daunomycin; rubidomycin), Doxorubicin, Bleomycin, Plicamycin (mithramycin), and Mitomycin (mitomycin C), enzymes (for example, L-Asparaginase), biological response modifiers (for example, Interferon-alpha and interferon-alpha-2b), platinum coordination compounds (for example, Cisplatin (cis-DDP) and Carboplatin), anthracenedione (Mitoxantrone), substituted ureas (for example, Hydroxyurea), methylhydrazine derivatives (for example, Procarbazine (N-methylhydrazine; MIH), adrenocorticosteroids (for example, Prednisone), progestins (for example, Hydroxyprogesterone caproate, Medroxyprogesterone, Medroxyprogesterone acetate, and Megestrol acetate), estrogens (for example, Diethylstilbestrol (DES), Diethylstilbestrol diphosphate, Estradiol, and Ethinyl estradiol), antiestrogens (for example, Tamoxifen), androgens (Testosterone proprionate, and Fluoxymesterone), antiandrogens (for example, Flutamide), gonadotropin-releasing horomone analogs (for example, Leuprolide), other hormones and hormone analogs (for example, methyltestosterone, estramustine, estramustine phosphate sodium, chlorotrianisene, and testolactone), and others (for example, dicarbazine, glutamic acid, and mitotane).

[1039] In one embodiment, the compositions of the invention are administered in combination with one or more of the following drugs: infliximab (also known as Remicade™ Centocor, Inc.), Trocade (Roche, RO-32-3555), Leflunomide (also known as Arava™ from Hoechst Marion Roussel), Kineret™ (an IL-1 Receptor antagonist also known as Anakinra from Amgen, Inc.)

[1040] In a specific embodiment, compositions of the invention are administered in combination with CHOP (cyclophosphamide, doxorubicin, vincristine, and prednisone) or combination of one or more of the components of CHOP. In one embodiment, the compositions of the invention are administered in combination with anti-CD20 antibodies, human monoclonal anti-CD20 antibodies. In another embodiment, the compositions of the invention are administered in combination with anti-CD20 antibodies and CHOP, or anti-CD20 antibodies and any combination of one or more of the components of CHOP, particularly cyclophosphamide and/or prednisone. In a specific embodiment, compositions of the invention are administered in combination with Rituximab. In a further embodiment, compositions of the invention are administered with Rituximab and CHOP, or Rituximab and any combination of one or more of the components of CHOP, particularly cyclophosphamide and/or prednisone. In a specific embodiment, compositions of the invention are administered in combination with tositumomab. In a further embodiment, compositions of the invention are administered with tositumomab and CHOP, or tositumomab and any combination of one or more of the components of CHOP, particularly cyclophosphamide and/or prednisone. The anti-CD20 antibodies may optionally be associated with radioisotopes, toxins or cytotoxic prodrugs.

[1041] In another specific embodiment, the compositions of the invention are administered in combination Zevalin™. In a further embodiment, compositions of the invention are administered with Zevalin™ and CHOP, or Zevalin™ and any combination of one or more of the components of CHOP, particularly cyclophosphamide and/or prednisone. Zevalin™ may be associated with one or more radisotopes. Particularly preferred isotopes are ⁹⁰Y and ¹¹¹In.

[1042] In an additional embodiment, the Therapeutics of the invention are administered in combination with cytokines. Cytokines that may be administered with the Therapeutics of the invention include, but are not limited to, IL2, IL3, IL4, IL5, IL6, IL7, IL10, IL12, IL13, IL15, anti-CD40, CD40L, IFN-gamma and TNF-alpha. In another embodiment, Therapeutics of the invention may be administered with any interleukin, including, but not limited to, IL-1alpha, IL-1beta, IL-2, IL-3, IL-4, IL-5, IL-6, IL-7, IL-8, IL-9, IL-10, IL-11, IL-12, IL-13, IL-14, IL-15, IL-16, IL-17, IL-18, IL-19, IL-20, and IL-21.

[1043] In one embodiment, the Therapeutics of the invention are administered in combination with members of the TNF family. TNF, TNF-related or TNF-like molecules that may be administered with the Therapeutics of the invention include, but are not limited to, soluble forms of TNF-alpha, lymphotoxin-alpha (LT-alpha, also known as TNF-beta), LT-beta (found in complex heterotrimer LT-alpha2-beta), OPGL, FasL, CD27L, CD30L, CD40L, 4-1BBL, DcR3, OX40L, TNF-gamma (International Publication No. WO 96/14328), AIM-I (International Publication No. WO 97/33899), endokine-alpha (International Publication No. WO 98/07880), OPG, and neutrokine-alpha (International Publication No. WO 98/18921, OX40, and nerve growth factor (NGF), and soluble forms of Fas, CD30, CD27, CD40 and 4-IBB, TR2 (International Publication No. WO 96/34095), DR3 (International Publication No. WO 97/33904), DR4 (International Publication No. WO 98/32856), TR5 (International Publication No. WO 98/30693), TRANK, TR9 (International Publication No. WO 98/56892), TR10 (International Publication No. WO 98/54202), 312C2 (International Publication No. WO 98/06842), and TR12, and soluble forms CD154, CD70, and CD153.

[1044] In an additional embodiment, the Therapeutics of the invention are administered in combination with angiogenic proteins. Angiogenic proteins that may be administered with the Therapeutics of the invention include, but are not limited to, Glioma Derived Growth Factor (GDGF), as disclosed in European Patent Number EP-399816; Platelet Derived Growth Factor-A (PDGF-A), as disclosed in European Patent Number EP-682110; Platelet Derived Growth Factor-B (PDGF-B), as disclosed in European Patent Number EP-282317; Placental Growth Factor (PIGF), as disclosed in International Publication Number WO 92/06194; Placental Growth Factor-2 (PIGF-2), as disclosed in Hauser et al., Growth Factors, 4:259-268 (1993); Vascular Endothelial Growth Factor (VEGF), as disclosed in International Publication Number WO 90/13649; Vascular Endothelial Growth Factor-A (VEGF-A), as disclosed in European Patent Number EP-506477; Vascular Endothelial Growth Factor-2 (VEGF-2), as disclosed in International Publication Number WO 96/39515; Vascular Endothelial Growth Factor B (VEGF-3); Vascular Endothelial Growth Factor B-186 (VEGF-B186), as disclosed in International Publication Number WO 96/26736; Vascular Endothelial Growth Factor-D (VEGF-D), as disclosed in International Publication Number WO 98/02543; Vascular Endothelial Growth Factor-D (VEGF-D), as disclosed in International Publication Number WO 98/07832; and Vascular Endothelial Growth Factor-E (VEGF-E), as disclosed in German Patent Number DE19639601. The above mentioned references are herein incorporated by reference in their entireties.

[1045] In an additional embodiment, the Therapeutics of the invention are administered in combination with Fibroblast Growth Factors. Fibroblast Growth Factors that may be administered with the Therapeutics of the invention include, but are not limited to, FGF-1, FGF-2, FGF-3, FGF-4, FGF-5, FGF-6, FGF-7, FGF-8, FGF-9, FGF-10, FGF-11, FGF-12, FGF-13, FGF-14, and FGF-15.

[1046] In an additional embodiment, the Therapeutics of the invention are administered in combination with hematopoietic growth factors. Hematopoietic growth factors that may be administered with the Therapeutics of the invention include, but are not limited to, granulocyte macrophage colony stimulating factor (GM-CSF) (sargramostim, LEUKINE™, PROKINE™), granulocyte colony stimulating factor (G-CSF) (filgrastim, NEUPOGEN™), macrophage colony stimulating factor (M-CSF, CSF-1) erythropoietin (epoetin alfa, EPOGEN™, PROCRI™), stem cell factor (SCF, c-kit ligand, steel factor), megakaryocyte colony stimulating factor, PIXY321 (a GMCSF/IL-3 fusion protein), interleukins, especially any one or more of IL-1 through IL-12, interferon-gamma, or thrombopoietin.

[1047] In certain embodiments, Therapeutics of the present invention are administered in combination with adrenergic blockers, such as, for example, acebutolol, atenolol, betaxolol, bisoprolol, carteolol, labetalol, metoprolol, nadolol, oxprenolol, penbutolol, pindolol, propranolol, sotalol, and timolol.

[1048] In another embodiment, the Therapeutics of the invention are administered in combination with an antiarrhythmic drug (e.g., adenosine, amidoarone, bretylium, digitalis, digoxin, digitoxin, diliazem, disopyramide, esmolol, flecainide, lidocaine, mexiletine, moricizine, phenyloin, procainamide, N-acetyl procainamide, propafenone, propranolol, quinidine, sotalol, tocainide, and verapamil).

[1049] In another embodiment, the Therapeutics of the invention are administered in combination with diuretic agents, such as carbonic anhydrase-inhibiting agents (e.g., acetazolamide, dichlorphenamide, and methazolamide), osmotic diuretics (e.g., glycerin, isosorbide, mannitol, and urea), diuretics that inhibit Na⁺—K⁺—2Cl⁻ symport (e.g., furosemide, bumetanide, azosemide, piretanide, tripamide, ethacrynic acid, muzolimine, and torsemide), thiazide and thiazide-like diuretics (e.g., bendroflumethiazide, benzthiazide, chlorothiazide, hydrochlorothiazide, hydroflumethiazide, methyclothiazide, polythiazide, trichormethiazide, chlorthalidone, indapamide, metolazone, and quinethazone), potassium sparing diuretics (e.g., amiloride and triamterene), and mineralcorticoid receptor antagonists (e.g., spironolactone, canrenone, and potassium canrenoate).

[1050] In one embodiment, the Therapeutics of the invention are administered in combination with treatments for endocrine and/or hormone imbalance disorders. Treatments for endocrine and/or hormone imbalance disorders include, but are not limited to, ¹²⁷I, radioactive isotopes of iodine such as ¹³¹I and ¹²³I; recombinant growth hormone, such as HUMATROPE™ (recombinant somatropin); growth hormone analogs such as PROTROPIN™ (somatrem); dopamine agonists such as PARLODEL™ (bromocriptine); somatostatin analogs such as SANDOSTATIN™ (octreotide); gonadotropin preparations such as PREGNYL™, A.P.L.™ and PROFASI™ (chorionic gonadotropin (CG)), PERGONAL™ (menotropins), and METRODIN™ (urofollitropin (uFSH)); synthetic human gonadotropin releasing hormone preparations such as FACTREL™ and LUTREPULSE™ (gonadorelin hydrochloride); synthetic gonadotropin agonists such as LUPRON™ (leuprolide acetate), SUPPRELIN™ (histrelin acetate), SYNAREL™ (nafarelin acetate), and ZOLADEX™ (goserelin acetate); synthetic preparations of thyrotropin-releasing hormone such as RELEFACT TRH™ and THYPINONE™ (protirelin); recombinant human TSH such as THYROGEN™; synthetic preparations of the sodium salts of the natural isomers of thyroid hormones such as L-T₄™, SYNTHROID™ and LEVOTHROID™ (levothyroxine sodium), L-T₃™, CYTOMEL™ and TRIOSTAT™ (liothyroine sodium), and THYROLAR™ (liotrix); antithyroid compounds such as 6-n-propylthiouracil (propylthiouracil), 1-methyl-2-mercaptoimidazole and TAPAZOLE™ (methimazole), NEO-MERCAZOLE™ (carbimazole); beta-adrenergic receptor antagonists such as propranolol and esmolol; Ca²⁺ channel blockers; dexamethasone and iodinated radiological contrast agents such as TELEPAQUE™ (iopanoic acid) and ORAGRAFIN™ (sodium ipodate).

[1051] Additional treatments for endocrine and/or hormone imbalance disorders include, but are not limited to, estrogens or congugated estrogens such as ESTRACE™ (estradiol), ESTINYL™ (ethinyl estradiol), PREMARIN™, ESTRATAB™, ORTHO-EST™, OGEN™ and estropipate (estrone), ESTROVIS™ (quinestrol), ESTRADERM™ (estradiol), DELESTROGEN™ and VALERGEN™ (estradiol valerate), DEPO-ESTRADIOL CYPIONATE™ and ESTROJECT LA™ (estradiol cypionate); antiestrogens such as NOLVADEX™ (tamoxifen), SEROPHENE™ and CLOMID™ (clomiphene); progestins such as DURALUTIN™ (hydroxyprogesterone caproate), MPA™ and DEPO-PROVERA™ (medroxyprogesterone acetate), PROVERA™ and CYCRIN™(MPA), MEGACE™ (megestrol acetate), NORLUTIN™ (norethindrone), and NORLUTATE™ and AYGESTIN™ (norethindrone acetate); progesterone implants such as NORPLANT SYSTEM™ (subdermal implants of norgestrel); antiprogestins such as RU 486™ (mifepristone); hormonal contraceptives such as ENOVID™ (norethynodrel plus mestranol), PROGESTASERT™ (intrauterine device that releases progesterone), LOESTRIN™, BREVICON™, MODICON™, GENORA™, NELONA™, NORINYL™, OVACON-35™ and OVACON-50™ (ethinyl estradiol/norethindrone), LEVLEN™, NORDETTE™, TRI-LEVLEN™ and TRIPHASIL-21™ (ethinyl estradiol/levonorgestrel) LO/OVRAL™ and OVRAL™ (ethinyl estradiol/norgestrel), DEMULEN™ (ethinyl estradiol/ethynodiol diacetate), NORINYL™, ORTHO-NOVUM™, NORETHIN™, GENORA™, and NELOVA™ (norethindrone/mestranol), DESOGEN™ and ORTHO-CEPT™ (ethinyl estradiol/desogestrel), ORTHO-CYCLEN™ and ORTHO-TRICYCLEN™ (ethinyl estradiol/norgestimate), MICRONOR™ and NOR-QD™ (norethindrone), and OVRETTE™ (norgestrel).

[1052] Additional treatments for endocrine and/or hormone imbalance disorders include, but are not limited to, testosterone esters such as methenolone acetate and testosterone undecanoate; parenteral and oral androgens such as TESTOJECT-50™ (testosterone), TESTEX™ (testosterone propionate), DELATESTRYL™ (testosterone enanthate), DEPO-TESTOSTERONE™ (testosterone cypionate), DANOCRINE™ (danazol), HALOTESTIN™ (fluoxymesterone), ORETON METHYL™, TESTRED™ and VIRLON™ (methyltestosterone), and OXANDRIN™ (oxandrolone); testosterone transdermal systems such as TESTODERM™; androgen receptor antagonist and 5-alpha-reductase inhibitors such as ANDROCUR™ (cyproterone acetate), EULEXIN™ (flutamide), and PROSCAR™ (finasteride); adrenocorticotropic hormone preparations such as CORTROSYN™ (cosyntropin); adrenocortical steroids and their synthetic analogs such as ACLOVATE™ (alclometasone dipropionate), CYCLOCORT™ (amcinonide), BECLOVENT™ and VANCERIL™ (beclomethasone dipropionate), CELESTONE™ (betamethasone), BENISONE™ and UTICORT™ (betamethasone benzoate), DIPROSONE™ (betamethasone dipropionate), CELESTONE PHOSPHATE™ (betamethasone sodium phosphate), CELESTONE SOLUSPAN™ (betamethasone sodium phosphate and acetate), BETA-VAL™ and VALISONE™ (betamethasone valerate), TEMOVATE™ (clobetasol propionate), CLODERM™ (clocortolone pivalate), CORTEF™ and HYDROCORTONE™ (cortisol (hydrocortisone)), HYDROCORTONE ACETATE™ (cortisol (hydrocortisone) acetate), LOCOID™ (cortisol (hydrocortisone) butyrate), HYDROCORTONE PHOSPHATE™ (cortisol (hydrocortisone) sodium phosphate), A-HYDROCORT™ and SOLU CORTEF™ (cortisol (hydrocortisone) sodium succinate), WESTCORT™ (cortisol (hydrocortisone) valerate), CORTISONE ACETATE™ (cortisone acetate), DESOWEN™ and TRIDESILON™ (desonide), TOPICORT™ (desoximetasone), DECADRON™ (dexamethasone), DECADRON LA™ (dexamethasone acetate), DECADRON PHOSPHATE™ and HEXADROL PHOSPHATE™ (dexamethasone sodium phosphate), FLORONE™ and MAXIFLOR™ (diflorasone diacetate), FLORINEF ACETATE™ (fludrocortisone acetate), AEROBID™ and NASALIDE™ (flunisolide), FLUONID™ and SYNALAR™ (fluocinolone acetonide), LIDEX™ (fluocinonide), FLUOR-OP™ and FML™ (fluorometholone), CORDRAN™ (flurandrenolide), HALOG™ (halcinonide), HMS LIZUIFILM™ (medrysone), MEDROL™ (methylprednisolone), DEPO-MEDROL™ and MEDROL ACETATE™ (methylprednisone acetate), A-METHAPRED™ and SOLUMEDROL™ (methylprednisolone sodium succinate), ELOCON™ (mometasone furoate), HALDRONE™ (paramethasone acetate), DELTA-CORTEF™ (prednisolone), ECONOPRED™ (prednisolone acetate), HYDELTRASOL™ (prednisolone sodium phosphate), HYDELTRA-T.B.A™ (prednisolone tebutate), DELTASONE™ (prednisone), ARISTOCORT™ and KENACORT™ (triamcinolone), KENALOG™ (triamcinolone acetonide), ARISTOCORT™ and KENACORT DIACETATE™ (triamcinolone diacetate), and ARISTOSPAN™ (triamcinolone hexacetonide); inhibitors of biosynthesis and action of adrenocortical steroids such as CYTADREN™ (aminoglutethimide), NIZORAL™ (ketoconazole), MODRASTANE™ (trilostane), and METOPIRONE™ (metyrapone); bovine, porcine or human insulin or mixtures thereof; insulin analogs; recombinant human insulin such as HUMULIN™ and NOVOLIN™; oral hypoglycemic agents such as ORAMIDE™ and ORINASE™ (tolbutamide), DIABINESE™ (chlorpropamide), TOLAMIDE™ and TOLINASE™ (tolazamide), DYMELOR™ (acetohexamide), glibenclamide, MICRONASE™, DIBETA™ and GLYNASE™ (glyburide), GLUCOTROL™ (glipizide), and DIAMICRON™ (gliclazide), GLUCOPHAGE™ (metformin), ciglitazone, pioglitazone, and alpha-glucosidase inhibitors; bovine or porcine glucagon; somatostatins such as SANDOSTATIN™ (octreotide); and diazoxides such as PROGLYCEM™ (diazoxide).

[1053] In one embodiment, the Therapeutics of the invention are administered in combination with treatments for uterine motility disorders. Treatments for uterine motility disorders include, but are not limited to, estrogen drugs such as conjugated estrogens (e.g., PREMARIN® and ESTRATAB®), estradiols (e.g., CLIMARA® and ALORA®), estropipate, and chlorotrianisene; progestin drugs (e.g., AMEN® (medroxyprogesterone), MICRONOR® (norethidrone acetate), PROMETRIUM® progesterone, and megestrol acetate); and estrogen/progesterone combination therapies such as, for example, conjugated estrogens/medroxyprogesterone (e.g., PREMPRO™ and PREMPHASE®) and norethindrone acetate/ethinyl estsradiol (e.g., FEMHRT™).

[1054] In an additional embodiment, the Therapeutics of the invention are administered in combination with drugs effective in treating iron deficiency and hypochromic anemias, including but not limited to, ferrous sulfate (iron sulfate, FEOSOL™), ferrous fumarate (e.g., FEOSTAT™), ferrous gluconate (e.g., FERGON™), polysaccharide-iron complex (e.g., NIFEREX™), iron dextran injection (e.g., INFED™), cupric sulfate, pyroxidine, riboflavin, Vitamin B₁₂, cyancobalamin injection (e.g., REDISOL™, RUBRAMIN PC™), hydroxocobalamin, folic acid (e.g., FOLVITE™), leucovorin (folinic acid, 5-CHOH4PteGlu, citrovorum factor) or WELLCOVORIN (Calcium salt of leucovorin), transferrin or ferritin.

[1055] In other embodiments, the Therapeutics of the invention are administered in combination with agents used to treat neurological disorders. Neurological agents that may be administered with the Therapeutics of the invention include, but are not limited to, antiepileptic agents (e.g., carbamazepine, clonazepam, ethosuximide, phenobarbital, phenyloin, primidone, valproic acid, divalproex sodium, felbamate, gabapentin, lamotrigine, levetiracetam, oxcarbazepine, tiagabine, topiramate, zonisamide, diazepam, lorazepam, and clonazepam), antiparkinsonian agents (e.g., levodopa/carbidopa, selegiline, amantidine, bromocriptine, pergolide, ropinirole, pramipexole, benztropine; biperiden; ethopropazine; procyclidine; trihexyphenidyl, tolcapone), and ALS therapeutics (e.g. riluzole).

[1056] In another embodiment, Therapeutics of the invention are administered in combination with vasodilating agents and/or calcium channel blocking agents. Vasodilating agents that may be administered with the Therapeutics of the invention include, but are not limited to, Angiotensin Converting Enzyme (ACE) inhibitors (e.g., papaverine, isoxsuprine, benazepril, captopril, cilazapril, enalapril, enalaprilat, fosinopril, lisinopril, moexipril, perindopril, quinapril, ramipril, spirapril, trandolapril, and nylidrin), and nitrates (e.g., isosorbide dinitrate, isosorbide mononitrate, and nitroglycerin). Examples of calcium channel blocking agents that may be administered in combination with the Therapeutics of the invention include, but are not limited to amlodipine, bepridil, diltiazem, felodipine, flunarizine, isradipine, nicardipine, nifedipine, nimodipine, and verapamil.

[1057] In certain embodiments, the Therapeutics of the invention are administered in combination with treatments for gastrointestinal disorders. Treatments for gastrointestinal disorders that may be administered with the Therapeutic of the invention include, but are not limited to, H₂ histamine receptor antagonists (e.g., TAGAMET™ (cimetidine), ZANTAC™ (ranitidine), PEPCID™ (famotidine), and AXID™ (nizatidine)); inhibitors of H⁺, K⁺ATPase (e.g., PREVACID™ (lansoprazole) and PRILOSEC™ (omeprazole)); Bismuth compounds (e.g., PEPTO-BISMOL™ (bismuth subsalicylate) and DE-NOL™ (bismuth subcitrate)); various antacids; sucralfate; prostaglandin analogs (e.g. CYTOTEC™ (misoprostol)); muscarinic cholinergic antagonists; laxatives (e.g., surfactant laxatives, stimulant laxatives, saline and osmotic laxatives); antidiarrheal agents (e.g., LOMOTIL™ (diphenoxylate), MOTOFEN™ (diphenoxin), and IMODIUM™ (loperamide hydrochloride)), synthetic analogs of somatostatin such as SANDOSTATIN™ (octreotide), antiemetic agents (e.g., ZOFRAN™ (ondansetron), KYTRIL™ (granisetron hydrochloride), tropisetron, dolasetron, metoclopramide, chlorpromazine, perphenazine, prochlorperazine, promethazine, thiethylperazine, triflupromazine, domperidone, haloperidol, droperidol, trimethobenzamide, dexamethasone, methylprednisolone, dronabinol, and nabilone); D2 antagonists (e.g., metoclopramide, trimethobenzamide and chlorpromazine); bile salts; chenodeoxycholic acid; ursodeoxycholic acid; and pancreatic enzyme preparations such as pancreatin and pancrelipase.

[1058] In additional embodiments, the Therapeutics of the invention are administered in combination with other therapeutic or prophylactic regimens, such as, for example, radiation therapy.

### Example 14

### Method of Treating Decreased Levels of the Polypeptide

[1059] The present invention relates to a method for treating an individual in need of an increased level of a polypeptide of the invention in the body comprising administering to such an individual a composition comprising a therapeutically effective amount of polypeptides (including agonists thereto), and/or antibodies of the invention. Moreover, it will be appreciated that conditions caused by a decrease in the standard or normal expression level of a polypeptide of the present invention in an individual may be treated by administering agonists of said polypeptide. Thus, the invention also provides a method of treatment of an individual in need of an increased level of the polypeptide comprising administering to such an individual a Therapeutic comprising an amount of the agonist (including polypeptides and antibodies of the present invention) to increase the activity level of the polypeptide in such an individual.

[1060] For example, a patient with decreased levels of a polypeptide receives a daily dose 0.1-100 ug/kg of the agonist for six consecutive days. The exact details of the dosing scheme, based on administration and formulation, are provided in Example 13.

### Example 15

### Method of Treating Increased Levels of the Polypeptide

[1061] The present invention also relates to a method of treating an individual in need of a decreased level of a polypeptide of the invention in the body comprising administering to such an individual a composition comprising a therapeutically effective amount of an antagonist of the invention (including polypeptides and antibodies of the invention).

[1062] In one example, antisense technology is used to inhibit production of a polypeptide of the present invention. This technology is one example of a method of decreasing levels of a polypeptide, due to a variety of etiologies, such as cancer.

[1063] For example, a patient diagnosed with abnormally increased levels of a polypeptide is administered intravenously antisense polynucleotides at 0.5, 1.0, 1.5, 2.0 and 3.0 mg/kg day for 21 days. This treatment is repeated after a 7-day rest period if the treatment was well tolerated. The antisense polynucleotides of the present invention can be formulated using techniques and formulations described herein (e.g. see Example 13), or otherwise known in the art.

### Example 16

### Method of Treatment Using Gene Therapy-Ex Vivo

[1064] One method of gene therapy transplants fibroblasts, which are capable of expressing a polypeptide, onto a patient. Generally, fibroblasts are obtained from a subject by skin biopsy. The resulting tissue is placed in tissue-culture medium and separated into small pieces. Small chunks of the tissue are placed on a wet surface of a tissue culture flask, approximately ten pieces are placed in each flask. The flask is turned upside down, closed tight and left at room temperature over night. After 24 hours at room temperature, the flask is inverted and the chunks of tissue remain fixed to the bottom of the flask and fresh media (e.g., Ham's F12 media, with 10% FBS, penicillin and streptomycin) is added. The flasks are then incubated at 37 degree C. for approximately one week.

[1065] At this time, fresh media is added and subsequently changed every several days. After an additional two weeks in culture, a monolayer of fibroblasts emerge. The monolayer is trypsinized and scaled into larger flasks.

[1066] pMV-7 (Kirschmeier, P. T. et al., DNA, 7:219-25 (1988)), flanked by the long terminal repeats of the Moloney murine sarcoma virus, is digested with EcoRI and HindIII and subsequently treated with calf intestinal phosphatase. The linear vector is fractionated on agarose gel and purified, using glass beads.

[1067] The cDNA encoding a polypeptide of the present invention can be amplified using PCR primers which correspond to the 5′ and 3′ end sequences respectively as set forth in Example 1 using primers and having appropriate restriction sites and initiation/stop codons, if necessary. Preferably, the 5′ primer contains an EcoRI site and the 3′ primer includes a HindIII site. Equal quantities of the Moloney murine sarcoma virus linear backbone and the amplified EcoRI and HindIII fragment are added together, in the presence of T4 DNA ligase. The resulting mixture is maintained under conditions appropriate for ligation of the two fragments. The ligation mixture is then used to transform bacteria HB101, which are then plated onto agar containing kanamycin for the purpose of confirming that the vector has the gene of interest properly inserted.

[1068] The amphotropic pA317 or GP+am12 packaging cells are grown in tissue culture to confluent density in Dulbecco's Modified Eagles Medium (DMEM) with 10% calf serum (CS), penicillin and streptomycin. The MSV vector containing the gene is then added to the media and the packaging cells transduced with the vector. The packaging cells now produce infectious viral particles containing the gene (the packaging cells are now referred to as producer cells).

[1069] Fresh media is added to the transduced producer cells, and subsequently, the media is harvested from a 10 cm plate of confluent producer cells. The spent media, containing the infectious viral particles, is filtered through a millipore filter to remove detached producer cells and this media is then used to infect fibroblast cells. Media is removed from a sub-confluent plate of fibroblasts and quickly replaced with the media from the producer cells. This media is removed and replaced with fresh media. If the titer of virus is high, then virtually all fibroblasts will be infected and no selection is required. If the titer is very low, then it is necessary to use a retroviral vector that has a selectable marker, such as neo or his. Once the fibroblasts have been efficiently infected, the fibroblasts are analyzed to determine whether protein is produced.

[1070] The engineered fibroblasts are then transplanted onto the host, either alone or after having been grown to confluence on cytodex 3 microcarrier beads.

### Example 17

### Gene Therapy Using Endogenous Genes Corresponding To Polynucleotides of the Invention

[1071] Another method of gene therapy according to the present invention involves operably associating the endogenous polynucleotide sequence of the invention with a promoter via homologous recombination as described, for example, in U.S. Pat. No. 5,641,670, issued Jun. 24, 1997; International Publication NO: WO 96/29411, published Sep. 26, 1996; International Publication NO: WO 94/12650, published Aug. 4, 1994; Koller et al., Proc. Natl. Acad. Sci. USA, 86:8932-8935 (1989); and Zijlstra et al., Nature, 342:435-438 (1989). This method involves the activation of a gene which is present in the target cells, but which is not expressed in the cells, or is expressed at a lower level than desired.

[1072] Polynucleotide constructs are made which contain a promoter and targeting sequences, which are homologous to the 5′ non-coding sequence of endogenous polynucleotide sequence, flanking the promoter. The targeting sequence will be sufficiently near the 5′ end of the polynucleotide sequence so the promoter will be operably linked to the endogenous sequence upon homologous recombination. The promoter and the targeting sequences can be amplified using PCR. Preferably, the amplified promoter contains distinct restriction enzyme sites on the 5′ and 3′ ends. Preferably, the 3′ end of the first targeting sequence contains the same restriction enzyme site as the 5′ end of the amplified promoter and the 5′ end of the second targeting sequence contains the same restriction site as the 3′ end of the amplified promoter.

[1073] The amplified promoter and the amplified targeting sequences are digested with the appropriate restriction enzymes and subsequently treated with calf intestinal phosphatase. The digested promoter and digested targeting sequences are added together in the presence of T4 DNA ligase. The resulting mixture is maintained under conditions appropriate for ligation of the two fragments. The construct is size fractionated on an agarose gel, then purified by phenol extraction and ethanol precipitation.

[1074] In this Example, the polynucleotide constructs are administered as naked polynucleotides via electroporation. However, the polynucleotide constructs may also be administered with transfection-facilitating agents, such as liposomes, viral sequences, viral particles, precipitating agents, etc. Such methods of delivery are known in the art.

[1075] Once the cells are transfected, homologous recombination will take place which results in the promoter being operably linked to the endogenous polynucleotide sequence. This results in the expression of polynucleotide corresponding to the polynucleotide in the cell. Expression may be detected by immunological staining, or any other method known in the art.

[1076] Fibroblasts are obtained from a subject by skin biopsy. The resulting tissue is placed in DMEM+10% fetal calf serum. Exponentially growing or early stationary phase fibroblasts are trypsinized and rinsed from the plastic surface with nutrient medium. An aliquot of the cell suspension is removed for counting, and the remaining cells are subjected to centrifugation. The supernatant is aspirated and the pellet is resuspended in 5 ml of electroporation buffer (20 mM HEPES pH 7.3, 137 mM NaCl, 5 mM KCl, 0.7 mM Na₂ HPO₄, 6 mM dextrose). The cells are recentrifuged, the supernatant aspirated, and the cells resuspended in electroporation buffer containing 1 mg/ml acetylated bovine serum albumin. The final cell suspension contains approximately 3×10⁶ cells/ml. Electroporation should be performed immediately following resuspension.

[1077] Plasmid DNA is prepared according to standard techniques. For example, to construct a plasmid for targeting to the locus corresponding to the polynucleotide of the invention, plasmid pUC18 (MBI Fermentas, Amherst, N.Y.) is digested with HindIII. The CMV promoter is amplified by PCR with an XbaI site on the 5′ end and a BamHI site on the 3′ end. Two non-coding sequences are amplified via PCR: one non-coding sequence (fragment 1) is amplified with a HindIII site at the 5′ end and an Xba site at the 3′ end; the other non-coding sequence (fragment 2) is amplified with a BamHI site at the 5′ end and a HindIII site at the 3′ end. The CMV promoter and the fragments (1 and 2) are digested with the appropriate enzymes (CMV promoter—XbaI and BamHI; fragment 1—XbaI; fragment 2—BamHI) and ligated together. The resulting ligation product is digested with HindIII, and ligated with the HindIII-digested pUC18 plasmid.

[1078] Plasmid DNA is added to a sterile cuvette with a 0.4 cm electrode gap (Bio-Rad). The final DNA concentration is generally at least 120 μg/ml. 0.5 ml of the cell suspension (containing approximately 1.5×10⁶ cells) is then added to the cuvette, and the cell suspension and DNA solutions are gently mixed. Electroporation is performed with a Gene-Pulser apparatus (Bio-Rad). Capacitance and voltage are set at 960° F. and 250-300 V, respectively. As voltage increases, cell survival decreases, but the percentage of surviving cells that stably incorporate the introduced DNA into their genome increases dramatically. Given these parameters, a pulse time of approximately 14-20 mSec should be observed.

[1079] Electroporated cells are maintained at room temperature for approximately 5 min, and the contents of the cuvette are then gently removed with a sterile transfer pipette. The cells are added directly to 10 ml of prewarmed nutrient media (DMEM with 15% calf serum) in a 10 cm dish and incubated at 37 degree C. The following day, the media is aspirated and replaced with 10 ml of fresh media and incubated for a further 16-24 hours.

[1080] The engineered fibroblasts are then injected into the host, either alone or after having been grown to confluence on cytodex 3 microcarrier beads. The fibroblasts now produce the protein product. The fibroblasts can then be introduced into a patient as described above.

### Example 18

### Method of Treatment Using Gene Therapy—In Vivo

[1081] Another aspect of the present invention is using in vivo gene therapy methods to prevent, treat, and/or ameliorate immune diseases and disorders. The gene therapy method relates to the introduction of naked nucleic acid (DNA, RNA, and antisense DNA or RNA) sequences into an animal to increase or decrease the expression of the polypeptide. The polynucleotide of the present invention may be operatively linked to (i.e., associated with) a promoter or any other genetic elements necessary for the expression of the polypeptide by the target tissue. Such gene therapy and delivery techniques and methods are known in the art, see, for example, WO90/11092, WO98/11779; U.S. Pat. Nos. 5,693,622, 5,705,151, 5,580,859; Tabata et al., Cardiovasc. Res. 35(3):470-479 (1997); Chao et al., Pharmacol. Res. 35(6):517-522 (1997); Wolff, Neuromuscul. Disord. 7(5):314-318 (1997); Schwartz et al., Gene Ther. 3(5):405-411 (1996); Tsurumi et al., Circulation 94(12):3281-3290 (1996) (incorporated herein by reference).

[1082] The polynucleotide constructs may be delivered by any method that delivers injectable materials to the cells of an animal, such as, injection into the interstitial space of tissues (heart, muscle, skin, lung, liver, intestine and the like). The polynucleotide constructs can be delivered in a pharmaceutically acceptable liquid or aqueous carrier.

[1083] The term “naked” polynucleotide, DNA or RNA, refers to sequences that are free from any delivery vehicle that acts to assist, promote, or facilitate entry into the cell, including viral sequences, viral particles, liposome formulations, lipofectin or precipitating agents and the like. However, the polynucleotides of the present invention may also be delivered in liposome formulations (such as those taught in Feigner P. L. et al. (1995) Ann. NY Acad. Sci. 772:126-139 and Abdallah B. et al. (1995) Biol. Cell 85(1):1-7) which can be prepared by methods well known to those skilled in the art.

[1084] The polynucleotide vector constructs used in the gene therapy method are preferably constructs that will not integrate into the host genome nor will they contain sequences that allow for replication. Any strong promoter known to those skilled in the art can be used for driving the expression of DNA. Unlike other gene therapy techniques, one major advantage of introducing naked nucleic acid sequences into target cells is the transitory nature of the polynucleotide synthesis in the cells. Studies have shown that non-replicating DNA sequences can be introduced into cells to provide production of the desired polypeptide for periods of up to six months.

[1085] The polynucleotide construct can be delivered to the interstitial space of tissues within an animal, including muscle, skin, brain, lung, liver, spleen, bone marrow, thymus, heart, lymph, blood, bone, cartilage, pancreas, kidney, gall bladder, stomach, intestine, testis, ovary, uterus, rectum, nervous system, eye, gland, and connective tissue. Interstitial space of the tissues comprises the intercellular fluid, mucopolysaccharide matrix among the reticular fibers of organ tissues, elastic fibers in the walls of vessels or chambers, collagen fibers of fibrous tissues, or that same matrix within connective tissue ensheathing muscle cells or in the lacunae of bone. It is similarly the space occupied by the plasma of the circulation and the lymph fluid of the lymphatic channels. Delivery to the interstitial space of muscle tissue is preferred for the reasons discussed below. They may be conveniently delivered by injection into the tissues comprising these cells. They are preferably delivered to and expressed in persistent, non-dividing cells which are differentiated, although delivery and expression may be achieved in non-differentiated or less completely differentiated cells, such as, for example, stem cells of blood or skin fibroblasts. In vivo muscle cells are particularly competent in their ability to take up and express polynucleotides.

[1086] For the naked polynucleotide injection, an effective dosage amount of DNA or RNA will be in the range of from about 0.05 g/kg body weight to about 50 mg/kg body weight. Preferably the dosage will be from about 0.005 mg/kg to about 20 mg/kg and more preferably from about 0.05 mg/kg to about 5 mg/kg. Of course, as the artisan of ordinary skill will appreciate, this dosage will vary according to the tissue site of injection. The appropriate and effective dosage of nucleic acid sequence can readily be determined by those of ordinary skill in the art and may depend on the condition being treated and the route of administration. The preferred route of administration is by the parenteral route of injection into the interstitial space of tissues. However, other parenteral routes may also be used, such as, inhalation of an aerosol formulation particularly for delivery to lungs or bronchial tissues, throat or mucous membranes of the nose. In addition, naked polynucleotide constructs can be delivered to arteries during angioplasty by the catheter used in the procedure.

[1087] The dose response effects of injected polynucleotide in muscle in vivo is determined as follows. Suitable template DNA for production of mRNA coding for polypeptide of the present invention is prepared in accordance with a standard recombinant DNA methodology. The template DNA, which may be either circular or linear, is either used as naked DNA or complexed with liposomes. The quadriceps muscles of mice are then injected with various amounts of the template DNA.

[1088] Five to six week old female and male Balb/C mice are anesthetized by intraperitoneal injection with 0.3 ml of 2.5% Avertin. A 1.5 cm incision is made on the anterior thigh, and the quadriceps muscle is directly visualized. The template DNA is injected in 0.1 ml of carrier in a 1 cc syringe through a 27 gauge needle over one minute, approximately 0.5 cm from the distal insertion site of the muscle into the knee and about 0.2 cm deep. A suture is placed over the injection site for future localization, and the skin is closed with stainless steel clips.

[1089] After an appropriate incubation time (e.g., 7 days) muscle extracts are prepared by excising the entire quadriceps. Every fifth 15 um cross-section of the individual quadriceps muscles is histochemically stained for protein expression. A time course for protein expression may be done in a similar fashion except that quadriceps from different mice are harvested at different times. Persistence of DNA in muscle following injection may be determined by Southern blot analysis after preparing total cellular DNA and HIRT supernatants from injected and control mice. The results of the above experimentation in mice can be used to extrapolate proper dosages and other treatment parameters in humans and other animals using naked DNA.

### Example 19

### Transgenic Animals

[1090] The polypeptides of the invention can also be expressed in transgenic animals. Animals of any species, including, but not limited to, mice, rats, rabbits, hamsters, guinea pigs, pigs, micro-pigs, goats, sheep, cows and non-human primates, e.g., baboons, monkeys, and chimpanzees may be used to generate transgenic animals. In a specific embodiment, techniques described herein or otherwise known in the art, are used to express polypeptides of the invention in humans, as part of a gene therapy protocol.

[1091] Any technique known in the art may be used to introduce the transgene (i.e., polynucleotides of the invention) into animals to produce the founder lines of transgenic animals. Such techniques include, but are not limited to, pronuclear microinjection (Paterson et al., Appl. Microbiol. Biotechnol. 40:691-698 (1994); Carver et al., Biotechnology (NY) 11:1263-1270 (1993); Wright et al., Biotechnology (NY) 9:830-834 (1991); and Hoppe et al., U.S. Pat. No. 4,873,191 (1989)); retrovirus mediated gene transfer into germ lines (Van der Putten et al., Proc. Natl. Acad. Sci., USA 82:6148-6152 (1985)), blastocysts or embryos; gene targeting in embryonic stem cells (Thompson et al., Cell 56:313-321 (1989)); electroporation of cells or embryos (Lo, 1983, Mol Cell. Biol. 3:1803-1814 (1983)); introduction of the polynucleotides of the invention using a gene gun (see, e.g., Ulmer et al., Science 259:1745 (1993); introducing nucleic acid constructs into embryonic pleuripotent stem cells and transferring the stem cells back into the blastocyst; and sperm-mediated gene transfer (Lavitrano et al., Cell 57:717-723 (1989); etc. For a review of such techniques, see Gordon, “Transgenic Animals,” Intl. Rev. Cytol. 115:171-229 (1989), which is incorporated by reference herein in its entirety.

[1092] Any technique known in the art may be used to produce transgenic clones containing polynucleotides of the invention, for example, nuclear transfer into enucleated oocytes of nuclei from cultured embryonic, fetal, or adult cells induced to quiescence (Campell et al., Nature 380:64-66 (1996); Wilmut et al., Nature 385:810-813 (1997)).

[1093] The present invention provides for transgenic animals that carry the transgene in all their cells, as well as animals which carry the transgene in some, but not all their cells, i.e., mosaic animals or chimeric. The transgene may be integrated as a single transgene or as multiple copies such as in concatamers, e.g., head-to-head tandems or head-to-tail tandems. The transgene may also be selectively introduced into and activated in a particular cell type by following, for example, the teaching of Lasko et al. (Lasko et al., Proc. Natl. Acad. Sci. USA 89:6232-6236 (1992)). The regulatory sequences required for such a cell-type specific activation will depend upon the particular cell type of interest, and will be apparent to those of skill in the art. When it is desired that the polynucleotide transgene be integrated into the chromosomal site of the endogenous gene, gene targeting is preferred. Briefly, when such a technique is to be utilized, vectors containing some nucleotide sequences homologous to the endogenous gene are designed for the purpose of integrating, via homologous recombination with chromosomal sequences, into and disrupting the function of the nucleotide sequence of the endogenous gene. The transgene may also be selectively introduced into a particular cell type, thus inactivating the endogenous gene in only that cell type, by following, for example, the teaching of Gu et al. (Gu et al., Science 265:103-106 (1994)). The regulatory sequences required for such a cell-type specific inactivation will depend upon the particular cell type of interest, and will be apparent to those of skill in the art.

[1094] Once transgenic animals have been generated, the expression of the recombinant gene may be assayed utilizing standard techniques. Initial screening may be accomplished by Southern blot analysis or PCR techniques to analyze animal tissues to verify that integration of the transgene has taken place. The level of mRNA expression of the transgene in the tissues of the transgenic animals may also be assessed using techniques which include, but are not limited to, Northern blot analysis of tissue samples obtained from the animal, in situ hybridization analysis, and reverse transcriptase-PCR (rt-PCR). Samples of transgenic gene-expressing tissue may also be evaluated immunocytochemically or immunohistochemically using antibodies specific for the transgene product.

[1095] Once the founder animals are produced, they may be bred, inbred, outbred, or crossbred to produce colonies of the particular animal. Examples of such breeding strategies include, but are not limited to: outbreeding of founder animals with more than one integration site in order to establish separate lines; inbreeding of separate lines in order to produce compound transgenics that express the transgene at higher levels because of the effects of additive expression of each transgene; crossing of heterozygous transgenic animals to produce animals homozygous for a given integration site in order to both augment expression and eliminate the need for screening of animals by DNA analysis; crossing of separate homozygous lines to produce compound heterozygous or homozygous lines; and breeding to place the transgene on a distinct background that is appropriate for an experimental model of interest.

[1096] Transgenic animals of the invention have uses which include, but are not limited to, animal model systems useful in elaborating the biological function of polypeptides of the present invention, studying conditions and/or disorders associated with aberrant expression, and in screening for compounds effective in ameliorating such conditions and/or disorders.

### Example 20

### Knock-Out Animals

[1097] Endogenous gene expression can also be reduced by inactivating or “knocking out” the gene and/or its promoter using targeted homologous recombination. (e.g., see Smithies et al., Nature 317:230-234 (1985); Thomas & Capecchi, Cell 51:503-512 (1987); Thompson et al., Cell 5:313-321 (1989); each of which is incorporated by reference herein in its entirety). For example, a mutant, non-functional polynucleotide of the invention (or a completely unrelated DNA sequence) flanked by DNA homologous to the endogenous polynucleotide sequence (either the coding regions or regulatory regions of the gene) can be used, with or without a selectable marker and/or a negative selectable marker, to transfect cells that express polypeptides of the invention in vivo. In another embodiment, techniques known in the art are used to generate knockouts in cells that contain, but do not express the gene of interest. Insertion of the DNA construct, via targeted homologous recombination, results in inactivation of the targeted gene. Such approaches are particularly suited in research and agricultural fields where modifications to embryonic stem cells can be used to generate animal offspring with an inactive targeted gene (e.g., see Thomas & Capecchi 1987 and Thompson 1989, supra). However this approach can be routinely adapted for use in humans provided the recombinant DNA constructs are directly administered or targeted to the required site in vivo using appropriate viral vectors that will be apparent to those of skill in the art.

[1098] In further embodiments of the invention, cells that are genetically engineered to express the polypeptides of the invention, or alternatively, that are genetically engineered not to express the polypeptides of the invention (e.g., knockouts) are administered to a patient in vivo. Such cells may be obtained from the patient (i.e., animal, including human) or an NMC compatible donor and can include, but are not limited to fibroblasts, bone marrow cells, blood cells (e.g., lymphocytes), adipocytes, muscle cells, endothelial cells etc. The cells are genetically engineered in vitro using recombinant DNA techniques to introduce the coding sequence of polypeptides of the invention into the cells, or alternatively, to disrupt the coding sequence and/or endogenous regulatory sequence associated with the polypeptides of the invention, e.g., by transduction (using viral vectors, and preferably vectors that integrate the transgene into the cell genome) or transfection procedures, including, but not limited to, the use of plasmids, cosmids, YACs, naked DNA, electroporation, liposomes, etc. The coding sequence of the polypeptides of the invention can be placed under the control of a strong constitutive or inducible promoter or promoter/enhancer to achieve expression, and preferably secretion, of the polypeptides of the invention. The engineered cells which express and preferably secrete the polypeptides of the invention can be introduced into the patient systemically, e.g., in the circulation, or intraperitoneally.

[1099] Alternatively, the cells can be incorporated into a matrix and implanted in the body, e.g., genetically engineered fibroblasts can be implanted as part of a skin graft; genetically engineered endothelial cells can be implanted as part of a lymphatic or vascular graft. (See, for example, Anderson et al. U.S. Pat. No. 5,399,349; and Mulligan & Wilson, U.S. Pat. No. 5,460,959 each of which is incorporated by reference herein in its entirety).

[1100] When the cells to be administered are non-autologous or non-MHC compatible cells, they can be administered using well known techniques which prevent the development of a host immune response against the introduced cells. For example, the cells may be introduced in an encapsulated form that, while allowing for an exchange of components with the immediate extracellular environment, does not allow the introduced cells to be recognized by the host immune system.

[1101] Transgenic and “knock-out” animals of the invention have uses which include, but are not limited to, animal model systems useful in elaborating the biological function of polypeptides of the present invention, studying conditions and/or disorders associated with aberrant expression, and in screening for compounds effective in ameliorating such conditions and/or disorders.

### Example 21

### Assays Detecting Stimulation or Inhibition of B cell Proliferation and Differentiation

[1102] Generation of functional humoral immune responses requires both soluble and cognate signaling between B-lineage cells and their microenvironment. Signals may impart a positive stimulus that allows a B-lineage cell to continue its programmed development, or a negative stimulus that instructs the cell to arrest its current developmental pathway. To date, numerous stimulatory and inhibitory signals have been found to influence B cell responsiveness including IL-2, IL-4, IL-5, IL-6, IL-7, IL10, IL-13, IL-14 and IL-15. Interestingly, these signals are by themselves weak effectors but can, in combination with various co-stimulatory proteins, induce activation, proliferation, differentiation, homing, tolerance and death among B cell populations.

[1103] One of the best studied classes of B-cell co-stimulatory proteins is the TNF-superfamily. Within this family CD40, CD27, and CD30 along with their respective ligands CD154, CD70, and CD153 have been found to regulate a variety of immune responses. Assays which allow for the detection and/or observation of the proliferation and differentiation of these B-cell populations and their precursors are valuable tools in determining the effects various proteins may have on these B-cell populations in terms of proliferation and differentiation. Listed below are two assays designed to allow for the detection of the differentiation, proliferation, or inhibition of B-cell populations and their precursors.

[1104] In Vitro Assay-Agonists or antagonists of the invention can be assessed for its ability to induce activation, proliferation, differentiation or inhibition and/or death in B-cell populations and their precursors. The activity of the agonists or antagonists of the invention on purified human tonsillar B cells, measured qualitatively over the dose range from 0.1 to 10,000 ng/mL, is assessed in a standard B-lymphocyte co-stimulation assay in which purified tonsillar B cells are cultured in the presence of either formalin-fixed Staphylococcus aureus Cowan I (SAC) or immobilized anti-human IgM antibody as the priming agent. Second signals such as IL-2 and IL-15 synergize with SAC and IgM crosslinking to elicit B cell proliferation as measured by tritiated-thymidine incorporation. Novel synergizing agents can be readily identified using this assay. The assay involves isolating human tonsillar B cells by magnetic bead (MACS) depletion of CD3-positive cells. The resulting cell population is greater than 95% B cells as assessed by expression of CD45R(B220).

[1105] Various dilutions of each sample are placed into individual wells of a 96-well plate to which are added 10⁵ B-cells suspended in culture medium (RPMI 1640 containing 10% FBS, 5×10⁻⁵M 2ME, 100 U/ml penicillin, 10 ug/ml streptomycin, and 10⁻⁵ dilution of SAC) in a total volume of 150 ul. Proliferation or inhibition is quantitated by a 20 h pulse (1 uCi/well) with 3H-thymidine (6.7 Ci/mM) beginning 72 h post factor addition. The positive and negative controls are IL2 and medium respectively.

[1106] In vivo Assay—BALB/c mice are injected (i.p.) twice per day with buffer only, or 2 mg/Kg of agonists or antagonists of the invention, or truncated forms thereof. Mice receive this treatment for 4 consecutive days, at which time they are sacrificed and various tissues and serum collected for analyses. Comparison of H&E sections from normal spleens and spleens treated with agonists or antagonists of the invention identify the results of the activity of the agonists or antagonists on spleen cells, such as the diffusion of peri-arterial lymphatic sheaths, and/or significant increases in the nucleated cellularity of the red pulp regions, which may indicate the activation of the differentiation and proliferation of B-cell populations. Immunohistochemical studies using a B cell marker, anti-CD45R(B220), are used to determine whether any physiological changes to splenic cells, such as splenic disorganization, are due to increased B-cell representation within loosely defined B-cell zones that infiltrate established T-cell regions.

[1107] Flow cytometric analyses of the spleens from mice treated with agonist or antagonist is used to indicate whether the agonists or antagonists specifically increases the proportion of ThB+, CD45R(B220) dull B cells over that which is observed in control mice.

[1108] Likewise, a predicted consequence of increased mature B-cell representation in vivo is a relative increase in serum Ig titers. Accordingly, serum IgM and IgA levels are compared between buffer and agonists or antagonists-treated mice.

[1109] The studies described in this example tested activity of agonists or antagonists of the invention. However, one skilled in the art could easily modify the exemplified studies to test the activity of polynucleotides or polypeptides of the invention (e.g., gene therapy).

### Example 22

### T Cell Proliferation Assay

[1110] A CD3-induced proliferation assay is performed on PBMCs and is measured by the uptake of ³H-thymidine. The assay is performed as follows. Ninety-six well plates are coated with 100 μl/well of mAb to CD3 (HIT3a, Pharmingen) or isotype-matched control mAb (B33.1) overnight at 4 degrees C. (1 μg/ml in 0.05M bicarbonate buffer, pH 9.5), then washed three times with PBS. PBMC are isolated by F/H gradient centrifugation from human peripheral blood and added to quadruplicate wells (5×10⁴/well) of mAb coated plates in RPMI containing 10% FCS and P/S in the presence of varying concentrations of agonists or antagonists of the invention (total volume 200 ul). Relevant protein buffer and medium alone are controls. After 48 hr. culture at 37 degrees C., plates are spun for 2 min. at 1000 rpm and 100 μl of supernatant is removed and stored −20 degrees C. for measurement of IL-2 (or other cytokines) if effect on proliferation is observed. Wells are supplemented with 100 ul of medium containing 0.5 uCi of ³H-thymidine and cultured at 37 degrees C. for 18-24 hr. Wells are harvested and incorporation of ³H-thymidine used as a measure of proliferation. Anti-CD3 alone is the positive control for proliferation. IL-2 (100 U/ml) is also used as a control which enhances proliferation. Control antibody which does not induce proliferation of T cells is used as the negative control for the effects of agonists or antagonists of the invention.

[1111] The studies described in this example tested activity of agonists or antagonists of the invention. However, one skilled in the art could easily modify the exemplified studies to test the activity of polynucleotides or polypeptides of the invention (e.g., gene therapy).

### Example 23

### Effect of Agonists or Antagonists of the Invention on the Expression of MHC Class II, Costimulatory and Adhesion Molecules and Cell Differentiation of Monocytes and Monocyte-Derived Human Dendritic Cells

[1112] Dendritic cells are generated by the expansion of proliferating precursors found in the peripheral blood: adherent PBMC or elutriated monocytic fractions are cultured for 7-10 days with GM-CSF (50 ng/ml) and IL-4 (20 ng/ml). These dendritic cells have the characteristic phenotype of immature cells (expression of CD1, CD80, CD86, CD40 and MHC class II antigens). Treatment with activating factors, such as TNF-α, causes a rapid change in surface phenotype (increased expression of MHC class I and II, costimulatory and adhesion molecules, downregulation of FCγRII, upregulation of CD83). These changes correlate with increased antigen-presenting capacity and with functional maturation of the dendritic cells.

[1113] FACS analysis of surface antigens is performed as follows. Cells are treated 1-3 days with increasing concentrations of agonist or antagonist of the invention or LPS (positive control), washed with PBS containing 1% BSA and 0.02 mM sodium azide, and then incubated with 1:20 dilution of appropriate FITC- or PE-labeled monoclonal antibodies for 30 minutes at 4 degrees C. After an additional wash, the labeled cells are analyzed by flow cytometry on a FACScan (Becton Dickinson).

[1114] Effect on the production of cytokines. Cytokines generated by dendritic cells, in particular L-12, are important in the initiation of T-cell dependent immune responses. IL-12 strongly influences the development of Th1 helper T-cell immune response, and induces cytotoxic T and NK cell function. An ELISA is used to measure the IL-12 release as follows. Dendritic cells (10⁶/ml) are treated with increasing concentrations of agonists or antagonists of the invention for 24 hours. LPS (100 ng/ml) is added to the cell culture as positive control. Supernatants from the cell cultures are then collected and analyzed for IL-12 content using commercial ELISA kit (e.g., R & D Systems (Minneapolis, Minn.)). The standard protocols provided with the kits are used.

[1115] Effect on the expression of MHC Class II, costimulatory and adhesion molecules. Three major families of cell surface antigens can be identified on monocytes: adhesion molecules, molecules involved in antigen presentation, and Fc receptor. Modulation of the expression of MHC class II antigens and other costimulatory molecules, such as B7 and ICAM-1, may result in changes in the antigen presenting capacity of monocytes and ability to induce T cell activation. Increased expression of Fc receptors may correlate with improved monocyte cytotoxic activity, cytokine release and phagocytosis.

[1116] FACS analysis is used to examine the surface antigens as follows. Monocytes are treated 1-5 days with increasing concentrations of agonists or antagonists of the invention or LPS (positive control), washed with PBS containing 1% BSA and 0.02 mM sodium azide, and then incubated with 1:20 dilution of appropriate FITC- or PE-labeled monoclonal antibodies for 30 minutes at 4 degrees C. After an additional wash, the labeled cells are analyzed by flow cytometry on a FACScan (Becton Dickinson).

[1117] Monocyte activation and/or increased survival. Assays for molecules that activate (or alternatively, inactivate) monocytes and/or increase monocyte survival (or alternatively, decrease monocyte survival) are known in the art and may routinely be applied to determine whether a molecule of the invention functions as an inhibitor or activator of monocytes. Agonists or antagonists of the invention can be screened using the three assays described below. For each of these assays, Peripheral blood mononuclear cells (PBMC) are purified from single donor leukopacks (American Red Cross, Baltimore, Md.) by centrifugation through a Histopaque gradient (Sigma). Monocytes are isolated from PBMC by counterflow centrifugal elutriation.

[1118] Monocyte Survival Assay. Human peripheral blood monocytes progressively lose viability when cultured in absence of serum or other stimuli. Their death results from internally regulated processes (apoptosis). Addition to the culture of activating factors, such as TNF-alpha dramatically improves cell survival and prevents DNA fragmentation. Propidium iodide (PI) staining is used to measure apoptosis as follows. Monocytes are cultured for 48 hours in polypropylene tubes in serum-free medium (positive control), in the presence of 100 ng/ml TNF-alpha (negative control), and in the presence of varying concentrations of the compound to be tested. Cells are suspended at a concentration of 2×10⁶/ml in PBS containing PI at a final concentration of 5 μg/ml, and then incubated at room temperature for 5 minutes before FACScan analysis. PI uptake has been demonstrated to correlate with DNA fragmentation in this experimental paradigm.

[1119] Effect on cytokine release. An important function of monocytes/macrophages is their regulatory activity on other cellular populations of the immune system through the release of cytokines after stimulation. An ELISA to measure cytokine release is performed as follows. Human monocytes are incubated at a density of 5×10⁵ cells/ml with increasing concentrations of agonists or antagonists of the invention and under the same conditions, but in the absence of agonists or antagonists. For IL-12 production, the cells are primed overnight with IFN (100 U/ml) in the presence of agonist or antagonist of the invention. LPS (10 ng/ml) is then added. Conditioned media are collected after 24 h and kept frozen until use. Measurement of TNF-alpha, IL-10, MCP-1 and L-8 is then performed using a commercially available ELISA kit (e.g., R & D Systems (Minneapolis, Minn.)) and applying the standard protocols provided with the kit.

[1120] Oxidative burst. Purified monocytes are plated in 96-w plate at 2-1×10⁵ cell/well. Increasing concentrations of agonists or antagonists of the invention are added to the wells in a total volume of 0.2 ml culture medium (RPMI 1640+10% FCS, glutamine and antibiotics). After 3 days incubation, the plates are centrifuged and the medium is removed from the wells. To the macrophage monolayers, 0.2 ml per well of phenol red solution (140 mM NaCl, 10 mM potassium phosphate buffer pH 7.0, 5.5 mM dextrose, 0.56 mM phenol red and 19 U/ml of HRPO) is added, together with the stimulant (200 nM PMA). The plates are incubated at 37° C. for 2 hours and the reaction is stopped by adding 20 μl 1N NaOH per well. The absorbance is read at 610 nm. To calculate the amount of H₂O₂ produced by the macrophages, a standard curve of a H₂O₂ solution of known molarity is performed for each experiment.

[1121] The studies described in this example tested activity of agonists or antagonists of the invention. However, one skilled in the art could easily modify the exemplified studies to test the activity of polynucleotides or polypeptides of the invention (e.g., gene therapy).

### Example 24

### Biological Effects of Agonists or Antagonists of the Invention

Astrocyte and Neuronal Assays

[1122] Agonists or antagonists of the invention, expressed in Escherichia coli and purified as described above, can be tested for activity in promoting the survival, neurite outgrowth, or phenotypic differentiation of cortical neuronal cells and for inducing the proliferation of glial fibrillary acidic protein immunopositive cells, astrocytes. The selection of cortical cells for the bioassay is based on the prevalent expression of FGF-1 and FGF-2 in cortical structures and on the previously reported enhancement of cortical neuronal survival resulting from FGF-2 treatment. A thymidine incorporation assay, for example, can be used to elucidate an agonist or antagonist of the invention's activity on these cells.

[1123] Moreover, previous reports describing the biological effects of FGF-2 (basic FGF) on cortical or hippocampal neurons in vitro have demonstrated increases in both neuron survival and neurite outgrowth (Walicke et al., “Fibroblast growth factor promotes survival of dissociated hippocampal neurons and enhances neurite extension.” Proc. Natl. Acad. Sci. USA 83:3012-3016. (1986), assay herein incorporated by reference in its entirety). However, reports from experiments done on PC-12 cells suggest that these two responses are not necessarily synonymous and may depend on not only which FGF is being tested but also on which receptor(s) are expressed on the target cells. Using the primary cortical neuronal culture paradigm, the ability of an agonist or antagonist of the invention to induce neurite outgrowth can be compared to the response achieved with FGF-2 using, for example, a thymidine incorporation assay.

Fibroblast and Endothelial Cell Assays

[1124] Human lung fibroblasts are obtained from Clonetics (San Diego, Calif.) and maintained in growth media from Clonetics. Dermal microvascular endothelial cells are obtained from Cell Applications (San Diego, Calif.). For proliferation assays, the human lung fibroblasts and dermal microvascular endothelial cells can be cultured at 5,000 cells/well in a 96-well plate for one day in growth medium. The cells are then incubated for one day in 0.1% BSA basal medium. After replacing the medium with fresh 0.1% BSA medium, the cells are incubated with the test proteins for 3 days. Alamar Blue (Alamar Biosciences, Sacramento, Calif.) is added to each well to a final concentration of 10%. The cells are incubated for 4 hr. Cell viability is measured by reading in a CytoFluor fluorescence reader. For the PGE₂ assays, the human lung fibroblasts are cultured at 5,000 cells/well in a 96-well plate for one day. After a medium change to 0.1% BSA basal medium, the cells are incubated with FGF-2 or agonists or antagonists of the invention with or without IL-1α for 24 hours. The supernatants are collected and assayed for PGE₂ by EIA kit (Cayman, Ann Arbor, Mich.). For the L-6 assays, the human lung fibroblasts are cultured at 5,000 cells/well in a 96-well plate for one day. After a medium change to 0.1% BSA basal medium, the cells are incubated with FGF-2 or with or without agonists or antagonists of the invention L-1α for 24 hours. The supernatants are collected and assayed for L-6 by ELISA kit (Endogen, Cambridge, Mass.).

[1125] Human lung fibroblasts are cultured with FGF-2 or agonists or antagonists of the invention for 3 days in basal medium before the addition of Alamar Blue to assess effects on growth of the fibroblasts. FGF-2 should show a stimulation at 10-2500 ng/ml which can be used to compare stimulation with agonists or antagonists of the invention.

Parkinson Models.

[1126] The loss of motor function in Parkinson's disease is attributed to a deficiency of striatal dopamine resulting from the degeneration of the nigrostriatal dopaminergic projection neurons. An animal model for Parkinson's that has been extensively characterized involves the systemic administration of 1-methyl-4 phenyl 1,2,3,6-tetrahydropyridine (MPTP). In the CNS, MPTP is taken-up by astrocytes and catabolized by monoamine oxidase B to 1-methyl-4-phenyl pyridine (MPP⁺) and released. Subsequently, MPP⁺ is actively accumulated in dopaminergic neurons by the high-affinity reuptake transporter for dopamine. MPP⁺ is then concentrated in mitochondria by the electrochemical gradient and selectively inhibits nicotidamide adenine disphosphate: ubiquinone oxidoreductionase (complex I), thereby interfering with electron transport and eventually generating oxygen radicals.

[1127] It has been demonstrated in tissue culture paradigms that FGF-2 (basic FGF) has trophic activity towards nigral dopaminergic neurons (Ferrari et al., Dev. Biol. 1989). Recently, Dr. Unsicker's group has demonstrated that administering FGF-2 in gel foam implants in the striatum results in the near complete protection of nigral dopaminergic neurons from the toxicity associated with MPTP exposure (Otto and Unsicker, J. Neuroscience, 1990).

[1128] Based on the data with FGF-2, agonists or antagonists of the invention can be evaluated to determine whether it has an action similar to that of FGF-2 in enhancing dopaminergic neuronal survival in vitro and it can also be tested in vivo for protection of dopaminergic neurons in the striatum from the damage associated with MPTP treatment. The potential effect of an agonist or antagonist of the invention is first examined in vitro in a dopaminergic neuronal cell culture paradigm. The cultures are prepared by dissecting the midbrain floor plate from gestation day 14 Wistar rat embryos. The tissue is dissociated with trypsin and seeded at a density of 200,000 cells/cm² on polyorthinine-laminin coated glass coverslips. The cells are maintained in Dulbecco's Modified Eagle's medium and F12 medium containing hormonal supplements (N1). The cultures are fixed with paraformaldehyde after 8 days in vitro and are processed for tyrosine hydroxylase, a specific marker for dopaminergic neurons, immunohistochemical staining. Dissociated cell cultures are prepared from embryonic rats. The culture medium is changed every third day and the factors are also added at that time.

[1129] Since the dopaminergic neurons are isolated from animals at gestation day 14, a developmental time which is past the stage when the dopaminergic precursor cells are proliferating, an increase in the number of tyrosine hydroxylase immunopositive neurons would represent an increase in the number of dopaminergic neurons surviving in vitro. Therefore, if an agonist or antagonist of the invention acts to prolong the survival of dopaminergic neurons, it would suggest that the agonist or antagonist may be involved in Parkinson's Disease.

[1130] The studies described in this example tested activity of agonists or antagonists of the invention. However, one skilled in the art could easily modify the exemplified studies to test the activity of polynucleotides or polypeptides of the invention (e.g., gene therapy).

### Example 25

### The Effect of Agonists or Antagonists of the Invention on the Growth of Vascular Endothelial Cells

[1131] On day 1, human umbilical vein endothelial cells (HUVEC) are seeded at 2-5×10⁴ cells/35 mm dish density in M199 medium containing 4% fetal bovine serum (FBS), 16 units/ml heparin, and 50 units/ml endothelial cell growth supplements (ECGS, Biotechnique, Inc.). On day 2, the medium is replaced with M199 containing 10% FBS, 8 units/ml heparin. An agonist or antagonist of the invention, and positive controls, such as VEGF and basic FGF (bFGF) are added, at varying concentrations. On days 4 and 6, the medium is replaced. On day 8, cell number is determined with a Coulter Counter.

[1132] An increase in the number of HUVEC cells indicates that the compound of the invention may proliferate vascular endothelial cells, while a decrease in the number of HUVEC cells indicates that the compound of the invention inhibits vascular endothelial cells.

[1133] The studies described in this example tested activity of a polypeptide of the invention. However, one skilled in the art could easily modify the exemplified studies to test the activity of polynucleotides (e.g., gene therapy), agonists, and/or antagonists of the invention.

### Example 26

### Rat Corneal Wound Healing Model

[1134] This animal model shows the effect of an agonist or antagonist of the invention on neovascularization. The experimental protocol includes:

a) Making a 1-1.5 mm long incision from the center of cornea into the stromal layer.

b) Inserting a spatula below the lip of the incision facing the outer corner of the eye.

c) Making a pocket (its base is 1-1.5 mm form the edge of the eye).

d) Positioning a pellet, containing 50 ng-5 ug of an agonist or antagonist of the invention, within the pocket.

e) Treatment with an agonist or antagonist of the invention can also be applied topically to the corneal wounds in a dosage range of 20 mg-500 mg (daily treatment for five days).

[1135] The studies described in this example tested activity of agonists or antagonists of the invention. However, one skilled in the art could easily modify the exemplified studies to test the activity of polynucleotides or polypeptides of the invention (e.g., gene therapy).

### Example 27

### Diabetic Mouse and Glucocorticoid-Impaired Wound Healing Models

Diabetic db+/db+ Mouse Model.

[1136] To demonstrate that an agonist or antagonist of the invention accelerates the healing process, the genetically diabetic mouse model of wound healing is used. The full thickness wound healing model in the db+/db+ mouse is a well characterized, clinically relevant and reproducible model of impaired wound healing. Healing of the diabetic wound is dependent on formation of granulation tissue and re-epithelialization rather than contraction (Gartner, M. H. et al., J. Surg. Res. 52:389 (1992); Greenhalgh, D. G. et al., Am. J. Pathol. 136:1235 (1990)).

[1137] The diabetic animals have many of the characteristic features observed in Type II diabetes mellitus. Homozygous (db+/db+) mice are obese in comparison to their normal heterozygous (db+/+m) littermates. Mutant diabetic (db+/db+) mice have a single autosomal recessive mutation on chromosome 4 (db+) (Coleman et al. Proc. Natl. Acad. Sci. USA 77:283-293 (1982)). Animals show polyphagia, polydipsia and polyuria. Mutant diabetic mice (db+/db+) have elevated blood glucose, increased or normal insulin levels, and suppressed cell-mediated immunity (Mandel et al., J. Immunol. 120:1375 (1978); Debray-Sachs, M. et al., Clin. Exp. Immunol. 51(1):1-7 (1983); Leiter et al., Am. J. of Pathol. 114:46-55 (1985)). Peripheral neuropathy, myocardial complications, and microvascular lesions, basement membrane thickening and glomerular filtration abnormalities have been described in these animals (Norido, F. et al., Exp. Neurol. 83(2):221-232 (1984); Robertson et al, Diabetes 29(1):60-67 (1980); Giacomelli et al, Lab Invest. 40(4):460-473 (1979); Coleman, D. L., Diabetes 31 (Suppl):1-6 (1982)). These homozygous diabetic mice develop hyperglycemia that is resistant to insulin analogous to human type II diabetes (Mandel et al, J. Immunol. 120:1375-1377 (1978)).

[1138] The characteristics observed in these animals suggests that healing in this model may be similar to the healing observed in human diabetes (Greenhalgh, et al., Am. J of Pathol 136:1235-1246 (1990)).

[1139] Genetically diabetic female C57BL/KsJ (db+/db+) mice and their non-diabetic (db+/+m) heterozygous littermates are used in this study (Jackson Laboratories). The animals are purchased at 6 weeks of age and are 8 weeks old at the beginning of the study. Animals are individually housed and received food and water ad libitum. All manipulations are performed using aseptic techniques. The experiments are conducted according to the rules and guidelines of Human Genome Sciences, Inc. Institutional Animal Care and Use Committee and the Guidelines for the Care and Use of Laboratory Animals.

[1140] Wounding protocol is performed according to previously reported methods (Tsuboi, R. and Rifkin, D. B., J. Exp. Med. 172:245-251 (1990)). Briefly, on the day of wounding, animals are anesthetized with an intraperitoneal injection of Avertin (0.01 mg/mL), 2,2,2-tribromoethanol and 2-methyl-2-butanol dissolved in deionized water. The dorsal region of the animal is shaved and the skin washed with 70% ethanol solution and iodine. The surgical area is dried with sterile gauze prior to wounding. An 8 mm full-thickness wound is then created using a Keyes tissue punch. Immediately following wounding, the surrounding skin is gently stretched to eliminate wound expansion. The wounds are left open for the duration of the experiment. Application of the treatment is given topically for 5 consecutive days commencing on the day of wounding. Prior to treatment, wounds are gently cleansed with sterile saline and gauze sponges.

[1141] Wounds are visually examined and photographed at a fixed distance at the day of surgery and at two day intervals thereafter. Wound closure is determined by daily measurement on days 1-5 and on day 8. Wounds are measured horizontally and vertically using a calibrated Jameson caliper. Wounds are considered healed if granulation tissue is no longer visible and the wound is covered by a continuous epithelium.

[1142] An agonist or antagonist of the invention is administered using at a range different doses, from 4 mg to 500 mg per wound per day for 8 days in vehicle. Vehicle control groups received 50 mL of vehicle solution.

[1143] Animals are euthanized on day 8 with an intraperitoneal injection of sodium pentobarbital (300 mg/kg). The wounds and surrounding skin are then harvested for histology and immunohistochemistry. Tissue specimens are placed in 10% neutral buffered formalin in tissue cassettes between biopsy sponges for further processing.

[1144] Three groups of 10 animals each (5 diabetic and 5 non-diabetic controls) are evaluated: 1) Vehicle placebo control, 2) untreated group, and 3) treated group.

[1145] Wound closure is analyzed by measuring the area in the vertical and horizontal axis and obtaining the total square area of the wound. Contraction is then estimated by establishing the differences between the initial wound area (day 0) and that of post treatment (day 8). The wound area on day 1 is 64 mm², the corresponding size of the dermal punch. Calculations are made using the following formula:
[Open area on day 8]−[Open area on day 1]/[Open area on day 1]

[1146] Specimens are fixed in 10% buffered formalin and paraffin embedded blocks are sectioned perpendicular to the wound surface (5 mm) and cut using a Reichert-Jung microtome. Routine hematoxylin-eosin (H&E) staining is performed on cross-sections of bisected wounds. Histologic examination of the wounds are used to assess whether the healing process and the morphologic appearance of the repaired skin is altered by treatment with an agonist or antagonist of the invention. This assessment included verification of the presence of cell accumulation, inflammatory cells, capillaries, fibroblasts, re-epithelialization and epidermal maturity (Greenhalgh, D. G. et al., Am. J. Pathol. 136:1235 (1990)). A calibrated lens micrometer is used by a blinded observer.

[1147] Tissue sections are also stained immunohistochemically with a polyclonal rabbit anti-human keratin antibody using ABC Elite detection system. Human skin is used as a positive tissue control while non-immune IgG is used as a negative control. Keratinocyte growth is determined by evaluating the extent of reepithelialization of the wound using a calibrated lens micrometer.

[1148] Proliferating cell nuclear antigen/cyclin (PCNA) in skin specimens is demonstrated by using anti-PCNA antibody (1:50) with an ABC Elite detection system. Human colon cancer served as a positive tissue control and human brain tissue is used as a negative tissue control. Each specimen included a section with omission of the primary antibody and substitution with non-immune mouse IgG. Ranking of these sections is based on the extent of proliferation on a scale of 0-8, the lower side of the scale reflecting slight proliferation to the higher side reflecting intense proliferation.

[1149] Experimental data are analyzed using an unpaired t test. A p value of <0.05 is considered significant.

Steroid Impaired Rat Model

[1150] The inhibition of wound healing by steroids has been well documented in various in vitro and in vivo systems (Wahl, Glucocorticoids and Wound healing. In: Anti-Inflammatory Steroid Action: Basic and Clinical Aspects. 280-302 (1989); Wahl et al., J. Immunol. 115: 476-481 (1975); Werb et al., J. Exp. Med. 147:1684-1694 (1978)). Glucocorticoids retard wound healing by inhibiting angiogenesis, decreasing vascular permeability (Ebert et al., An. Intern. Med. 37:701-705 (1952)), fibroblast proliferation, and collagen synthesis (Beck et al., Growth Factors. 5: 295-304 (1991); Haynes et al., J. Clin. Invest. 61: 703-797 (1978)) and producing a transient reduction of circulating monocytes (Haynes et al., J. Clin. Invest. 61: 703-797 (1978); Wahl, “Glucocorticoids and wound healing”, In: Antiinflammatory Steroid Action: Basic and Clinical Aspects, Academic Press, New York, pp. 280-302 (1989)). The systemic administration of steroids to impaired wound healing is a well establish phenomenon in rats (Beck et al., Growth Factors. 5: 295-304 (1991); Haynes et al., J. Clin. Invest. 61: 703-797 (1978); Wahl, “Glucocorticoids and wound healing”, In: Antiinflammatory Steroid Action: Basic and Clinical Aspects, Academic Press, New York, pp. 280-302 (1989); Pierce et al., Proc. Natl. Acad. Sci. USA 86: 2229-2233 (1989)).

[1151] To demonstrate that an agonist or antagonist of the invention can accelerate the healing process, the effects of multiple topical applications of the agonist or antagonist on full thickness excisional skin wounds in rats in which healing has been impaired by the systemic administration of methylprednisolone is assessed.

[1152] Young adult male Sprague Dawley rats weighing 250-300 g (Charles River Laboratories) are used in this example. The animals are purchased at 8 weeks of age and are 9 weeks old at the beginning of the study. The healing response of rats is impaired by the systemic administration of methylprednisolone (17 mg/kg/rat intramuscularly) at the time of wounding. Animals are individually housed and received food and water ad libitum. All manipulations are performed using aseptic techniques. This study is conducted according to the rules and guidelines of Human Genome Sciences, Inc. Institutional Animal Care and Use Committee and the Guidelines for the Care and Use of Laboratory Animals.

[1153] The wounding protocol is followed according to section A, above. On the day of wounding, animals are anesthetized with an intramuscular injection of ketamine (50 mg/kg) and xylazine (5 mg/kg). The dorsal region of the animal is shaved and the skin washed with 70% ethanol and iodine solutions. The surgical area is dried with sterile gauze prior to wounding. An 8 mm full-thickness wound is created using a Keyes tissue punch. The wounds are left open for the duration of the experiment. Applications of the testing materials are given topically once a day for 7 consecutive days commencing on the day of wounding and subsequent to methylprednisolone administration. Prior to treatment, wounds are gently cleansed with sterile saline and gauze sponges.

[1154] Wounds are visually examined and photographed at a fixed distance at the day of wounding and at the end of treatment. Wound closure is determined by daily measurement on days 1-5 and on day 8. Wounds are measured horizontally and vertically using a calibrated Jameson caliper. Wounds are considered healed if granulation tissue is no longer visible and the wound is covered by a continuous epithelium.

[1155] The agonist or antagonist of the invention is administered using at a range different doses, from 4 mg to 500 mg per wound per day for 8 days in vehicle. Vehicle control groups received 50 mL of vehicle solution.

[1156] Animals are euthanized on day 8 with an intraperitoneal injection of sodium pentobarbital (300 mg/kg). The wounds and surrounding skin are then harvested for histology. Tissue specimens are placed in 10% neutral buffered formalin in tissue cassettes between biopsy sponges for further processing.

[1157] Three groups of 10 animals each (5 with methylprednisolone and 5 without glucocorticoid) are evaluated: 1) Untreated group 2) Vehicle placebo control 3) treated groups.

[1158] Wound closure is analyzed by measuring the area in the vertical and horizontal axis and obtaining the total area of the wound. Closure is then estimated by establishing the differences between the initial wound area (day 0) and that of post treatment (day 8). The wound area on day 1 is 64 mm, the corresponding size of the dermal punch. Calculations are made using the following formula:
[Open area on day 8]−[Open area on day 1]/[Open area on day 1]

[1159] Specimens are fixed in 10% buffered formalin and paraffin embedded blocks are sectioned perpendicular to the wound surface (5 mm) and cut using an Olympus microtome. Routine hematoxylin-eosin (H&E) staining is performed on cross-sections of bisected wounds. Histologic examination of the wounds allows assessment of whether the healing process and the morphologic appearance of the repaired skin is improved by treatment with an agonist or antagonist of the invention. A calibrated lens micrometer is used by a blinded observer to determine the distance of the wound gap.

[1160] Experimental data are analyzed using an unpaired t test. A p value of <0.05 is considered significant.

[1161] The studies described in this example tested activity of agonists or antagonists of the invention. However, one skilled in the art could easily modify the exemplified studies to test the activity of polynucleotides or polypeptides of the invention (e.g., gene therapy).

### Example 28

### Lymphadema Animal Model

[1162] The purpose of this experimental approach is to create an appropriate and consistent lymphedema model for testing the therapeutic effects of an agonist or antagonist of the invention in lymphangiogenesis and re-establishment of the lymphatic circulatory system in the rat hind limb. Effectiveness is measured by swelling volume of the affected limb, quantification of the amount of lymphatic vasculature, total blood plasma protein, and histopathology. Acute lymphedema is observed for 7-10 days. Perhaps more importantly, the chronic progress of the edema is followed for up to 3-4 weeks.

[1163] Prior to beginning surgery, blood sample is drawn for protein concentration analysis. Male rats weighing approximately ˜350 g are dosed with Pentobarbital. Subsequently, the right legs are shaved from knee to hip. The shaved area is swabbed with gauze soaked in 70% EtOH. Blood is drawn for serum total protein testing. Circumference and volumetric measurements are made prior to injecting dye into paws after marking 2 measurement levels (0.5 cm above heel, at mid-pt of dorsal paw). The intradermal dorsum of both right and left paws are injected with 0.05 ml of 1% Evan's Blue. Circumference and volumetric measurements are then made following injection of dye into paws.

[1164] Using the knee joint as a landmark, a mid-leg inguinal incision is made circumferentially allowing the femoral vessels to be located. Forceps and hemostats are used to dissect and separate the skin flaps. After locating the femoral vessels, the lymphatic vessel that runs along side and underneath the vessel(s) is located. The main lymphatic vessels in this area are then electrically coagulated or suture ligated.

[1165] Using a microscope, muscles in back of the leg (near the semitendinosis and adductors) are bluntly dissected. The popliteal lymph node is then located. The 2 proximal and 2 distal lymphatic vessels and distal blood supply of the popliteal node are then ligated by suturing. The popliteal lymph node, and any accompanying adipose tissue, is then removed by cutting connective tissues.

[1166] Care is taken to control any mild bleeding resulting from this procedure. After lymphatics are occluded, the skin flaps are sealed by using liquid skin (Vetbond) (AJ Buck). The separated skin edges are sealed to the underlying muscle tissue while leaving a gap of 0.5 cm around the leg. Skin also may be anchored by suturing to underlying muscle when necessary.

[1167] To avoid infection, animals are housed individually with mesh (no bedding). Recovering animals are checked daily through the optimal edematous peak, which typically occurred by day 5-7. The plateau edematous peak are then observed. To evaluate the intensity of the lymphedema, the circumference and volumes of 2 designated places on each paw before operation and daily for 7 days are measured. The effect of plasma proteins on lymphedema is determined and whether protein analysis is a useful testing perimeter is also investigated. The weights of both control and edematous limbs are evaluated at 2 places. Analysis is performed in a blind manner.

[1168] Circumference Measurements: Under brief gas anesthetic to prevent limb movement, a cloth tape is used to measure limb circumference. Measurements are done at the ankle bone and dorsal paw by 2 different people and those 2 readings are averaged. Readings are taken from both control and edematous limbs.

[1169] Volumetric Measurements: On the day of surgery, animals are anesthetized with Pentobarbital and are tested prior to surgery. For daily volumetrics animals are under brief halothane anesthetic (rapid immobilization and quick recovery), and both legs are shaved and equally marked using waterproof marker on legs. Legs are first dipped in water, then dipped into instrument to each marked level then measured by Buxco edema software (Chen/Victor). Data is recorded by one person, while the other is dipping the limb to marked area.

[1170] Blood-plasma protein measurements: Blood is drawn, spun, and serum separated prior to surgery and then at conclusion for total protein and Ca2⁺ comparison.

[1171] Limb Weight Comparison: After drawing blood, the animal is prepared for tissue collection. The limbs are amputated using a quillitine, then both experimental and control legs are cut at the ligature and weighed. A second weighing is done as the tibio-cacaneal joint is disarticulated and the foot is weighed.

[1172] Histological Preparations: The transverse muscle located behind the knee (popliteal) area is dissected and arranged in a metal mold, filled with freezeGel, dipped into cold methylbutane, placed into labeled sample bags at −80EC until sectioning. Upon sectioning, the muscle is observed under fluorescent microscopy for lymphatics.

[1173] The studies described in this example tested activity of agonists or antagonists of the invention. However, one skilled in the art could easily modify the exemplified studies to test the activity of polynucleotides or polypeptides of the invention (e.g., gene therapy).

### Example 29

### Suppression of TNF Alpha-Induced Adhesion Molecule Expression by an Agonist or Antagonist of the Invention

[1174] The recruitment of lymphocytes to areas of inflammation and angiogenesis involves specific receptor-ligand interactions between cell surface adhesion molecules (CAMs) on lymphocytes and the vascular endothelium. The adhesion process, in both normal and pathological settings, follows a multi-step cascade that involves intercellular adhesion molecule-1 (ICAM-1), vascular cell adhesion molecule-1 (VCAM-1), and endothelial leukocyte adhesion molecule-1 (E-selectin) expression on endothelial cells (EC). The expression of these molecules and others on the vascular endothelium determines the efficiency with which leukocytes may adhere to the local vasculature and extravasate into the local tissue during the development of an inflammatory response. The local concentration of cytokines and growth factor participate in the modulation of the expression of these CAMs.

[1175] Tumor necrosis factor alpha (TNF-a), a potent proinflammatory cytokine, is a stimulator of all three CAMs on endothelial cells and may be involved in a wide variety of inflammatory responses, often resulting in a pathological outcome.

[1176] The potential of an agonist or antagonist of the invention to mediate a suppression of TNF-a induced CAM expression can be examined. A modified ELISA assay which uses ECs as a solid phase absorbent is employed to measure the amount of CAM expression on TNF-a treated ECs when co-stimulated with a member of the FGF family of proteins.

[1177] To perform the experiment, human umbilical vein endothelial cell (HUVEC) cultures are obtained from pooled cord harvests and maintained in growth medium (EGM-2; Clonetics, San Diego, Calif.) supplemented with 10% FCS and 1% penicillin/streptomycin in a 37 degree C. humidified incubator containing 5% CO₂. HUVECs are seeded in 96-well plates at concentrations of 1×10⁴ cells/well in EGM medium at 37 degree C. for 18-24 hrs or until confluent. The monolayers are subsequently washed 3 times with a serum-free solution of RPMI-1640 supplemented with 100 U/ml penicillin and 100 mg/ml streptomycin, and treated with a given cytokine and/or growth factor(s) for 24 h at 37 degree C. Following incubation, the cells are then evaluated for CAM expression.

[1178] Human Umbilical Vein Endothelial cells (HUVECs) are grown in a standard 96 well plate to confluence. Growth medium is removed from the cells and replaced with 90 ul of 199 Medium (10% FBS). Samples for testing and positive or negative controls are added to the plate in triplicate (in 10 ul volumes). Plates are incubated at 37 degree C. for either 5 h (selectin and integrin expression) or 24 h (integrin expression only). Plates are aspirated to remove medium and 100 μl of 0.1% paraformaldehyde-PBS (with Ca++ and Mg++) is added to each well. Plates are held at 4° C. for 30 min.

[1179] Fixative is then removed from the wells and wells are washed 1× with PBS(+Ca,Mg)+0.5% BSA and drained. Do not allow the wells to dry. Add 10 μl of diluted primary antibody to the test and control wells. Anti-ICAM-1-Biotin, Anti-VCAM-1-Biotin and Anti-E-selectin-Biotin are used at a concentration of 10 μg/ml (1:10 dilution of 0.1 mg/ml stock antibody). Cells are incubated at 37° C. for 30 min. in a humidified environment. Wells are washed X3 with PBS(+Ca,Mg)+0.5% BSA.

[1180] Then add 20 μl of diluted ExtrAvidin-Alkaline Phosphotase (1:5,000 dilution) to each well and incubated at 37° C. for 30 min. Wells are washed X3 with PBS(+Ca,Mg)+0.5% BSA. 1 tablet of p-Nitrophenol Phosphate pNPP is dissolved in 5 ml of glycine buffer (pH 10.4). 100 μl of pNPP substrate in glycine buffer is added to each test well. Standard wells in triplicate are prepared from the working dilution of the ExtrAvidin-Alkaline Phosphotase in glycine buffer: 1:5,000 (10⁰)>10^{-0.5}>10⁻¹>10^{-1.5}. 5 μl of each dilution is added to triplicate wells and the resulting AP content in each well is 5.50 ng, 1.74 ng, 0.55 ng, 0.18 ng. 100 μl of pNNP reagent must then be added to each of the standard wells. The plate must be incubated at 37° C. for 4 h. A volume of 50 μl of 3M NaOH is added to all wells. The results are quantified on a plate reader at 405 nm. The background subtraction option is used on blank wells filled with glycine buffer only. The template is set up to indicate the concentration of AP-conjugate in each standard well [5.50 ng; 1.74 ng; 0.55 ng; 0.18 ng]. Results are indicated as amount of bound AP-conjugate in each sample.

[1181] The studies described in this example tested activity of agonists or antagonists of the invention. However, one skilled in the art could easily modify the exemplified studies to test the activity of polynucleotides or polypeptides of the invention (e.g., gene therapy).

### Example 30

### Production of Polypeptide of the Invention For High-Throughput Screening Assays

[1182] The following protocol produces a supernatant containing polypeptide of the present invention to be tested. This supernatant can then be used in the Screening Assays described in Examples 32-41.

[1183] First, dilute Poly-D-Lysine (644 587 Boehringer-Mannheim) stock solution (1 mg/ml in PBS) 1:20 in PBS (w/o calcium or magnesium 17-516F Biowhittaker) for a working solution of 50 ug/ml. Add 200 ul of this solution to each well (24 well plates) and incubate at RT for 20 minutes. Be sure to distribute the solution over each well (note: a 12-channel pipetter may be used with tips on every other channel). Aspirate off the Poly-D-Lysine solution and rinse with 1 ml PBS (Phosphate Buffered Saline). The PBS should remain in the well until just prior to plating the cells and plates may be poly-lysine coated in advance for up to two weeks.

[1184] Plate 293T cells (do not carry cells past P+20) at 2×10⁵ cells/well in 0.5 ml DMEM (Dulbecco's Modified Eagle Medium)(with 4.5 G/L glucose and L-glutamine (12-604F Biowhittaker))/10% heat inactivated FBS(14-503F Biowhittaker)/1× Penstrep(17-602E Biowhittaker). Let the cells grow overnight.

[1185] The next day, mix together in a sterile solution basin: 300 ul Lipofectamine (18324-012 Gibco/BRL) and 5 ml Optimem I (31985070 Gibco/BRL)/96-well plate. With a small volume multi-channel pipetter, aliquot approximately 2 ug of an expression vector containing a polynucleotide insert, produced by the methods described in Examples 8-10, into an appropriately labeled 96-well round bottom plate. With a multi-channel pipetter, add 50 ul of the Lipofectamine/Optimem I mixture to each well. Pipette up and down gently to mix. Incubate at RT 15-45 minutes. After about 20 minutes, use a multi-channel pipetter to add 150 ul Optimem I to each well. As a control, one plate of vector DNA lacking an insert should be transfected with each set of transfections.

[1186] Preferably, the transfection should be performed by tag-teaming the following tasks. By tag-teaming, hands on time is cut in half, and the cells do not spend too much time on PBS. First, person A aspirates off the media from four 24-well plates of cells, and then person B rinses each well with 0.5-1 ml PBS. Person A then aspirates off PBS rinse, and person B, using a12-channel pipetter with tips on every other channel, adds the 200 ul of DNA/Lipofectamine/Optimem I complex to the odd wells first, then to the even wells, to each row on the 24-well plates. Incubate at 37 degree C. for 6 hours.

[1187] While cells are incubating, prepare appropriate media, either 1% BSA in DMEM with 1× penstrep, or HGS CHO-5 media (116.6 mg/L of CaCl2 (anhyd); 0.00130 mg/L CuSO₄—5H₂O; 0.050 mg/L of Fe(NO₃)₃—9H₂O; 0.417 mg/L of FeSO₄—7H₂O; 311.80 mg/L of Kcl; 28.64 mg/L of MgCl₂; 48.84 mg/L of MgSO₄; 6995.50 mg/L of NaCl; 2400.0 mg/L of NaHCO₃; 62.50 mg/L of NaH₂PO₄—H₂O; 71.02 mg/L of Na₂HPO4; 0.4320 mg/L of ZnSO₄—7H₂O; 0.002 mg/L of Arachidonic Acid; 1.022 mg/L of Cholesterol; 0.070 mg/L of DL-alpha-Tocopherol-Acetate; 0.0520 mg/L of Linoleic Acid; 0.010 mg/L of Linolenic Acid; 0.010 mg/L of Myristic Acid; 0.010 mg/L of Oleic Acid; 0.010 mg/L of Palmitric Acid; 0.010 mg/L of Palmitic Acid; 100 mg/L of Pluronic F-68; 0.010 mg/L of Stearic Acid; 2.20 mg/L of Tween 80; 4551 mg/L of D-Glucose; 130.85 mg/ml of L-Alanine; 147.50 mg/ml of L-Arginine-HCL; 7.50 mg/ml of L-Asparagine-H₂0; 6.65 mg/ml of L-Aspartic Acid; 29.56 mg/ml of L-Cystine-2HCL-H₂0; 31.29 mg/ml of L-Cystine-2HCL; 7.35 mg/ml of L-Glutamic Acid; 365.0 mg/ml of L-Glutamine; 18.75 mg/ml of Glycine; 52.48 mg/ml of L-Histidine-HCL-H₂0; 106.97 mg/ml of L-Isoleucine; 111.45 mg/ml of L-Leucine; 163.75 mg/ml of L-Lysine HCL; 32.34 mg/ml of L-Methionine; 68.48 mg/ml of L-Phenylalainine; 40.0 mg/ml of L-Proline; 26.25 mg/ml of L-Serine; 101.05 mg/ml of L-Threonine; 19.22 mg/ml of L-Tryptophan; 91.79 mg/ml of L-Tryrosine-2Na-2H₂0; and 99.65 mg/ml of L-Valine; 0.0035 mg/L of Biotin; 3.24 mg/L of D-Ca Pantothenate; 11.78 mg/L of Choline Chloride; 4.65 mg/L of Folic Acid; 15.60 mg/L of i-Inositol; 3.02 mg/L of Niacinamide; 3.00 mg/L of Pyridoxal HCL; 0.031 mg/L of Pyridoxine HCL; 0.319 mg/L of Riboflavin; 3.17 mg/L of Thiamine HCL; 0.365 mg/L of Thymidine; 0.680 mg/L of Vitamin B₁₂; 25 mM of HEPES Buffer; 2.39 mg/L of Na Hypoxanthine; 0.105 mg/L of Lipoic Acid; 0.081 mg/L of Sodium Putrescine-2HCL; 55.0 mg/L of Sodium Pyruvate; 0.0067 mg/L of Sodium Selenite; 20 uM of Ethanolamine; 0.122 mg/L of Ferric Citrate; 41.70 mg/L of Methyl-B-Cyclodextrin complexed with Linoleic Acid; 33.33 mg/L of Methyl-B-Cyclodextrin complexed with Oleic Acid; 10 mg/L of Methyl-B-Cyclodextrin complexed with Retinal Acetate. Adjust osmolarity to 327 mOsm) with 2 mm glutamine and 1× penstrep. (BSA (81-068-3 Bayer) 100 gm dissolved in IL DMEM for a 10% BSA stock solution). Filter the media and collect 50 ul for endotoxin assay in 15 ml polystyrene conical.

[1188] The transfection reaction is terminated, preferably by tag-teaming, at the end of the incubation period. Person A aspirates off the transfection media, while person B adds 1.5 ml appropriate media to each well. Incubate at 37 degree C. for 45 or 72 hours depending on the media used: 1% BSA for 45 hours or CHO-5 for 72 hours.

[1189] On day four, using a 300 ul multichannel pipetter, aliquot 600 ul in one 1 ml deep well plate and the remaining supernatant into a 2 ml deep well. The supernatants from each well can then be used in the assays described in Examples 32-39.

[1190] It is specifically understood that when activity is obtained in any of the assays described below using a supernatant, the activity originates from either the polypeptide of the present invention directly (e.g., as a secreted protein) or by polypeptide of the present invention inducing expression of other proteins, which are then secreted into the supernatant. Thus, the invention further provides a method of identifying the protein in the supernatant characterized by an activity in a particular assay.

### Example 31

### Construction of GAS Reporter Construct

[1191] One signal transduction pathway involved in the differentiation and proliferation of cells is called the Jaks-STATs pathway. Activated proteins in the Jaks-STATs pathway bind to gamma activation site “GAS” elements or interferon-sensitive responsive element (“ISRE”), located in the promoter of many genes. The binding of a protein to these elements alter the expression of the associated gene.

[1192] GAS and ISRE elements are recognized by a class of transcription factors called Signal Transducers and Activators of Transcription, or “STATs.” There are six members of the STATs family. Stat1 and Stat3 are present in many cell types, as is Stat2 (as response to IFN-alpha is widespread). Stat4 is more restricted and is not in many cell types though it has been found in T helper class I, cells after treatment with L-12. Stat5 was originally called mammary growth factor, but has been found at higher concentrations in other cells including myeloid cells. It can be activated in tissue culture cells by many cytokines.

[1193] The STATs are activated to translocate from the cytoplasm to the nucleus upon tyrosine phosphorylation by a set of kinases known as the Janus Kinase (“Jaks”) family. Jaks represent a distinct family of soluble tyrosine kinases and include Tyk2, Jak1, Jak2, and Jak3. These kinases display significant sequence similarity and are generally catalytically inactive in resting cells.

[1194] The Jaks are activated by a wide range of receptors summarized in the Table below. (Adapted from review by Schidler and Darnell, Ann. Rev. Biochem. 64:621-51 (1995)). A cytokine receptor family, capable of activating Jaks, is divided into two groups: (a) Class 1 includes receptors for IL-2, IL-3, IL-4, IL-6, IL-7, IL-9, IL-11, IL-12, L-15, Epo, PRL, GH, G-CSF, GM-CSF, LIF, CNTF, and thrombopoietin; and (b) Class 2 includes IFN-a, IFN-g, and IL-10. The Class I receptors share a conserved cysteine motif (a set of four conserved cysteines and one tryptophan) and a WSXWS motif (a membrane proximal region encoding Trp-Ser-Xaa-Trp-Ser (SEQ ID NO: 2)).

[1195] Thus, on binding of a ligand to a receptor, Jaks are activated, which in turn activate STATs, which then translocate and bind to GAS elements. This entire process is encompassed in the Jaks-STATs signal transduction pathway. Therefore, activation of the Jaks-STATs pathway, reflected by the binding of the GAS or the ISRE element, can be used to indicate proteins involved in the proliferation and differentiation of cells. For example, growth factors and cytokines are known to activate the Jaks-STATs pathway (See Table below). Thus, by using GAS elements linked to reporter molecules, activators of the Jaks-STATs pathway can be identified.

| | JAKs | | | | | |
|---|---|---|---|---|---|---|
| Ligand | tyk2 | Jak1 | Jak2 | Jak3 | STATS | GAS(elements) or ISRE |
| IFN family | | | | | | |
| IFN-a/B | + | + | − | − | 1, 2, 3 | ISRE |
| IFN-g | | + | + | − | 1 | GAS (IRF1 > Lys6 > IFP) |
| Il-10 | + | ? | ? | − | 1, 3 | |
| gp130 family | | | | | | |
| IL-6 (Pleiotropic) | + | + | + | ? | 1, 3 | GAS (IRF1 > Lys6 > IFP) |
| Il-11(Pleiotropic) | ? | + | ? | ? | 1, 3 | |
| OnM(Pleiotropic) | ? | + | + | ? | 1, 3 | |
| LIF(Pleiotropic) | ? | + | + | ? | 1, 3 | |
| CNTF(Pleiotropic) | −/+ | + | + | ? | 1, 3 | |
| G-CSF(Pleiotropic) | ? | + | ? | ? | 1, 3 | |
| IL-12(Pleiotropic) | + | − | + | + | 1, 3 | |
| g-C family | | | | | | |
| IL-2 (lymphocytes) | − | + | − | + | 1, 3, 5 | GAS |
| IL-4 (lymph/myeloid) | − | + | − | + | 6 | GAS (IRF1 = IFP >> Ly6)(IgH) |
| IL-7 (lymphocytes) | − | + | − | + | 5 | GAS |
| IL-9 (lymphocytes) | − | + | − | + | 5 | GAS |
| IL-13 (lymphocyte) | − | + | ? | ? | 6 | GAS |
| IL-15 | ? | + | ? | + | 5 | GAS |
| gp140 family | | | | | | |
| IL-3 (myeloid) | − | − | + | − | 5 | GAS (IRF1 > IFP >> Ly6) |
| IL-5 (myeloid) | − | − | + | − | 5 | GAS |
| GM-CSF (myeloid) | − | − | + | − | 5 | GAS |
| Growth hormone family | | | | | | |
| GH | ? | − | + | − | 5 | |
| PRL | ? | +/− | + | − | 1, 3, 5 | |
| EPO | ? | − | + | − | 5 | GAS(B-CAS > IRF1 = IFP >> Ly6) |
| Receptor Tyrosine Kinases | | | | | | |
| EGF | ? | + | + | − | 1, 3 | GAS (IRF1) |
| PDGF | ? | + | + | − | 1, 3 | |
| CSF-1 | ? | + | + | − | 1, 3 | GAS (not IRF1) |

[1196] To construct a synthetic GAS containing promoter element, which is used in the Biological Assays described in Examples 32-33, a PCR based strategy is employed to generate a GAS-SV40 promoter sequence. The 5′ primer contains four tandem copies of the GAS binding site found in the IRF1 promoter and previously demonstrated to bind STATs upon induction with a range of cytokines (Rothman et al., Immunity 1:457-468 (1994).), although other GAS or ISRE elements can be used instead. The 5′ primer also contains 18 bp of sequence complementary to the SV40 early promoter sequence and is flanked with an XhoI site. The sequence of the 5′ primer is:

| | |
|---|---|
| 5′:GCGCCTCGAGATTTCCCCGAAATCTAGATTTCC | (SEQ ID NO: 3) |
| CCGAAATGATTTCCCCGAAATGATTTCCCCGAAATA | |
| TCTGCCATCTCAATTAG:3′ | |

[1197] The downstream primer is complementary to the SV40 promoter and is flanked with a Hind III site:

| | |
|---|---|
| 5′:GCGGCAAGCTTTTTGCAAAGCCTAGGC:3′ | (SEQ ID NO: 4) |

[1198] PCR amplification is performed using the SV40 promoter template present in the B-gal:promoter plasmid obtained from Clontech. The resulting PCR fragment is digested with XhoI/Hind III and subcloned into BLSK2−. (Stratagene.) Sequencing with forward and reverse primers confirms that the insert contains the following sequence:

| | |
|---|---|
| 5′:CTCGAGATTTCCCCGAAATCTAGATTTCCCCGA | (SEQ ID NO: 5) |
| AATGATTTCCCCGAAATGATTTCCCCGAAATATCTG | |
| CCATCTCAATTAGTCAGCAACCATAGTCCCGCCCCT | |
| AACTCCGCCCATCCCGCCCCTAACTCCGCCCAGTTC | |
| CGCCCATTCTCCGCCCCATGGCTGACTAATTTTTTT | |
| TATTTATGCAGAGGCCGAGGCCGCCTCGGCCTCTGA | |
| GCTATTCCAGAAGTAGTGAGGAGGCTTTTTTGGAGG | |
| CCTAGGCTTTTGCAAAAAGCTT:3′ | |

[1199] With this GAS promoter element linked to the SV40 promoter, a GAS:SEAP2 reporter construct is next engineered. Here, the reporter molecule is a secreted alkaline phosphatase, or “SEAP.” Clearly, however, any reporter molecule can be instead of SEAP, in this or in any of the other Examples. Well known reporter molecules that can be used instead of SEAP include chloramphenicol acetyltransferase (CAT), luciferase, alkaline phosphatase, B-galactosidase, green fluorescent protein (GFP), or any protein detectable by an antibody.

[1200] The above sequence confirmed synthetic GAS-SV40 promoter element is subcloned into the pSEAP-Promoter vector obtained from Clontech using HindIII and XhoI, effectively replacing the SV40 promoter with the amplified GAS:SV40 promoter element, to create the GAS-SEAP vector. However, this vector does not contain a neomycin resistance gene, and therefore, is not preferred for mammalian expression systems.

[1201] Thus, in order to generate mammalian stable cell lines expressing the GAS-SEAP reporter, the GAS-SEAP cassette is removed from the GAS-SEAP vector using SalI and NotI, and inserted into a backbone vector containing the neomycin resistance gene, such as pGFP-1 (Clontech), using these restriction sites in the multiple cloning site, to create the GAS-SEAP/Neo vector. Once this vector is transfected into mammalian cells, this vector can then be used as a reporter molecule for GAS binding as described in Examples 32-33.

[1202] Other constructs can be made using the above description and replacing GAS with a different promoter sequence. For example, construction of reporter molecules containing EGR and NF-KB promoter sequences are described in Examples 34 and 35. However, many other promoters can be substituted using the protocols described in these Examples. For instance, SRE, IL-2, NFAT, or Osteocalcin promoters can be substituted, alone or in combination (e.g., GAS/NF-KB/EGR, GAS/NF-KB, Il-2/NFAT, or NF-KB/GAS). Similarly, other cell lines can be used to test reporter construct activity, such as HELA (epithelial), HUVEC (endothelial), Reh (B-cell), Saos-2 (osteoblast), HUVAC (aortic), or Cardiomyocyte.

### Example 32

### High-Throughput Screening Assay for T-cell Activity

[1203] The following protocol is used to assess T-cell activity by identifying factors, and determining whether supernate containing a polypeptide of the invention proliferates and/or differentiates T-cells. T-cell activity is assessed using the GAS/SEAP/Neo construct produced in Example 31. Thus, factors that increase SEAP activity indicate the ability to activate the Jaks-STATS signal transduction pathway. The T-cell used in this assay is Jurkat T-cells (ATCC Accession No. TIB-152), although Molt-3 cells (ATCC Accession No. CRL-1552) and Molt-4 cells (ATCC Accession No. CRL-1582) cells can also be used.

[1204] Jurkat T-cells are lymphoblastic CD4+Th1 helper cells. In order to generate stable cell lines, approximately 2 million Jurkat cells are transfected with the GAS-SEAP/neo vector using DMRIE-C (Life Technologies)(transfection procedure described below). The transfected cells are seeded to a density of approximately 20,000 cells per well and transfectants resistant to 1 mg/ml genticin selected. Resistant colonies are expanded and then tested for their response to increasing concentrations of interferon gamma. The dose response of a selected clone is demonstrated.

[1205] Specifically, the following protocol will yield sufficient cells for 75 wells containing 200 ul of cells. Thus, it is either scaled up, or performed in multiple to generate sufficient cells for multiple 96 well plates. Jurkat cells are maintained in RPMI+10% serum with 1% Pen-Strep. Combine 2.5 mls of OPTI-MEM (Life Technologies) with 10 ug of plasmid DNA in a T25 flask. Add 2.5 ml OPTI-MEM containing 50 ul of DMRIE-C and incubate at room temperature for 15-45 mins.

[1206] During the incubation period, count cell concentration, spin down the required number of cells (10⁷ per transfection), and resuspend in OPTI-MEM to a final concentration of 10⁷ cells/ml. Then add 1 ml of 1×10⁷ cells in OPTI-MEM to T25 flask and incubate at 37 degree C. for 6 hrs. After the incubation, add 10 ml of RPMI+15% serum.

[1207] The Jurkat:GAS-SEAP stable reporter lines are maintained in RPMI+10% serum, 1 mg/ml Genticin, and 1% Pen-Strep. These cells are treated with supernatants containing polypeptide of the present invention or polypeptide of the present invention induced polypeptides as produced by the protocol described in Example 30.

[1208] On the day of treatment with the supernatant, the cells should be washed and resuspended in fresh RPMI+10% serum to a density of 500,000 cells per ml. The exact number of cells required will depend on the number of supernatants being screened. For one 96 well plate, approximately 10 million cells (for 10 plates, 100 million cells) are required.

[1209] Transfer the cells to a triangular reservoir boat, in order to dispense the cells into a 96 well dish, using a 12 channel pipette. Using a 12 channel pipette, transfer 200 ul of cells into each well (therefore adding 100,000 cells per well).

[1210] After all the plates have been seeded, 50 ul of the supernatants are transferred directly from the 96 well plate containing the supernatants into each well using a 12 channel pipette. In addition, a dose of exogenous interferon gamma (0.1, 1.0, 10 ng) is added to wells H9, H10, and H11 to serve as additional positive controls for the assay.

[1211] The 96 well dishes containing Jurkat cells treated with supernatants are placed in an incubator for 48 hrs (note: this time is variable between 48-72 hrs). 35 ul samples from each well are then transferred to an opaque 96 well plate using a 12 channel pipette. The opaque plates should be covered (using sellophene covers) and stored at −20 degree C. until SEAP assays are performed according to Example 36. The plates containing the remaining treated cells are placed at 4 degree C. and serve as a source of material for repeating the assay on a specific well if desired.

[1212] As a positive control, 100 Unit/ml interferon gamma can be used which is known to activate Jurkat T cells. Over 30 fold induction is typically observed in the positive control wells.

[1213] The above protocol may be used in the generation of both transient, as well as, stable transfected cells, which would be apparent to those of skill in the art.

### Example 33

### High-Throughput Screening Assay Identifying Myeloid Activity

[1214] The following protocol is used to assess myeloid activity of polypeptide of the present invention by determining whether polypeptide of the present invention proliferates and/or differentiates myeloid cells. Myeloid cell activity is assessed using the GAS/SEAP/Neo construct produced in Example 31. Thus, factors that increase SEAP activity indicate the ability to activate the Jaks-STATS signal transduction pathway. The myeloid cell used in this assay is U937, a pre-monocyte cell line, although TF-1, HL60, or KG1 can be used.

[1215] To transiently transfect U937 cells with the GAS/SEAP/Neo construct produced in Example 31, a DEAE-Dextran method (Kharbanda et. al., 1994, Cell Growth & Differentiation, 5:259-265) is used. First, harvest 2×10⁷ U937 cells and wash with PBS. The U937 cells are usually grown in RPMI 1640 medium containing 10% heat-inactivated fetal bovine serum (FBS) supplemented with 100 units/ml penicillin and 100 mg/ml streptomycin.

[1216] Next, suspend the cells in 1 ml of 20 mM Tris-HCl (pH 7.4) buffer containing 0.5 mg/ml DEAE-Dextran, 8 ug GAS-SEAP2 plasmid DNA, 140 mM NaCl, 5 mM KCl, 375 uM Na₂HPO₄.7H₂O, 1 mM MgCl₂, and 675 uM CaCl₂. Incubate at 37 degrees C. for 45 min.

[1217] Wash the cells with RPMI 1640 medium containing 10% FBS and then resuspend in 10 ml complete medium and incubate at 37 degree C. for 36 hr.

[1218] The GAS-SEAP/U937 stable cells are obtained by growing the cells in 400 ug/ml G418. The G418-free medium is used for routine growth but every one to two months, the cells should be re-grown in 400 ug/ml G418 for couple of passages.

[1219] These cells are tested by harvesting 1×10⁸ cells (this is enough for ten 96-well plates assay) and wash with PBS. Suspend the cells in 200 ml above described growth medium, with a final density of 5×10⁵ cells/ml. Plate 200 ul cells per well in the 96-well plate (or 1×10⁵ cells/well).

[1220] Add 50 ul of the supernatant prepared by the protocol described in Example 30. Incubate at 37 degee C for 48 to 72 hr. As a positive control, 100 Unit/ml interferon gamma can be used which is known to activate U937 cells. Over 30 fold induction is typically observed in the positive control wells. SEAP assay the supernatant according to the protocol described in Example 36.

### Example 34

### High-Throughput Screening Assay Identifying Neuronal Activity

[1221] When cells undergo differentiation and proliferation, a group of genes are activated through many different signal transduction pathways. One of these genes, EGR1 (early growth response gene 1), is induced in various tissues and cell types upon activation. The promoter of EGR1 is responsible for such induction. Using the EGR1 promoter linked to reporter molecules, activation of cells can be assessed by polypeptide of the present invention.

[1222] Particularly, the following protocol is used to assess neuronal activity in PC12 cell lines. PC12 cells (rat phenochromocytoma cells) are known to proliferate and/or differentiate by activation with a number of mitogens, such as TPA (tetradecanoyl phorbol acetate), NGF (nerve growth factor), and EGF (epidermal growth factor). The EGR1 gene expression is activated during this treatment. Thus, by stably transfecting PC12 cells with a construct containing an EGR promoter linked to SEAP reporter, activation of PC12 cells by polypeptide of the present invention can be assessed.

[1223] The EGR/SEAP reporter construct can be assembled by the following protocol. The EGR-1 promoter sequence (−633 to +1)(Sakamoto K et al., Oncogene 6:867-871 (1991)) can be PCR amplified from human genomic DNA using the following primers:

(SEQ ID NO: 6)

5′ GCGCTCGAGGGATGACAGCGATAGAACCCCGG-3′

(SEQ ID NO: 7)

5′ GCGAAGCTTCGCGACTCCCCGGATCCGCCTC-3′

[1224] Using the GAS:SEAP/Neo vector produced in Example 31, EGR1 amplified product can then be inserted into this vector. Linearize the GAS:SEAP/Neo vector using restriction enzymes XhoI/HindIII, removing the GAS/SV40 stuffer. Restrict the EGR1 amplified product with these same enzymes. Ligate the vector and the EGR1 promoter.

[1225] To prepare 96 well-plates for cell culture, two mls of a coating solution (1:30 dilution of collagen type I (Upstate Biotech Inc. Cat#08-115) in 30% ethanol (filter sterilized)) is added per one 10 cm plate or 50 ml per well of the 96-well plate, and allowed to air dry for 2 hr.

[1226] PC12 cells are routinely grown in RPMI-1640 medium (Bio Whittaker) containing 10% horse serum (JRH BIOSCENCES, Cat. # 12449-78P), 5% heat-inactivated fetal bovine serum (FBS) supplemented with 100 units/ml penicillin and 100 ug/ml streptomycin on a precoated 10 cm tissue culture dish. One to four split is done every three to four days. Cells are removed from the plates by scraping and resuspended with pipetting up and down for more than 15 times.

[1227] Transfect the EGR/SEAP/Neo construct into PC12 using the Lipofectamine protocol described in Example 30. EGR-SEAP/PC12 stable cells are obtained by growing the cells in 300 ug/ml G418. The G418-free medium is used for routine growth but every one to two months, the cells should be re-grown in 300 ug/ml G418 for couple of passages.

[1228] To assay for neuronal activity, a 10 cm plate with cells around 70 to 80% confluent is screened by removing the old medium. Wash the cells once with PBS (Phosphate buffered saline). Then starve the cells in low serum medium (RPMI-1640 containing 1% horse serum and 0.5% FBS with antibiotics) overnight.

[1229] The next morning, remove the medium and wash the cells with PBS. Scrape off the cells from the plate, suspend the cells well in 2 ml low serum medium. Count the cell number and add more low serum medium to reach final cell density as 5×10⁵ cells/ml.

[1230] Add 200 ul of the cell suspension to each well of 96-well plate (equivalent to 1×10⁵ cells/well). Add 50 ul supernatant produced by Example 30, 37 degree C. for 48 to 72 hr. As a positive control, a growth factor known to activate PC12 cells through EGR can be used, such as 50 ng/ul of Neuronal Growth Factor (NGF). Over fifty-fold induction of SEAP is typically seen in the positive control wells. SEAP assay the supernatant according to Example 36.

### Example 35

### High-Throughput Screening Assay for T-cell Activity

[1231] NF-KB (Nuclear Factor KB) is a transcription factor activated by a wide variety of agents including the inflammatory cytokines IL-1 and TNF, CD30 and CD40, lymphotoxin-alpha and lymphotoxin-beta, by exposure to LPS or thrombin, and by expression of certain viral gene products. As a transcription factor, NF-KB regulates the expression of genes involved in immune cell activation, control of apoptosis (NF-KB appears to shield cells from apoptosis), B and T-cell development, anti-viral and antimicrobial responses, and multiple stress responses.

[1232] In non-stimulated conditions, NF-KB is retained in the cytoplasm with I-KB (Inhibitor KB). However, upon stimulation, I-KB is phosphorylated and degraded, causing NF-KB to shuttle to the nucleus, thereby activating transcription of target genes. Target genes activated by NF-KB include IL-2, IL-6, GM-CSF, ICAM-1 and class I MHC.

[1233] Due to its central role and ability to respond to a range of stimuli, reporter constructs utilizing the NF-KB promoter element are used to screen the supernatants produced in Example 30. Activators or inhibitors of NF-KB would be useful in detecting, preventing, diagnosing, prognosticating, treating, and/or ameliorating diseases. For example, inhibitors of NF-KB could be used to treat those diseases related to the acute or chronic activation of NF-KB, such as rheumatoid arthritis.

[1234] To construct a vector containing the NF-KB promoter element, a PCR based strategy is employed. The upstream primer contains four tandem copies of the NF-KB binding site (GGGGACTTTCCC) (SEQ ID NO: 8), 18 bp of sequence complementary to the 5′ end of the SV40 early promoter sequence, and is flanked with an XhoI site:

| | |
|---|---|
| 5′:GCGGCCTCGAGGGGACTTTCCCGGGGACTTTCC | (SEQ ID NO: 9) |
| GGGGACTTTCCGGGACTTTCCATCCTGCCATCTCAA | |
| TTAG:3′ | |

[1235] The downstream primer is complementary to the 3′ end of the SV40 promoter and is flanked with a Hind III site:

| | |
|---|---|
| 5′:GCGGCAAGCTTTTTGCAAAGCCTAGGC:3′ | (SEQ ID NO: 4) |

[1236] PCR amplification is performed using the SV40 promoter template present in the pB-gal:promoter plasmid obtained from Clontech. The resulting PCR fragment is digested with XhoI and Hind III and subcloned into BLSK2−. (Stratagene) Sequencing with the T7 and T3 primers confirms the insert contains the following sequence:

| | |
|---|---|
| 5′:CTCGAGGGGACTTTCCCGGGGACTTTCCGGG | (SEQ ID NO: 10) |
| GACTTTCCGGGACTTTCCATCTGCCATCTCAATT | |
| AGTCAGCAACCATAGTCCCGCCCCTAACTCCGCC | |
| CATCCCGCCCCTAACTCCGCCCAGTTCCGCCCAT | |
| TCTCCGCCCCATGGCTGACTAATTTTTTTTATTT | |
| ATGCAGAGGCCGAGGCCGCCTCGGCCTCTGAGCT | |
| ATTCCAGAAGTAGTGAGGAGGCTTTTTTGGAGGC | |
| CTAGGCTTTTGCAAAAAGCTT:3′ | |

[1237] Next, replace the SV40 minimal promoter element present in the pSEAP2-promoter plasmid (Clontech) with this NF-KB/SV40 fragment using XhoI and HindIII. However, this vector does not contain a neomycin resistance gene, and therefore, is not preferred for mammalian expression systems.

[1238] In order to generate stable mammalian cell lines, the NF-KB/SV40/SEAP cassette is removed from the above NF-KB/SEAP vector using restriction enzymes SalI and NotI, and inserted into a vector containing neomycin resistance. Particularly, the NF-KB/SV40/SEAP cassette was inserted into pGFP-1 (Clontech), replacing the GFP gene, after restricting pGFP-1 with SalI and NotI.

[1239] Once NF-KB/SV40/SEAP/Neo vector is created, stable Jurkat T-cells are created and maintained according to the protocol described in Example 32. Similarly, the method for assaying supernatants with these stable Jurkat T-cells is also described in Example 32. As a positive control, exogenous TNF alpha (0.1, 1, 10 ng) is added to wells H9, H10, and H11, with a 5-10 fold activation typically observed.

### Example 36

### Assay for SEAP Activity

[1240] As a reporter molecule for the assays described in Examples 32-35, SEAP activity is assayed using the Tropix Phospho-light Kit (Cat. BP-400) according to the following general procedure. The Tropix Phospho-light Kit supplies the Dilution, Assay, and Reaction Buffers used below.

[1241] Prime a dispenser with the 2.5× Dilution Buffer and dispense 15 ul of 2.5× dilution buffer into Optiplates containing 35 ul of a supernatant. Seal the plates with a plastic sealer and incubate at 65 degree C. for 30 min. Separate the Optiplates to avoid uneven heating.

[1242] Cool the samples to room temperature for 15 minutes. Empty the dispenser and prime with the Assay Buffer. Add 50 ml Assay Buffer and incubate at room temperature 5 min. Empty the dispenser and prime with the Reaction Buffer (see the Table below). Add 50 ul Reaction Buffer and incubate at room temperature for 20 minutes. Since the intensity of the chemiluminescent signal is time dependent, and it takes about 10 minutes to read 5 plates on a luminometer, thus one should treat 5 plates at each time and start the second set 10 minutes later.

[1243] Read the relative light unit in the luminometer. Set H12 as blank, and print the results. An increase in chemiluminescence indicates reporter activity.

Reaction Buffer Formulation:

| # of plates | Rxn buffer diluent (ml) | CSPD (ml) |
|---|---|---|
| 10 | 60 | 3 |
| 11 | 65 | 3.25 |
| 12 | 70 | 3.5 |
| 13 | 75 | 3.75 |
| 14 | 80 | 4 |
| 15 | 85 | 4.25 |
| 16 | 90 | 4.5 |
| 17 | 95 | 4.75 |
| 18 | 100 | 5 |
| 19 | 105 | 5.25 |
| 20 | 110 | 5.5 |
| 21 | 115 | 5.75 |
| 22 | 120 | 6 |
| 23 | 125 | 6.25 |
| 24 | 130 | 6.5 |
| 25 | 135 | 6.75 |
| 26 | 140 | 7 |
| 27 | 145 | 7.25 |
| 28 | 150 | 7.5 |
| 29 | 155 | 7.75 |
| 30 | 160 | 8 |
| 31 | 165 | 8.25 |
| 32 | 170 | 8.5 |
| 33 | 175 | 8.75 |
| 34 | 180 | 9 |
| 35 | 185 | 9.25 |
| 36 | 190 | 9.5 |
| 37 | 195 | 9.75 |
| 38 | 200 | 10 |
| 39 | 205 | 10.25 |
| 40 | 210 | 10.5 |
| 41 | 215 | 10.75 |
| 42 | 220 | 11 |
| 43 | 225 | 11.25 |
| 44 | 230 | 11.5 |
| 45 | 235 | 11.75 |
| 46 | 240 | 12 |
| 47 | 245 | 12.25 |
| 48 | 250 | 12.5 |
| 49 | 255 | 12.75 |
| 50 | 260 | 13 |

### Example 37

### High-Throughput Screening Assay Identifying Changes in Small Molecule Concentration and Membrane Permeability

[1244] Binding of a ligand to a receptor is known to alter intracellular levels of small molecules, such as calcium, potassium, sodium, and pH, as well as alter membrane potential. These alterations can be measured in an assay to identify supernatants which bind to receptors of a particular cell. Although the following protocol describes an assay for calcium, this protocol can easily by modified to detect changes in potassium, sodium, pH, membrane potential, or any other small molecule which is detectable by a fluorescent probe.

[1245] The following assay uses Fluorometric Imaging Plate Reader (“FLIPR”) to measure changes in fluorescent molecules (Molecular Probes) that bind small molecules. Clearly, any fluorescent molecule detecting a small molecule can be used instead of the calcium fluorescent molecule, fluo-4 (Molecular Probes, Inc.; catalog no. F-14202), used here.

[1246] For adherent cells, seed the cells at 10,000 cells/well in a Co-star black 96-well plate with clear bottom. The plate is incubated in a CO₂ incubator for 20 hours. The adherent cells are washed two times in Biotek washer with 200 ul of HBSS (Hank's Balanced Salt Solution) leaving 100 ul of buffer after the final wash.

[1247] A stock solution of 1 mg/ml fluo-4 is made in 10% pluronic acid DMSO. To load the cells with fluo-4, 50 ul of 12 ug/ml fluo-4 is added to each well. The plate is incubated at 37 degrees C. in a CO₂ incubator for 60 min. The plate is washed four times in the Biotek washer with HBSS leaving 100 ul of buffer.

[1248] For non-adherent cells, the cells are spun down from culture media. Cells are re-suspended to 2-5×10⁶ cells/ml with HBSS in a 50-ml conical tube. 4 ul of 1 mg/ml fluo-4 solution in 10% pluronic acid DMSO is added to each ml of cell suspension. The tube is then placed in a 37 degrees C. water bath for 30-60 min. The cells are washed twice with HBSS, resuspended to 1×10⁶ cells/ml, and dispensed into a microplate, 100 ul/well. The plate is centrifuged at 1000 rpm for 5 min. The plate is then washed once in Denley Cell Wash with 200 ul, followed by an aspiration step to 100 ul final volume.

[1249] For a non-cell based assay, each well contains a fluorescent molecule, such as fluo-4. The supernatant is added to the well, and a change in fluorescence is detected.

[1250] To measure the fluorescence of intracellular calcium, the FLIPR is set for the following parameters: (1) System gain is 300-800 mW; (2) Exposure time is 0.4 second; (3) Camera F/stop is F/2; (4) Excitation is 488 nm; (5) Emission is 530 nm; and (6) Sample addition is 50 ul. Increased emission at 530 nm indicates an extracellular signaling event caused by the a molecule, either polypeptide of the present invention or a molecule induced by polypeptide of the present invention, which has resulted in an increase in the intracellular Ca++concentration.

### Example 38

### High-Throughput Screening Assay Identifying Tyrosine Kinase Activity

[1251] The Protein Tyrosine Kinases (PTK) represent a diverse group of transmembrane and cytoplasmic kinases. Within the Receptor Protein Tyrosine Kinase RPTK) group are receptors for a range of mitogenic and metabolic growth factors including the PDGF, FGF, EGF, NGF, HGF and Insulin receptor subfamilies. In addition there are a large family of RPTKs for which the corresponding ligand is unknown. Ligands for RPTKs include mainly secreted small proteins, but also membrane-bound and extracellular matrix proteins.

[1252] Activation of RPTK by ligands involves ligand-mediated receptor dimerization, resulting in transphosphorylation of the receptor subunits and activation of the cytoplasmic tyrosine kinases. The cytoplasmic tyrosine kinases include receptor associated tyrosine kinases of the src-family (e.g., src, yes, lck, lyn, fyn) and non-receptor linked and cytosolic protein tyrosine kinases, such as the Jak family, members of which mediate signal transduction triggered by the cytokine superfamily of receptors (e.g., the Interleukins, Interferons, GM-CSF, and Leptin).

[1253] Because of the wide range of known factors capable of stimulating tyrosine kinase activity, identifying whether polypeptide of the present invention or a molecule induced by polypeptide of the present invention is capable of activating tyrosine kinase signal transduction pathways is of interest. Therefore, the following protocol is designed to identify such molecules capable of activating the tyrosine kinase signal transduction pathways.

[1254] Seed target cells (e.g., primary keratinocytes) at a density of approximately 25,000 cells per well in a 96 well Loprodyne Silent Screen Plates purchased from Nalge Nunc (Naperville, Ill.). The plates are sterilized with two 30 minute rinses with 100% ethanol, rinsed with water and dried overnight. Some plates are coated for 2 hr with 100 ml of cell culture grade type I collagen (50 mg/ml), gelatin (2%) or polylysine (50 mg/ml), all of which can be purchased from Sigma Chemicals (St. Louis, Mo.) or 10% Matrigel purchased from Becton Dickinson (Bedford, Mass.), or calf serum, rinsed with PBS and stored at 4 degree C. Cell growth on these plates is assayed by seeding 5,000 cells/well in growth medium and indirect quantitation of cell number through use of alamarBlue as described by the manufacturer Alamar Biosciences, Inc. (Sacramento, Calif.) after 48 hr. Falcon plate covers #3071 from Becton Dickinson (Bedford, Mass.) are used to cover the Loprodyne Silent Screen Plates. Falcon Microtest III cell culture plates can also be used in some proliferation experiments.

[1255] To prepare extracts, A431 cells are seeded onto the nylon membranes of Loprodyne plates (20,000/200 ml/well) and cultured overnight in complete medium. Cells are quiesced by incubation in serum-free basal medium for 24 hr. After 5-20 minutes treatment with EGF (60 ng/ml) or 50 ul of the supernatant produced in Example 30, the medium was removed and 100 ml of extraction buffer ((20 mM HEPES pH 7.5, 0.15 M NaCl, 1% Triton X-100, 0.1% SDS, 2 mM Na3VO4, 2 mM Na4P207 and a cocktail of protease inhibitors (# 1836170) obtained from Boeheringer Mannheim (Indianapolis, Ind.)) is added to each well and the plate is shaken on a rotating shaker for 5 minutes at 4° C. The plate is then placed in a vacuum transfer manifold and the extract filtered through the 0.45 mm membrane bottoms of each well using house vacuum. Extracts are collected in a 96-well catch/assay plate in the bottom of the vacuum manifold and immediately placed on ice. To obtain extracts clarified by centrifugation, the content of each well, after detergent solubilization for 5 minutes, is removed and centrifuged for 15 minutes at 4 degree Cat 16,000×g.

[1256] Test the filtered extracts for levels of tyrosine kinase activity. Although many methods of detecting tyrosine kinase activity are known, one method is described here.

[1257] Generally, the tyrosine kinase activity of a supernatant is evaluated by determining its ability to phosphorylate a tyrosine residue on a specific substrate (a biotinylated peptide). Biotinylated peptides that can be used for this purpose include PSK1 (corresponding to amino acids 6-20 of the cell division kinase cdc2-p34) and PSK2 (corresponding to amino acids 1-17 of gastrin). Both peptides are substrates for a range of tyrosine kinases and are available from Boehringer Mannheim.

[1258] The tyrosine kinase reaction is set up by adding the following components in order. First, add 10 ul of 5 uM Biotinylated Peptide, then 10 ul ATP/Mg₂₊ (5 mM ATP/50 mM MgCl₂), then 10 ul of 5× Assay Buffer (40 mM imidazole hydrochloride, pH7.3, 40 mM beta-glycerophosphate, 1 mM EGTA, 100 mM MgCl₂, 5 mM MnCl₂, 0.5 mg/ml BSA), then 5 ul of Sodium Vanadate (1 mM), and then 5 ul of water. Mix the components gently and preincubate the reaction mix at 30 degree C. for 2 min. Initial the reaction by adding 10 ul of the control enzyme or the filtered supernatant.

[1259] The tyrosine kinase assay reaction is then terminated by adding 10 ul of 120 mm EDTA and place the reactions on ice.

[1260] Tyrosine kinase activity is determined by transferring 50 ul aliquot of reaction mixture to a microtiter plate (MTP) module and incubating at 37 degree C. for 20 min. This allows the streptavidin coated 96 well plate to associate with the biotinylated peptide. Wash the MTP module with 300 ul/well of PBS four times. Next add 75 ul of anti-phospotyrosine antibody conjugated to horse radish peroxidase (anti-P-Tyr-POD(0.5 u/ml)) to each well and incubate at 37 degree C. for one hour. Wash the well as above.

[1261] Next add 100 ul of peroxidase substrate solution (Boehringer Mannheim) and incubate at room temperature for at least 5 mins (up to 30 min). Measure the absorbance of the sample at 405 nm by using ELISA reader. The level of bound peroxidase activity is quantitated using an ELISA reader and reflects the level of tyrosine kinase activity.

### Example 39

### High-Throughput Screening Assay Identifying Phosphorylation Activity

[1262] As a potential alternative and/or complement to the assay of protein tyrosine kinase activity described in Example 38, an assay which detects activation (phosphorylation) of major intracellular signal transduction intermediates can also be used. For example, as described below one particular assay can detect tyrosine phosphorylation of the Erk-1 and Erk-2 kinases. However, phosphorylation of other molecules, such as Raf, JNK, p38 MAP, Map kinase kinase (MEK), MEK kinase, Src, Muscle specific kinase (MuSK), IRAK, Tec, and Janus, as well as any other phosphoserine, phosphotyrosine, or phosphothreonine molecule, can be detected by substituting these molecules for Erk-1 or Erk-2 in the following assay.

[1263] Specifically, assay plates are made by coating the wells of a 96-well ELISA plate with 0.1 ml of protein G (1 ug/ml) for 2 hr at room temp, (RT). The plates are then rinsed with PBS and blocked with 3% BSA/PBS for 1 hr at RT. The protein G plates are then treated with 2 commercial monoclonal antibodies (100 ng/well) against Erk-1 and Erk-2 (1 hr at RT) (Santa Cruz Biotechnology). (To detect other molecules, this step can easily be modified by substituting a monoclonal antibody detecting any of the above described molecules.) After 3-5 rinses with PBS, the plates are stored at 4 degree C. until use.

[1264] A431 cells are seeded at 20,000/well in a 96-well Loprodyne filterplate and cultured overnight in growth medium. The cells are then starved for 48 hr in basal medium (DMEM) and then treated with EGF (6 ng/well) or 50 ul of the supernatants obtained in Example 30 for 5-20 minutes. The cells are then solubilized and extracts filtered directly into the assay plate.

[1265] After incubation with the extract for 1 hr at RT, the wells are again rinsed. As a positive control, a commercial preparation of MAP kinase (10 ng/well) is used in place of A431 extract. Plates are then treated with a commercial polyclonal (rabbit) antibody (1 ug/ml) which specifically recognizes the phosphorylated epitope of the Erk-1 and Erk-2 kinases (1 hr at RT). This antibody is biotinylated by standard procedures. The bound polyclonal antibody is then quantitated by successive incubations with Europium-streptavidin and Europium fluorescence enhancing reagent in the Wallac DELFIA instrument (time-resolved fluorescence). An increased fluorescent signal over background indicates a phosphorylation by polypeptide of the present invention or a molecule induced by polypeptide of the present invention.

### Example 40

### Assay for the Stimulation of Bone Marrow CD34+ Cell Proliferation

[1266] This assay is based on the ability of human CD34+ to proliferate in the presence of hematopoietic growth factors and evaluates the ability of isolated polypeptides expressed in mammalian cells to stimulate proliferation of CD34+ cells.

[1267] It has been previously shown that most mature precursors will respond to only a single signal. More immature precursors require at least two signals to respond. Therefore, to test the effect of polypeptides on hematopoietic activity of a wide range of progenitor cells, the assay contains a given polypeptide in the presence or absence of other hematopoietic growth factors. Isolated cells are cultured for 5 days in the presence of Stem Cell Factor (SCF) in combination with tested sample. SCF alone has a very limited effect on the proliferation of bone marrow (BM) cells, acting in such conditions only as a “survival” factor. However, combined with any factor exhibiting stimulatory effect on these cells (e.g., IL-3), SCF will cause a synergistic effect. Therefore, if the tested polypeptide has a stimulatory effect on hematopoietic progenitors, such activity can be easily detected. Since normal BM cells have a low level of cycling cells, it is likely that any inhibitory effect of a given polypeptide, or agonists or antagonists thereof, might not be detected. Accordingly, assays for an inhibitory effect on progenitors is preferably tested in cells that are first subjected to in vitro stimulation with SCF+IL+3, and then contacted with the compound that is being evaluated for inhibition of such induced proliferation.

[1268] Briefly, CD34+ cells are isolated using methods known in the art. The cells are thawed and resuspended in medium (QBSF 60 serum-free medium with 1% L-glutamine (500 ml) Quality Biological, Inc., Gaithersburg, Md. Cat# 160-204-101). After several gentle centrifugation steps at 200×g, cells are allowed to rest for one hour. The cell count is adjusted to 2.5×10⁵ cells/ml. During this time, 100 μl of sterile water is added to the peripheral wells of a 96-well plate. The cytokines that can be tested with a given polypeptide in this assay is rhSCF (R&D Systems, Minneapolis, Minn., Cat# 255-SC) at 50 ng/ml alone and in combination with rhSCF and rhIL-3 (R&D Systems, Minneapolis, Minn., Cat# 203-ML) at 30 ng/ml. After one hour, 10 μl of prepared cytokines, 50 ul of the supernatants prepared in Example 30 (supernatants at 1:2 dilution=50 μl) and 20 μl of diluted cells are added to the media which is already present in the wells to allow for a final total volume of 100 μl. The plates are then placed in a 37° C./5% CO₂ incubator for five days.

[1269] Eighteen hours before the assay is harvested, 0.5 μCi/well of [3H] Thymidine is added in a 10 μl volume to each well to determine the proliferation rate. The experiment is terminated by harvesting the cells from each 96-well plate to a filtermat using the Tomtec Harvester 96. After harvesting, the filtermats are dried, trimmed and placed into OmniFilter assemblies consisting of one OmniFilter plate and one OmniFilter Tray. 60 μl Microscint is added to each well and the plate sealed with TopSeal-A press-on sealing film A bar code 15 sticker is affixed to the first plate for counting. The sealed plates are then loaded and the level of radioactivity determined via the Packard Top Count and the printed data collected for analysis. The level of radioactivity reflects the amount of cell proliferation.

[1270] The studies described in this example test the activity of a given polypeptide to stimulate bone marrow CD34+ cell proliferation. One skilled in the art could easily modify the exemplified studies to test the activity of polynucleotides (e.g., gene therapy), antibodies, agonists, and/or antagonists and fragments and variants thereof. As a nonlimiting example, potential antagonists tested in this assay would be expected to inhibit cell proliferation in the presence of cytokines and/or to increase the inhibition of cell proliferation in the presence of cytokines and a given polypeptide. In contrast, potential agonists tested in this assay would be expected to enhance cell proliferation and/or to decrease the inhibition of cell proliferation in the presence of cytokines and a given polypeptide.

[1271] The ability of a gene to stimulate the proliferation of bone marrow CD34+ cells indicates that polynucleotides and polypeptides corresponding to the gene are useful for the detection, prevention, diagnosis, prognostication, treatment, and/or amelioration of disorders affecting the immune system and hematopoiesis. Representative uses are described in the “Immune Activity” and “Infectious Disease” sections above, and elsewhere herein.

### Example 41

### Assay for Extracellular Matrix Enhanced Cell Response (EMECR)

[1272] The objective of the Extracellular Matrix Enhanced Cell Response (EMECR) assay is to identify gene products (e.g., isolated polypeptides) that act on the hematopoietic stem cells in the context of the extracellular matrix (ECM) induced signal.

[1273] Cells respond to the regulatory factors in the context of signal(s) received from the surrounding microenvironment. For example, fibroblasts, and endothelial and epithelial stem cells fail to replicate in the absence of signals from the ECM. Hematopoietic stem cells can undergo self-renewal in the bone marrow, but not in in vitro suspension culture. The ability of stem cells to undergo self-renewal in vitro is dependent upon their interaction with the stromal cells and the ECM protein fibronectin (fn). Adhesion of cells to fn is mediated by the α₅.β₁ and α₄.β₁ integrin receptors, which are expressed by human and mouse hematopoietic stem cells. The factor(s) which integrate with the ECM environment and are responsible for stimulating stem cell self-renewal havea not yet been identified. Discovery of such factors should be of great interest in gene therapy and bone marrow transplant applications

[1274] Briefly, polystyrene, non tissue culture treated, 96-well plates are coated with fn fragment at a coating concentration of 0.2 μg/cm². Mouse bone marrow cells are plated (1,000 cells/well) in 0.2 ml of serum-free medium. Cells cultured in the presence of IL-3 (5 ng/ml)+SCF (50 ng/ml) would serve as the positive control, conditions under which little self-renewal but pronounced differentiation of the stem cells is to be expected. Gene products of the invention (e.g., including, but not limited to, polynucleotides and polypeptides of the present invention, and supernatants produced in Example 30), are tested with appropriate negative controls in the presence and absence of SCF (5.0 ng/ml), where test factor supernatants represent 10% of the total assay volume. The plated cells are then allowed to grow by incubating in a low oxygen environment (5% CO₂, 7% O₂, and 88% N₂) tissue culture incubator for 7 days. The number of proliferating cells within the wells is then quantitated by measuring thymidine incorporation into cellular DNA. Verification of the positive hits in the assay will require phenotypic characterization of the cells, which can be accomplished by scaling up of the culture system and using appropriate antibody reagents against cell surface antigens and FACScan.

[1275] One skilled in the art could easily modify the exemplified studies to test the activity of polynucleotides (e.g., gene therapy), antibodies, agonists, and/or antagonists and fragments and variants thereof.

[1276] If a particular polypeptide of the present invention is found to be a stimulator of hematopoietic progenitors, polynucleotides and polypeptides corresponding to the gene encoding said polypeptide may be useful for the detection, prevention, diagnosis, prognostication, treatment, and/or amelioration of disorders affecting the immune system and hematopoiesis. Representative uses are described in the “Immune Activity” and “Infectious Disease” sections above, and elsewhere herein. The gene product may also be useful in the expansion of stem cells and committed progenitors of various blood lineages, and in the differentiation and/or proliferation of various cell types.

[1277] Additionally, the polynucleotides and/or polypeptides of the gene of interest and/or agonists and/or antagonists thereof, may also be employed to inhibit the proliferation and differentiation of hematopoietic cells and therefore may be employed to protect bone marrow stem cells from chemotherapeutic agents during chemotherapy. This antiproliferative effect may allow administration of higher doses of chemotherapeutic agents and, therefore, more effective chemotherapeutic treatment.

[1278] Moreover, polynucleotides and polypeptides corresponding to the gene of interest may also be useful for the detection, prevention, diagnosis, prognostication, treat, and/or amelioration of hematopoietic related disorders such as, for example, anemia, pancytopenia, leukopenia, thrombocytopenia or leukemia since stromal cells are important in the production of cells of hematopoietic lineages. The uses include bone marrow cell ex-vivo culture, bone marrow transplantation, bone marrow reconstitution, radiotherapy or chemotherapy of neoplasia.

### Example 42

### Human Dermal Fibroblast and Aortic Smooth Muscle Cell Proliferation

[1279] The polypeptide of interest is added to cultures of normal human dermal fibroblasts (NHDF) and human aortic smooth muscle cells (AoSMC) and two co-assays are performed with each sample. The first assay examines the effect of the polypeptide of interest on the proliferation of normal human dermal fibroblasts (NHDF) or aortic smooth muscle cells (AoSMC). Aberrant growth of fibroblasts or smooth muscle cells is a part of several pathological processes, including fibrosis, and restenosis. The second assay examines IL6 production by both NHDF and SMC. IL6 production is an indication of functional activation. Activated cells will have increased production of a number of cytokines and other factors, which can result in a proinflammatory or immunomodulatory outcome. Assays are run with and without co-TNFa stimulation, in order to check for costimulatory or inhibitory activity.

[1280] Briefly, on day 1, 96-well black plates are set up with 1000 cells/well (NHDF) or 2000 cells/well (AoSMC) in 100 μl culture media. NHDF culture media contains: Clonetics FB basal media, 1 mg/ml hFGF, 5 mg/ml insulin, 50 mg/ml gentamycin, 2% FBS, while AoSMC culture media contains Clonetics SM basal media, 0.5 μg/ml hEGF, 5 mg/ml insulin, 1 μg/ml hFGF, 50 mg/ml gentamycin, 50 μg/ml Amphotericin B, 5% FBS. After incubation at 37° C. for at least 4-5 hours culture media is aspirated and replaced with growth arrest media. Growth arrest media for NHDF contains fibroblast basal media, 50 mg/ml gentamycin, 2% FBS, while growth arrest media for AoSMC contains SM basal media, 50 mg/ml gentamycin, 50 μg/ml Amphotericin B, 0.4% FBS. Incubate at 37° C. until day 2.

[1281] On day 2, serial dilutions and templates of the polypeptide of interest are designed such that they always include media controls and known-protein controls. For both stimulation and inhibition experiments, proteins are diluted in growth arrest media. For inhibition experiments, TNFa is added to a final concentration of 2 ng/ml (NHDF) or 5 ng/ml (AoSMC). Add ⅓ vol media containing controls or polypeptides of the present invention and incubate at 37 degrees C./5% CO₂ until day 5.

[1282] Transfer 60 μl from each well to another labeled 96-well plate, cover with a plate-sealer, and store at 4 degrees C. until Day 6 (for IL6 ELISA). To the remaining 100 μl in the cell culture plate, aseptically add Alamar Blue in an amount equal to 10% of the culture volume (10 μl). Return plates to incubator for 3 to 4 hours. Then measure fluorescence with excitation at 530 nm and emission at 590 nm using the CytoFluor. This yields the growth stimulation/inhibition data.

[1283] On day 5, the IL6 ELISA is performed by coating a 96 well plate with 50-100 ul/well of Anti-Human IL6 Monoclonal antibody diluted in PBS, pH 7.4, incubate ON at room temperature.

[1284] On day 6, empty the plates into the sink and blot on paper towels. Prepare Assay Buffer containing PBS with 4% BSA. Block the plates with 200 μl/well of Pierce Super Block blocking buffer in PBS for 1-2 hr and then wash plates with wash buffer (PBS, 0.05% Tween-20). Blot plates on paper towels. Then add 50 μl/well of diluted Anti-Human IL-6 Monoclonal, Biotin-labeled antibody at 0.50 mg/ml. Make dilutions of IL-6 stock in media (30, 10, 3, 1, 0.3, 0 ng/ml). Add duplicate samples to top row of plate. Cover the plates and incubate for 2 hours at RT on shaker.

[1285] Plates are washed with wash buffer and blotted on paper towels. Dilute EU-labeled Streptavidin 1:1000 in Assay buffer, and add 100 μl/well. Cover the plate and incubate 1 h at RT. Plates are again washed with wash buffer and blotted on paper towels.

[1286] Add 100 μl/well of Enhancement Solution. Shake for 5 minutes. Read the plate on the Wallac DELFIA Fluorometer. Readings from triplicate samples in each assay were tabulated and averaged.

[1287] A positive result in this assay suggests AoSMC cell proliferation and that the polypeptide of the present invention may be involved in dermal fibroblast proliferation and/or smooth muscle cell proliferation. A positive result also suggests many potential uses of polypeptides, polynucleotides, agonists and/or antagonists of the polynucleotide/polypeptide of the present invention which gives a positive result. For example, inflammation and immune responses, wound healing, and angiogenesis, as detailed throughout this specification. Particularly, polypeptides of the present invention and polynucleotides of the present invention may be used in wound healing and dermal regeneration, as well as the promotion of vasculogenesis, both of the blood vessels and lymphatics. The growth of vessels can be used in the treatment of, for example, cardiovascular diseases. Additionally, antagonists of polypeptides and polynucleotides of the invention may be useful in treating diseases, disorders, and/or conditions which involve angiogenesis by acting as an anti-vascular agent (e.g., anti-angiogenesis). These diseases, disorders, and/or conditions are known in the art and/or are described herein, such as, for example, malignancies, solid tumors, benign tumors, for example hemangiomas, acoustic neuromas, neurofibromas, trachomas, and pyogenic granulomas; artheroscleric plaques; ocular angiogenic diseases, for example, diabetic retinopathy, retinopathy of prematurity, macular degeneration, corneal graft rejection, neovascular glaucoma, retrolental fibroplasia, rubeosis, retinoblastoma, uvietis and Pterygia (abnormal blood vessel growth) of the eye; rheumatoid arthritis; psoriasis; delayed wound healing; endometriosis; vasculogenesis; granulations; hypertrophic scars (keloids); nonunion fractures; scleroderma; trachoma; vascular adhesions; myocardial angiogenesis; coronary collaterals; cerebral collaterals; arteriovenous malformations; ischemic limb angiogenesis; Osler-Webber Syndrome; plaque neovascularization; telangiectasia; hemophiliac joints; angiofibroma; fibromuscular dysplasia; wound granulation; Crohn's disease; and atherosclerosis. Moreover, antagonists of polypeptides and polynucleotides of the invention may be useful in treating anti-hyperproliferative diseases and/or anti-inflammatory known in the art and/or described herein.

[1288] One skilled in the art could easily modify the exemplified studies to test the activity of polynucleotides (e.g., gene therapy), antibodies, agonists, and/or antagonists and fragments and variants thereof.

### Example 43

### Cellular Adhesion Molecule (CAM) Expression on Endothelial Cells

[1289] The recruitment of lymphocytes to areas of inflammation and angiogenesis involves specific receptor-ligand interactions between cell surface adhesion molecules (CAMs) on lymphocytes and the vascular endothelium. The adhesion process, in both normal and pathological settings, follows a multi-step cascade that involves intercellular adhesion molecule-1 (ICAM-1), vascular cell adhesion molecule-1 (VCAM-1), and endothelial leukocyte adhesion molecule-1 (E-selectin) expression on endothelial cells (EC). The expression of these molecules and others on the vascular endothelium determines the efficiency with which leukocytes may adhere to the local vasculature and extravasate into the local tissue during the development of an inflammatory response. The local concentration of cytokines and growth factor participate in the modulation of the expression of these CAMs.

[1290] Briefly, endothelial cells (e.g., Human Umbilical Vein Endothelial cells (HUVECs)) are grown in a standard 96 well plate to confluence, growth medium is removed from the cells and replaced with 100 μl of 199 Medium (10% fetal bovine serum (FBS)). Samples for testing and positive or negative controls are added to the plate in triplicate (in 10 μl volumes). Plates are then incubated at 37° C. for either 5 h (selectin and integrin expression) or 24 h (integrin expression only). Plates are aspirated to remove medium and 100 μl of 0.1% paraformaldehyde-PBS (with Ca++ and Mg++) is added to each well. Plates are held at 4° C. for 30 min. Fixative is removed from the wells and wells are washed 1× with PBS(+Ca,Mg)+0.5% BSA and drained. 10 μl of diluted primary antibody is added to the test and control wells. Anti-ICAM-1-Biotin, Anti-VCAM-1-Biotin and Anti-E-selectin-Biotin are used at a concentration of 10 μg/ml (1:10 dilution of 0.1 mg/ml stock antibody). Cells are incubated at 37° C. for 30 min. in a humidified environment. Wells are washed three times with PBS (+Ca,Mg)+0.5% BSA. 20 μl of diluted ExtrAvidin-Alkaline Phosphatase (1:5,000 dilution, referred to herein as the working dilution) are added to each well and incubated at 37° C. for 30 min. Wells are washed three times with PBS (+Ca, Mg)+0.5% BSA. Dissolve 1 tablet of p-Nitrophenol Phosphate pNPP per 5 ml of glycine buffer (pH 10.4). 100 μl of pNPP substrate in glycine buffer is added to each test well. Standard wells in triplicate are prepared from the working dilution of the ExtrAvidin-Alkaline Phosphotase in glycine buffer: 1:5,000 (10⁰)>10^{-0.5}>10⁻¹>10^{-1.5} 0.5 μl of each dilution is added to triplicate wells and the resulting AP content in each well is 5.50 ng, 1.74 ng, 0.55 ng, 0.18 ng. 100 μl of pNNP reagent is then added to each of the standard wells. The plate is incubated at 37° C. for 4 h. A volume of 50 μl of 3M NaOH is added to all wells. The plate is read on a plate reader at 405 nm using the background subtraction option on blank wells filled with glycine buffer only. Additionally, the template is set up to indicate the concentration of AP-conjugate in each standard well [5.50 ng; 1.74 ng; 0.55 ng; 0.18 ng]. Results are indicated as amount of bound AP-conjugate in each sample.

### Example 44

### Alamar Blue Endothelial Cells Proliferation Assay

[1291] This assay may be used to quantitatively determine protein mediated inhibition of bFGF-induced proliferation of Bovine Lymphatic Endothelial Cells (LECs), Bovine Aortic Endothelial Cells (BAECs) or Human Microvascular Uterine Myometrial Cells (UTMECs). This assay incorporates a fluorometric growth indicator based on detection of metabolic activity. A standard Alamar Blue Proliferation Assay is prepared in EGM-2MV with 10 ng/ml of bFGF added as a source of endothelial cell stimulation. This assay may be used with a variety of endothelial cells with slight changes in growth medium and cell concentration. Dilutions of the protein batches to be tested are diluted as appropriate. Serum-free medium (GIBCO SFM) without bFGF is used as a non-stimulated control and Angiostatin or TSP-1 are included as a known inhibitory controls.

[1292] Briefly, LEC, BAECs or UTMECs are seeded in growth media at a density of 5000 to 2000 cells/well in a 96 well plate and placed at 37 degrees C. overnight. After the overnight incubation of the cells, the growth media is removed and replaced with GIBCO EC-SFM. The cells are treated with the appropriate dilutions of the protein of interest or control protein sample(s) (prepared in SFM) in triplicate wells with additional bFGF to a concentration of 10 ng/ml. Once the cells have been treated with the samples, the plate(s) is/are placed back in the 37° C. incubator for three days. After three days 10 ml of stock alamar blue (Biosource Cat# DAL1100) is added to each well and the plate(s) is/are placed back in the 37° C. incubator for four hours. The plate(s) are then read at 530 nm excitation and 590 nm emission using the CytoFluor fluorescence reader. Direct output is recorded in relative fluorescence units.

[1293] Alamar blue is an oxidation-reduction indicator that both fluoresces and changes color in response to chemical reduction of growth medium resulting from cell growth. As cells grow in culture, innate metabolic activity results in a chemical reduction of the immediate surrounding environment. Reduction related to growth causes the indicator to change from oxidized (non-fluorescent blue) form to reduced (fluorescent red) form (i.e., stimulated proliferation will produce a stronger signal and inhibited proliferation will produce a weaker signal and the total signal is proportional to the total number of cells as well as their metabolic activity). The background level of activity is observed with the starvation medium alone. This is compared to the output observed from the positive control samples (bFGF in growth medium) and protein dilutions.

### Example 45

### Detection of Inhibition of a Mixed Lymphocyte Reaction

[1294] This assay can be used to detect and evaluate inhibition of a Mixed Lymphocyte Reaction (MLR) by gene products (e.g., isolated polypeptides). Inhibition of a MLR may be due to a direct effect on cell proliferation and viability, modulation of costimulatory molecules on interacting cells, modulation of adhesiveness between lymphocytes and accessory cells, or modulation of cytokine production by accessory cells. Multiple cells may be targeted by these polypeptides since the peripheral blood mononuclear fraction used in this assay includes T, B and natural killer lymphocytes, as well as monocytes and dendritic cells.

[1295] Polypeptides of interest found to inhibit the MLR may find application in diseases associated with lymphocyte and monocyte activation or proliferation. These include, but are not limited to, diseases such as asthma, arthritis, diabetes, inflammatory skin conditions, psoriasis, eczema, systemic lupus erythematosus, multiple sclerosis, glomerulonephritis, inflammatory bowel disease, crohn's disease, ulcerative colitis, arteriosclerosis, cirrhosis, graft vs. host disease, host vs. graft disease, hepatitis, leukemia and lymphoma.

[1296] Briefly, PBMCs from human donors are purified by density gradient centrifugation using Lymphocyte Separation Medium (LSM®, density 1.0770 g/ml, Organon Teknika Corporation, West Chester, Pa.). PBMCs from two donors are adjusted to 2×10⁶ cells/ml in RPMI-1640 (Life Technologies, Grand Island, N.Y.) supplemented with 10% FCS and 2 mM glutamine. PBMCs from a third donor is adjusted to 2×10⁵ cells/ml. Fifty microliters of PBMCs from each donor is added to wells of a 96-well round bottom microtiter plate. Dilutions of test materials (50 μl) is added in triplicate to microtiter wells. Test samples (of the protein of interest) are added for final dilution of 1:4; rhuIL-2 (R&D Systems, Minneapolis, Minn., catalog number 202-IL) is added to a final concentration of 1 μg/ml; anti-CD4 mAb (R&D Systems, clone 34930.11, catalog number MAB379) is added to a final concentration of 10 μg/ml. Cells are cultured for 7-8 days at 37° C. in 5% CO₂, and 1 μC of [³H] thymidine is added to wells for the last 16 hrs of culture. Cells are harvested and thymidine incorporation determined using a Packard TopCount. Data is expressed as the mean and standard deviation of triplicate determinations.

[1297] Samples of the protein of interest are screened in separate experiments and compared to the negative control treatment, anti-CD4 mAb, which inhibits proliferation of lymphocytes and the positive control treatment, IL-2 (either as recombinant material or supernatant), which enhances proliferation of lymphocytes.

[1298] One skilled in the art could easily modify the exemplified studies to test the activity of polynucleotides (e.g., gene therapy), antibodies, agonists, and/or antagonists and fragments and variants thereof.

### Example 46

### Assays for Protease Activity

[1299] The following assay may be used to assess protease activity of the polypeptides of the invention.

[1300] Gelatin and casein zymography are performed essentially as described (Heusen et al., Anal. Biochem., 102:196-202 (1980); Wilson et al., Journal of Urology, 149:653-658 (1993)). Samples are run on 10% polyacryamide/0.1% SDS gels containing 1% gelain orcasein, soaked in 2.5% triton at room temperature for 1 hour, and in 0.1M glycine, pH 8.3 at 37° C. 5 to 16 hours. After staining in amido black areas of proteolysis apear as clear areas agains the blue-black background. Trypsin (Sigma T8642) is used as a positive control.

[1301] Protease activity is also determined by monitoring the cleavage of n-a-benzoyl-L-arginine ethyl ester (BAEE) (Sigma B-4500. Reactions are set up in (25 mMNaPO₄, 1 mM EDTA, and 1 mM BAEE), pH 7.5. Samples are added and the change in adsorbance at 260 nm is monitored on the Beckman DU-6 spectrophotometer in the time-drive mode. Trypsin is used as a positive control.

[1302] Additional assays based upon the release of acid-soluble peptides from casein or hemoglobin measured as adsorbance at 280 nm or colorimetrically using the Folin method are performed as described in Bergmeyer, et al., Methods of Enzymatic Analysis, 5 (1984). Other assays involve the solubilization of chromogenic substrates (Ward, Applied Science, 251-317 (1983)).

### Example 47

### Identifying Serine Protease Substrate Specificity

[1303] Methods known in the art or described herein may be used to determine the substrate specificity of the polypeptides of the present invention having serine protease activity. A preferred method of determining substrate specificity is by the use of positional scanning synthetic combinatorial libraries as described in GB 2 324 529 (incorporated herein in its entirety).

### Example 48

### Ligand Binding Assays

[1304] The following assay may be used to assess ligand binding activity of the polypeptides of the invention.

[1305] Ligand binding assays provide a direct method for ascertaining receptor pharmacology and are adaptable to a high throughput format. The purified ligand for a polypeptide is radiolabeled to high specific activity (50-2000 Ci/mmol) for binding studies. A determination is then made that the process of radiolabeling does not diminish the activity of the ligand towards its polypeptide. Assay conditions for buffers, ions, pH and other modulators such as nucleotides are optimized to establish a workable signal to noise ratio for both membrane and whole cell polypeptide sources. For these assays, specific polypeptide binding is defined as total associated radioactivity minus the radioactivity measured in the presence of an excess of unlabeled competing ligand. Where possible, more than one competing ligand is used to define residual nonspecific binding.

### Example 49

### Functional Assay in Xenopus Oocytes

[1306] Capped RNA transcripts from linearized plasmid templates encoding the polypeptides of the invention are synthesized in vitro with RNA polymerases in accordance with standard procedures. In vitro transcripts are suspended in water at a final concentration of 0.2 mg/ml. Ovarian lobes are removed from adult female toads, Stage V defolliculated oocytes are obtained, and RNA transcripts (10 ng/oocytc) are injected in a 50 nl bolus using a microinjection apparatus. Two electrode voltage clamps are used to measure the currents from individual Xenopus oocytes in response polypeptides and polypeptide agonist exposure. Recordings are made in Ca2+ free Barth's medium at room temperature. The Xenopus system can be used to screen known ligands and tissue/cell extracts for activating ligands.

### Example 50

### Microphysiometric Assays

[1307] Activation of a wide variety of secondary messenger systems results in extrusion of small amounts of acid from a cell. The acid formed is largely as a result of the increased metabolic activity required to fuel the intracellular signaling process. The pH changes in the media surrounding the cell are very small but are detectable by the CYTOSENSOR microphysiometer (Molecular Devices Ltd., Menlo Park, Calif.). The CYTOSENSOR is thus capable of detecting the activation of polypeptide that is coupled to an energy utilizing intracellular signaling pathway.

### Example 51

### Extract/Cell Supernatant Screening

[1308] A large number of mammalian receptors exist for which there remains, as yet, no cognate activating ligand (agonist). Thus, active ligands for these receptors may not be included within the ligands banks as identified to date. Accordingly, the polypeptides of the invention can also be functionally screened (using calcium, cAMP, microphysiometer, oocyte electrophysiology, etc., functional screens) against tissue extracts to identify its natural ligands. Extracts that produce positive functional responses can be sequentially subfractionated until an activating ligand is isolated and identified.

### Example 52

### Calcium and cAMP Functional Assays

[1309] Seven transmembrane receptors which are expressed in HEK 293 cells have been shown to be coupled functionally to activation of PLC and calcium mobilization and/or cAMP stimulation or inhibition. Basal calcium levels in the HEK 293 cells in receptor-transfected or vector control cells were observed to be in the normal, 100 nM to 200 nM, range. HEK 293 cells expressing recombinant receptors are loaded with fura 2 and in a single day>150 selected ligands or tissue/cell extracts are evaluated for agonist induced calcium mobilization. Similarly, HEK 293 cells expressing recombinant receptors are evaluated for the stimulation or inhibition of cAMP production using standard cAMP quantitation assays. Agonists presenting a calcium transient or cAMP fluctuation are tested in vector control cells to determine if the response is unique to the transfected cells expressing receptor.

### Example 53

### ATP-Binding Assay

[1310] The following assay may be used to assess ATP-binding activity of polypeptides of the invention.

[1311] ATP-binding activity of the polypeptides of the invention may be detected using the ATP-binding assay described in U.S. Pat. No. 5,858,719, which is herein incorporated by reference in its entirety. Briefly, ATP-binding to polypeptides of the invention is measured via photoaffinity labeling with 8-azido-ATP in a competition assay. Reaction mixtures containing 1 mg/ml of the ABC transport protein of the present invention are incubated with varying concentrations of ATP, or the non-hydrolyzable ATP analog adenyl-5′-imidodiphosphate for 10 minutes at 4° C. A mixture of 8-azido-ATP (Sigma Chem. Corp., St. Louis, Mo.) plus 8-azido-ATP (³²P-ATP) (5 mCi/μmol, ICN, Irvine Calif.) is added to a final concentration of 100 μM and 0.5 ml aliquots are placed in the wells of a porcelain spot plate on ice. The plate is irradiated using a short wave 254 nm UV lamp at a distance of 2.5 cm from the plate for two one-minute intervals with a one-minute cooling interval in between. The reaction is stopped by addition of dithiothreitol to a final concentration of 2 mM. The incubations are subjected to SDS-PAGE electrophoresis, dried, and autoradiographed. Protein bands corresponding to the particular polypeptides of the invention are excised, and the radioactivity quantified. A decrease in radioactivity with increasing ATP or adenly-5′-imidodiphosphate provides a measure of ATP affinity to the polypeptides.

### Example 54

### Small Molecule Screening

[1312] This invention is particularly useful for screening therapeutic compounds by using the polypeptides of the invention, or binding fragments thereof, in any of a variety of drug screening techniques. The polypeptide or fragment employed in such a test may be affixed to a solid support, expressed on a cell surface, free in solution, or located intracellularly. One method of drug screening utilizes eukaryotic or prokaryotic host cells which are stably transformed with recombinant nucleic acids expressing the polypeptide or fragment. Drugs are screened against such transformed cells in competitive binding assays. One may measure, for example, the formulation of complexes between the agent being tested and polypeptide of the invention.

[1313] Thus, the present invention provides methods of screening for drugs or any other agents which affect activities mediated by the polypeptides of the invention. These methods comprise contacting such an agent with a polypeptide of the invention or fragment thereof and assaying for the presence of a complex between the agent and the polypeptide or fragment thereof, by methods well known in the art. In such a competitive binding assay, the agents to screen are typically labeled. Following incubation, free agent is separated from that present in bound form, and the amount of free or uncomplexed label is a measure of the ability of a particular agent to bind to the polypeptides of the invention.

[1314] Another technique for drug screening provides high throughput screening for compounds having suitable binding affinity to the polypeptides of the invention, and is described in great detail in European Patent Application 84/03564, published on Sep. 13, 1984, which is herein incorporated by reference in its entirety. Briefly stated, large numbers of different small molecule test compounds are synthesized on a solid substrate, such as plastic pins or some other surface. The test compounds are reacted with polypeptides of the invention and washed. Bound polypeptides are then detected by methods well known in the art. Purified polypeptides are coated directly onto plates for use in the aforementioned drug screening techniques. In addition, non-neutralizing antibodies may be used to capture the peptide and immobilize it on the solid support.

[1315] This invention also contemplates the use of competitive drug screening assays in which neutralizing antibodies capable of binding polypeptides of the invention specifically compete with a test compound for binding to the polypeptides or fragments thereof. In this manner, the antibodies are used to detect the presence of any peptide that shares one or more antigenic epitopes with a polypeptide of the invention.

### Example 55

### Phosphorylation Assay

[1316] In order to assay for phosphorylation activity of the polypeptides of the invention, a phosphorylation assay as described in U.S. Pat. No. 5,958,405 (which is herein incorporated by reference) is utilized. Briefly, phosphorylation activity may be measured by phosphorylation of a protein substrate using gamma-labeled ³²P-ATP and quantitation of the incorporated radioactivity using a gamma radioisotope counter. The polypeptides of the invention are incubated with the protein substrate, ³²P-ATP, and a kinase buffer. The ³²P incorporated into the substrate is then separated from free ³²P-ATP by electrophoresis, and the incorporated ³²P is counted and compared to a negative control. Radioactivity counts above the negative control are indicative of phosphorylation activity of the polypeptides of the invention.

### Example 56

### Detection of Phosphorylation Activity (Activation) of the Polypeptides of the Invention in the Presence of Polypeptide Ligands

[1317] Methods known in the art or described herein may be used to determine the phosphorylation activity of the polypeptides of the invention. A preferred method of determining phosphorylation activity is by the use of the tyrosine phosphorylation assay as described in U.S. Pat. No. 5,817,471 (incorporated herein by reference).

### Example 57

### Identification of Signal Transduction Proteins that Interact with Polypeptides of the Present Invention

[1318] The purified polypeptides of the invention are research tools for the identification, characterization and purification of additional signal transduction pathway proteins or receptor proteins. Briefly, labeled polypeptides of the invention are useful as reagents for the purification of molecules with which it interacts. In one embodiment of affinity purification, polypeptides of the invention are covalently coupled to a chromatography column. Cell-free extract derived from putative target cells, such as carcinoma tissues, is passed over the column, and molecules with appropriate affinity bind to the polypeptides of the invention. The protein complex is recovered from the column, dissociated, and the recovered molecule subjected to N-terminal protein sequencing. This amino acid sequence is then used to identify the captured molecule or to design degenerate oligonucleotide probes for cloning the relevant gene from an appropriate cDNA library.

### Example 58

### IL-6 Bioassay

[1319] To test the proliferative effects of the polypeptides of the invention, the IL-6 Bioassay as described by Marz et al. is utilized (Proc. Natl. Acad. Sci., U.S.A., 95:3251-56 (1998), which is herein incorporated by reference). Briefly, IL-6 dependent B9 murine cells are washed three times in IL-6 free medium and plated at a concentration of 5,000 cells per well in 50 μl, and 50 μl of the IL-6-like polypeptide is added. After 68 hrs. at 37° C., the number of viable cells is measured by adding the tetrazolium salt thiazolyl blue (MTT) and incubating for a further 4 hrs. at 37° C. B9 cells are lysed by SDS and optical density is measured at 570 nm. Controls containing IL-6 (positive) and no cytokine (negative) are utilized. Enhanced proliferation in the test sample(s) relative to the negative control is indicative of proliferative effects mediated by polypeptides of the invention.

### Example 59

### Support of Chicken Embryo Neuron Survival

[1320] To test whether sympathetic neuronal cell viability is supported by polypeptides of the invention, the chicken embryo neuronal survival assay of Senaldi et al is utilized (Proc. Natl. Acad. Sci., U.S.A., 96:11458-63 (1998), which is herein incorporated by reference). Briefly, motor and sympathetic neurons are isolated from chicken embryos, resuspended in L15 medium (with 10% FCS, glucose, sodium selenite, progesterone, conalbumin, putrescine, and insulin; Life Technologies, Rockville, Md.) and Dulbecco's modified Eagles medium [with 10% FCS, glutamine, penicillin, and 25 mM Hepes buffer (pH 7.2); Life Technologies, Rockville, Md.], respectively, and incubated at 37° C. in 5% CO₂ in the presence of different concentrations of the purified IL-6-like polypeptide, as well as a negative control lacking any cytokine. After 3 days, neuron survival is determined by evaluation of cellular morphology, and through the use of the colorimetric assay of Mosmann (Mosmann, T., J. Immunol. Methods, 65:55-63 (1983)). Enhanced neuronal cell viability as compared to the controls lacking cytokine is indicative of the ability of the inventive purified IL-6-like polypeptide(s) to enhance the survival of neuronal cells.

### Example 60

### Assay for Phosphatase Activity

[1321] The following assay may be used to assess serine/threonine phosphatase (PTPase) activity of the polypeptides of the invention.

[1322] In order to assay for serine/threonine phosphatase (PTPase) activity, assays can be utilized which are widely known to those skilled in the art. For example, the serine/threonine phosphatase (PSPase) activity is measured using a PSPase assay kit from New England Biolabs, Inc. Myelin basic protein (MyBP), a substrate for PSPase, is phosphorylated on serine and threonine residues with cAMP-dependent Protein Kinase in the presence of [³²P]ATP. Protein serine/threonine phosphatase activity is then determined by measuring the release of inorganic phosphate from 32P-labeled MyBP.

### Example 61

### Interaction of Serine/Threonine Phosphatases with Other Proteins

[1323] The polypeptides of the invention with serine/threonine phosphatase activity as determined in Example 60 are research tools for the identification, characterization and purification of additional interacting proteins or receptor proteins, or other signal transduction pathway proteins. Briefly, labeled polypeptide(s) of the invention is useful as a reagent for the purification of molecules with which it interacts. In one embodiment of affinity purification, polypeptide of the invention is covalently coupled to a chromatography column. Cell-free extract derived from putative target cells, such as neural or liver cells, is passed over the column, and molecules with appropriate affinity bind to the polypeptides of the invention. The polypeptides of the invention-complex is recovered from the column, dissociated, and the recovered molecule subjected to N-terminal protein sequencing. This amino acid sequence is then used to identify the captured molecule or to design degenerate oligonucleotide probes for cloning the relevant gene from an appropriate cDNA library.

### Example 62

### Assaying for Heparanase Activity

[1324] In order to assay for heparanase activity of the polypeptides of the invention, the heparanase assay described by Vlodavsky et al is utilized (Vlodavsky, I., et al., Nat. Med., 5:793-802 (1999)). Briefly, cell lysates, conditioned media or intact cells (1×10⁶ cells per 35-mm dish) are incubated for 18 hrs at 37° C., pH 6.2-6.6, with ³⁵S-labeled ECM or soluble ECM derived peak I proteoglycans. The incubation medium is centrifuged and the supernatant is analyzed by gel filtration on a Sepharose CL-6B column (0.9×30 cm). Fractions are eluted with PBS and their radioactivity is measured. Degradation fragments of heparan sulfate side chains are eluted from Sepharose 6B at 0.5<Kₐᵥ<0.8 (peak II). Each experiment is done at least three times. Degradation fragments corresponding to “peak II,” as described by Vlodavsky et al., is indicative of the activity of the polypeptides of the invention in cleaving heparan sulfate.

### Example 63

### Immobilization of Biomolecules

[1325] This example provides a method for the stabilization of polypeptides of the invention in non-host cell lipid bilayer constucts (see, e.g., Bieri et al., Nature Biotech 17:1105-1108 (1999), hereby incorporated by reference in its entirety herein) that can be adapted for the study of polypeptides of the invention in the various functional assays described above. Briefly, carbohydrate-specific chemistry for biotinylation is used to confine a biotin tag to the extracellular domain of the polypeptides of the invention, thus allowing uniform orientation upon immobilization. A 50 uM solution of polypeptides of the invention in washed membranes is incubated with 20 mM NaIO4 and 1.5 mg/ml (4 mM) BACH or 2 mg/ml (7.5 mM) biotin-hydrazide for 1 hr at room temperature (reaction volume, 150 ul). Then the sample is dialyzed (Pierce Slidealizer Cassett, 10 kDa cutoff, Pierce Chemical Co., Rockford Ill.) at 4C first for 5 h, exchanging the buffer after each hour, and finally for 12 h against 500 ml buffer R (0.15 M NaCl, 1 mM MgCl2, 10 mM sodium phosphate, pH7). Just before addition into a cuvette, the sample is diluted 1:5 in buffer ROG50 (Buffer R supplemented with 50 mM octylglucoside).

### Example 64

### TAQMAN

[1326] Quantitative PCR (QPCR). Total RNA from cells in culture are extracted by Trizol separation as recommended by the supplier (LifeTechnologies). (Total RNA is treated with DNase I (Life Technologies) to remove any contaminating genomic DNA before reverse transcription.) Total RNA (50 ng) is used in a one-step, 50 ul, RT-QPCR, consisting of Taqman Buffer A (Perkin-Elmer; 50 mM KCl/10 mM Tris, pH 8.3), 5.5 mM MgCl₂, 240 μM each dNTP, 0.4 units RNase inhibitor (Promega), 8% glycerol, 0.012% Tween-20, 0.05% gelatin, 0.3 uM primers, 0.1 uM probe, 0.025 units Amplitaq Gold (Perkin-Elmer) and 2.5 units Superscript II reverse transcriptase (Life Technologies). As a control for genomic contamination, parallel reactions are setup without reverse transcriptase. The relative abundance of (unknown) and 18S RNAs are assessed by using the Applied Biosystems Prism 7700 Sequence Detection System (Livak, K. J., Flood, S. J., Marmaro, J., Giusti, W. & Deetz, K. (1995) PCR Methods Appl. 4, 357-362). Reactions are carried out at 48° C. for 30 min, 95° C. for 10 min, followed by 40 cycles of 95° C. for 15 s, 60° C. for 1 min. Reactions are performed in triplicate.

[1327] Primers (f & r) and FRET probes sets are designed using Primer Express Software (Perkin-Elmer). Probes are labeled at the 5′-end with the reporter dye 6-FAM and on the 3′-end with the quencher dye TAMRA (Biosource International, Camarillo, Calif. or Perkin-Elmer).

### Example 65

### Assays for Metalloproteinase Activity

[1328] Metalloproteinases (EC 3.4.24.-) are peptide hydrolases which use metal ions, such as Zn²⁺, as the catalytic mechanism. Metalloproteinase activity of polypeptides of the present invention can be assayed according to the following methods.

Proteolysis of Alpha-2-Macroglobulin

[1329] To confirm protease activity, purified polypeptides of the invention are mixed with the substrate alpha-2-macroglobulin (0.2 unit/ml; Boehringer Mannheim, Germany) in 1× assay buffer (50 mM HEPES, pH 7.5, 0.2 M NaCl, 10 mM CaCl₂, 25 μM ZnCl₂ and 0.05% Brij-35) and incubated at 37° C. for 1-5 days. Trypsin is used as positive control. Negative controls contain only alpha-2-macroglobulin in assay buffer. The samples are collected and boiled in SDS-PAGE sample buffer containing 5% 2-mercaptoethanol for 5-min, then loaded onto 8% SDS-polyacrylamide gel. After electrophoresis the proteins are visualized by silver staining. Proteolysis is evident by the appearance of lower molecular weight bands as compared to the negative control.

Inhibition of Alpha-2-Macroglobulin Proteolysis by Inhibitors of Metalloproteinases

[1330] Known metalloproteinase inhibitors (metal chelators (EDTA, EGTA, AND HgCl₂), peptide metalloproteinase inhibitors (TIMP-1 and TIMP-2), and commercial small molecule MMP inhibitors) are used to characterize the proteolytic activity of polypeptides of the invention. The three synthetic MMP inhibitors used are: MMP inhibitor I, [IC₅₀=1.0 μM against MMP-1 and MMP-8; IC₅₀=30 μM against MMP-9; IC₅₀=150 μM against MMP-3]; MMP-3 (stromelysin-1) inhibitor I [IC₅₀=5 μM against MMP-3], and MMP-3 inhibitor II [Kᵢ=130 nM against MMP-3]; inhibitors available through Calbiochem, catalog # 444250, 444218, and 444225, respectively). Briefly, different concentrations of the small molecule MMP inhibitors are mixed with purified polypeptides of the invention (50 μg/ml) in 22.9 μl of 1×HEPES buffer (50 mM HEPES, pH 7.5, 0.2 M NaCl, 10 mM CaCl₂, 25 μM ZnCl₂ and 0.05% Brij-35) and incubated at room temperature (24° C.) for 2-hr, then 7.1 μl of substrate alpha-2-macroglobulin (0.2 unit/ml) is added and incubated at 37° C. for 20-hr. The reactions are stopped by adding 4× sample buffer and boiled immediately for 5 minutes. After SDS-PAGE, the protein bands are visualized by silver stain.

Synthetic Fluorogenic Peptide Substrates Cleavage Assay

[1331] The substrate specificity for polypeptides of the invention with demonstrated metalloproteinase activity can be determined using synthetic fluorogenic peptide substrates (purchased from BACHEM Bioscience Inc). Test substrates include, M-1985, M-2225, M-2105, M-2110, and M-2255. The first four are MMP substrates and the last one is a substrate of tumor necrosis factor-α (TNF-α) converting enzyme (TACE). All the substrates are prepared in 1:1 dimethyl sulfoxide (DMSO) and water. The stock solutions are 50-500 μM. Fluorescent assays are performed by using a Perkin Elmer LS 50B luminescence spectrometer equipped with a constant temperature water bath. The excitation % is 328 nm and the emission λ is 393 nm. Briefly, the assay is carried out by incubating 176 μl 1×HEPES buffer (0.2 M NaCl, 10 mM CaCl₂, 0.05% Brij-35 and 50 mM HEPES, pH 7.5) with 4 μl of substrate solution (50 μM) at 25° C. for 15 minutes, and then adding 20 μl of a purified polypeptide of the invention into the assay cuvett. The final concentration of substrate is 1 μM. Initial hydrolysis rates are monitored for 30-min.

### Example 66

### Characterization of the cDNA Contained in a Deposited Plasmid

[1332] The size of the cDNA insert contained in a deposited plasmid may be routinely determined using techniques known in the art, such as PCR amplification using synthetic primers hybridizable to the 3′ and 5′ ends of the cDNA sequence. For example, two primers of 17-30 nucleotides derived from each end of the cDNA (i.e., hybridizable to the absolute 5′ nucleotide or the 3′ nucleotide end of the sequence of SEQ ID NO:X, respectively) are synthesized and used to amplify the cDNA using the deposited cDNA plasmid as a template. The polymerase chain reaction is carried out under routine conditions, for instance, in 25 ul of reaction mixture with 0.5 ug of the above cDNA template. A convenient reaction mixture is 1.5-5 mM MgCl₂, 0.01% (w/v) gelatin, 20 uM each of dATP, dCTP, dGTP, dTTP, 25 μmol of each primer and 0.25 Unit of Taq polymerase. Thirty five cycles of PCR (denaturation at 94 degree C. for 1 min; annealing at 55 degree C. for 1 min; elongation at 72 degree C. for 1 min) are performed with a Perkin-Elmer Cetus automated thermal cycler. The amplified product is analyzed by agarose gel electrophoresis. The PCR product is verified to be the selected sequence by subcloning and sequencing the DNA product. It will be clear that the invention may be practiced otherwise than as particularly described in the foregoing description and examples. Numerous modifications and variations of the present invention are possible in light of the above teachings and, therefore, are within the scope of the appended claims.

### INCORPORATION BY REFERENCE

[1333] The entire disclosure of each document cited (including patents, patent applications, journal articles, abstracts, laboratory manuals, books, or other disclosures) in the Background of the Invention, Detailed Description, and Examples is hereby incorporated herein by reference. In addition, the sequence listing submitted herewith is incorporated herein by reference in its entirety. The specification and sequence listing of each of the following U.S. and PCT applications are herein incorporated by reference in their entirety (filing dates shown in format “year-month-day” (yyyy-mm-dd)): Application No. 60/278,650 filed on 2001 Mar. 27, application Ser. No. 09/950,082 filed on 2001 Sep. 12, application Ser. No. 09/950,083 filed on 2001 Sep. 12, Application No. 60/306,171 filed on 19 Jul. 2001, application Ser. No. 09/833,245 filed on 2001 Apr. 12, Application No. PCT/US01/11988 filed on 2001 Apr. 12, Application No. 60/331,287 filed on 2001 Nov. 13, Application No. 60/277,340 filed on 2001 Mar. 21, Application No. PCT/US00/06043 filed on 2000 Mar. 9, Application No. PCT/US00/06012 filed on 2000 Mar. 9, Application No. PCT/US00/06058 filed on 2000 Mar. 09, Application No. PCT/US00/06044 filed on 2000 Mar. 09, Application No. PCT/US00/06059 filed on 2000 Mar. 09, Application No. PCT/US00/06042 filed on 2000 Mar. 09, Application No. PCT/US00/06014 filed on 2000 Mar. 09, Application No. PCT/US00/06013 filed on 2000 Mar. 09, Application No. PCT/US00/06049 filed on 2000 Mar. 09, Application No. PCT/US00/06057 filed on 2000 Mar. 09, Application No. PCT/US00/06824 filed on 2000 Mar. 16, Application No. PCT/US00/06765 filed on 2000 Mar. 16, Application No. PCT/US00/06792 filed on 2000 Mar. 16, Application No. PCT/US00/06830 filed on 2000 Mar. 16, Application No. PCT/US00/06782 filed on 2000 Mar. 16, Application No. PCT/US00/06822 filed on 2000 Mar. 16, Application No. PCT/US00/06791 filed on 2000 Mar. 16, Application No. PCT/US00/06828 filed on 2000 Mar. 16, Application No. PCT/US00/06823 filed on 2000 Mar. 16, Application No. PCT/US00/06781 filed on 2000 Mar. 16, Application No. PCT/US00/07505 filed on 2000 Mar. 22, Application No. PCT/US00/07440 filed on 2000 Mar. 22, Application No. PCT/US00/07506 filed on 2000 Mar. 22, Application No. PCT/US00/07507 filed on 2000 Mar. 22, Application No. PCT/US00/07535 filed on 2000 Mar. 22, Application No. PCT/US00/07525 filed on 2000 Mar. 22, Application No. PCT/US00/07534 filed on 2000 Mar. 22, Application No. PCT/US00/07483 filed on 2000 Mar. 22, Application No. PCT/US00/07526 filed on 2000 Mar. 22, Application No. PCT/US00/07527 filed on 2000 Mar. 22, Application No. PCT/US00/07661 filed on 2000 Mar. 23, Application No. PCT/US00/07579 filed on 2000 Mar. 23, Application No. PCT/US00/07723 filed on 2000 Mar. 23, Application No. PCT/US00/07724 filed on 2000 Mar. 23, Application No. PCT/US00/14929 filed on 2000 Jun. 1, Application No. PCT/US00/07722 filed on 2000 Mar. 23, Application No. PCT/US00/07578 filed on 2000 Mar. 23, Application No. PCT/US00/07726 filed on 2000 Mar. 23, Application No. PCT/US00/07677 filed on 2000 Mar. 23, Application No. PCT/US00/07725 filed on 2000 Mar. 23, Application No. PCT/US00/09070 filed on 2000 Apr. 6, Application No. PCT/US00/08982 filed on 2000 Apr. 6, Application No. PCT/US00/08983 filed on 2000 Apr. 6, Application No. PCT/US00/09067 filed on 2000 Apr. 6, Application No. PCT/US00/09066 filed on 2000 Apr. 6, Application No. PCT/US00/09068 filed on 2000 Apr. 6, Application No. PCT/US00/08981 filed on 2000 Apr. 6, Application No. PCT/US00/08980 filed on 2000 Apr. 6, Application No. PCT/US00/09071 filed on 2000 Apr. 6, Application No. PCT/US00/09069 filed on 2000 Apr. 6, Application No. PCT/US00/15136 filed on 2000 Jun. 1, Application No. PCT/US00/14926 filed on 2000 Jun. 1, Application No. PCT/US00/14963 filed on 2000 Jun. 1, Application No. PCT/US00/15135 filed on 2000 Jun. 1, Application No. PCT/US00/14934 filed on 2000 Jun. 1, Application No. PCT/US00/14933 filed on 2000 Jun. 1, Application No. PCT/US00/15137 filed on 2000 Jun. 1, Application No. PCT/US00/14928 filed on 2000 Jun. 1, Application No. PCT/US/00/14973 filed on 2000 Jun. 1, Application No. PCT/US00/14964 filed on 2000 Jun. 1, Application No. PCT/US00/26376 filed on 2000 Sep. 26, Application No. PCT/US00/26371 filed on 2000 Sep. 26, Application No. PCT/US00/26324 filed on 2000 Sep. 26, Application No. PCT/US00/26323 filed on 2000 Sep. 26, Application No. PCT/US00/26337 filed on 2000 Sep. 26, Application No. PCT/US01/13318 filed on 2001 Apr. 27, Application No. U.S. 60/124,146 filed on 1999 Mar. 12, Application No. U.S. 60/167,061 filed on 1999 Nov. 23, Application No. U.S. 60/124,093 filed on 1999 Mar. 12, Application No. U.S. 60/166,989 filed on 1999 Nov. 23, Application No. U.S. 60/124,145 filed on 1999 Mar. 12, Application No. U.S. 60/168,654 filed on 1999 Dec. 03, Application No. U.S. 60/124,099 filed on 1999 Mar. 12, Application No. U.S. 60/168,661 filed on 1999 Dec. 03, Application No. U.S. 60/124,096 filed on 1999 Mar. 12, Application No. U.S. 60/168,622 filed on 1999 Dec. 03, Application No. U.S. 60/124,143 filed on 1999 Mar. 12, Application No. U.S. 60/168,663 filed on 1999 Dec. 03, Application No. U.S. 60/124,095 filed on 1999 Mar. 12, Application No. U.S. 60/138,598 filed on 1999 Jun. 11, Application No. U.S. 60/168,665 filed on 1999 Dec. 03, Application No. U.S. 60/125,360 filed on 1999 Mar. 19, Application No. U.S. 60/138,626 filed on 1999 Jun. 11, Application No. U.S. 60/168,662 filed on 1999 Dec. 03, Application No. U.S. 60/124,144 filed on 1999 Mar. 12, Application No. U.S. 60/138,574 filed on 1999 Jun. 11, Application No. U.S. 60/168,667 filed on 1999 Dec. 03, Application No. U.S. 60/124,142 filed on 1999 Mar. 12, Application No. U.S. 60/138,597 filed on 1999 Jun. 11, Application No. U.S. 60/168,666 filed on 1999 Dec. 03, Application No. U.S. 60/125,359 filed on 1999 Mar. 19, Application No. U.S. 60/168,664 filed on 1999 Dec. 03, Application No. U.S. 60/126,051 filed on 1999 Mar. 23, Application No. U.S. 60/169,906 filed on 1999 Dec. 10, Application No. U.S. 60/125,362 filed on 1999 Mar. 19, Application No. U.S. 60/169,980 filed on 1999 Dec. 10, Application No. U.S. 60/125,361 filed on 1999 Mar. 19, Application No. U.S. 60/169,910 filed on 1999 Dec. 10, Application No. U.S. 60/125,812 filed on 1999 Mar. 23, Application No. U.S. 60/169,936 filed on 1999 Dec. 10, Application No. U.S. 60/126,054 filed on 1999 Mar. 23, Application No. U.S. 60/169,916 filed on 1999 Dec. 10, Application No. U.S. 60/125,815 filed on 1999 Mar. 23, Application No. U.S. 60/169,946 filed on 1999 Dec. 10, Application No. U.S. 60/125,358 filed on 1999 Mar. 19, Application No. U.S. 60/169,616 filed on 1999 Dec. 08, Application No. U.S. 60/125,364 filed on 1999 Mar. 19, Application No. U.S. 60/169,623 filed on 1999 Dec. 08, Application No. U.S. 60/125,363 filed on 1999 Mar. 19, Application No. U.S. 60/169,617 filed on 1999 Dec. 08, Application No. U.S. 60/126,502 filed on 1999 Mar. 26, Application No. U.S. 60/172,410 filed on 1999 Dec. 17, Application No. U.S. 60/126,503 filed on 1999 Mar. 26, Application No. U.S. 60/172,409 filed on 1999 Dec. 17, Application No. U.S. 60/126,505 filed on 1999 Mar. 26, Application No. U.S. 60/172,412 filed on 1999 Dec. 17, Application No. U.S. 60/126,594 filed on 1999 Mar. 26, Application No. U.S. 60/172,408 filed on 1999 Dec. 17, Application No. U.S. 60/126,511 filed on 1999 Mar. 26, Application No. U.S. 60/172,413 filed on 1999 Dec. 17, Application No. U.S. 60/126,595 filed on 1999 Mar. 26, Application No. U.S. 60/171,549 filed on 1999 Dec. 22, Application No. U.S. 60/126,598 filed on 1999 Mar. 26, Application No. U.S. 60/171,504 filed on 1999 Dec. 22, Application No. U.S. 60/126,596 filed on 1999 Mar. 26, Application No. U.S. 60/171,552 filed on 1999 Dec. 22, Application No. U.S. 60/126,600 filed on 1999 Mar. 26, Application No. U.S. 60/171,550 filed on 1999 Dec. 22, Application No. U.S. 60/126,501 filed on 1999 Mar. 26, Application No. U.S. 60/171,551 filed on 1999 Dec. 22, Application No. U.S. 60/126,504 filed on 1999 Mar. 26, Application No. U.S. 60/174,847 filed on 2000 Jan. 07, Application No. U.S. 60/126,509 filed on 1999 Mar. 26, Application No. U.S. 60/174,853 filed on 2000 Jan. 07, Application No. U.S. 60/126,506 filed on 1999 Mar. 26, Application No. U.S. 60/174,852 filed on 2000 Jan. 07, Application No. U.S. 60/242,710 filed on 2000 Oct. 25, Application No. U.S. 60/126,510 filed on 1999 Mar. 26, Application No. U.S. 60/174,850 filed on 2000 Jan. 07, Application No. U.S. 60/138,573 filed on 1999 Jun. 11, Application No. U.S. 60/174,851 filed on 2000 Jan. 07, Application No. U.S. 60/126,508 filed on 1999 Mar. 26, Application No. U.S. 60/174,871 filed on 2000 Jan. 07, Application No. U.S. 60/126,507 filed on 1999 Mar. 26, Application No. U.S. 60/174,872 filed on 2000 Jan. 07, Application No. U.S. 60/126,597 filed on 1999 Mar. 26, Application No. U.S. 60/174,877 filed on 2000 Jan. 07, Application No. U.S. 60/126,601 filed on 1999 Mar. 26, Application No. U.S. 60/154,373 filed on 1999 Sep. 17, Application No. U.S. 60/176,064 filed on 2000 Jan. 14, Application No. U.S. 60/126,602 filed on 1999 Mar. 26, Application No. U.S. 60/176,063 filed on 2000 Jan. 14, Application No. U.S. 60/128,695 filed on 1999 Apr. 09, Application No. U.S. 60/176,052 filed on 2000 Jan. 14, Application No. U.S. 60/128,696 filed on 1999 Apr. 09, Application No. U.S. 60/176,069 filed on 2000 Jan. 14, Application No. U.S. 60/128,703 filed on 1999 Apr. 09, Application No. U.S. 60/176,068 filed on 2000 Jan. 14, Application No. U.S. 60/128,697 filed on 1999 Apr. 09, Application No. U.S. 60/176,929 filed on 2000 Jan. 20, Application No. U.S. 60/128,698 filed on 1999 Apr. 09, Application No. U.S. 60/176,926 filed on 2000 Jan. 20, Application No. U.S. 60/128,699 filed on 1999 Apr. 09, Application No. U.S. 60/177,050 filed on 2000 Jan. 20, Application No. U.S. 60/128,701 filed on 1999 Apr. 09, Application No. U.S. 60/177,166 filed on 2000 Jan. 20, Application No. U.S. 60/128,700 filed on 1999 Apr. 09, Application No. U.S. 60/176,930 filed on 2000 Jan. 20, Application No. U.S. 60/128,694 filed on 1999 Apr. 09, Application No. U.S. 60/176,931 filed on 2000 Jan. 20, Application No. U.S. 60/128,702 filed on 1999 Apr. 09, Application No. U.S. 60/177,049 filed on 2000 Jan. 20, Application No. U.S. 60/138,629 filed on 1999 Jun. 11, Application No. U.S. 60/138,628 filed on 1999 Jun. 11, Application No. U.S. 60/138,631 filed on 1999 Jun. 11, Application No. U.S. 60/138,632 filed on 1999 Jun. 11, Application No. U.S. 60/138,599 filed on 1999 Jun. 11, Application No. U.S. 60/138,572 filed on 1999 Jun. 11, Application No. U.S. 60/138,625 filed on 1999 Jun. 11, Application No. U.S. 60/138,633 filed on 1999 Jun. 11, Application No. U.S. 60/138,630 filed on 1999 Jun. 11, Application No. U.S. 60/138,627 filed on 1999 Jun. 11, Application No. U.S. 60/155,808 filed on 1999 Sep. 27, Application No. U.S. 60/155,804 filed on 1999 Sep. 27, Application No. U.S. 60/155,807 filed on 1999 Sep. 27, Application No. U.S. 60/155,805 filed on 1999 Sep. 27, Application No. U.S. 60/155,806 filed on 1999 Sep. 27, Application No. U.S. 60/201,194 filed on 2000 May 2, Application No. U.S. 60/212,142 filed on 2000 Jun. 16, application Ser. No. 10/105,299 filed on 2002 Mar. 26, Application No. PCT/US02/09105 filed 2002 Mar. 26, Application No. PCT/US02/09188 filed 2002 Mar. 26, Application No. PCT/US02/09239 filed 2002 Mar. 26, Application No. PCT/US02/09370 filed 2002 Mar. 26, Application No. PCT/US02/09922 filed 2002 Mar. 26, Application No. PCT/US02/09135 filed 2002 Mar. 26, and Application No. PCT/US02/09257 filed 2002 Mar. 26.

LENGTHY TABLE
The patent application contains a lengthy table section. A copy of the table is available in electronic form from the USPTO web site (http://seqdata.uspto.gov/?pageRequest=docDetail&DocID=US20070031842A1) An electronic copy of the table will also be available from the USPTO upon request and payment of the fee set forth in 37 CFR 1.19(b)(3).

The application's sequence listing, which the Patent Office published only in electronic form, follows.

SEQUENCE LISTING (1734 sequences)

SEQ ID NO: 1 - DNA, 733 bp, Homo sapiens
gggatccggagcccaaatcttctgacaaaactcacacatgcccaccgtgcccagcacctgaattcgagggtgcaccgtcagtcttcctcttccccccaaaacccaaggacaccctcatgatctcccggactcctgaggtcacatgcgtggtggtggacgtaagccacgaagaccctgaggtcaagttcaactggtacgtggacggcgtggaggtgcataatgccaagacaaagccgcgggaggagcagtacaacagcacgtaccgtgtggtcagcgtcctcaccgtcctgcaccaggactggctgaatggcaaggagtacaagtgcaaggtctccaacaaagccctcccaacccccatcgagaaaaccatctccaaagccaaagggcagccccgagaaccacaggtgtacaccctgcccccatcccgggatgagctgaccaagaaccaggtcagcctgacctgcctggtcaaaggcttctatccaagcgacatcgccgtggagtgggagagcaatgggcagccggagaacaactacaagaccacgcctcccgtgctggactccgacggctccttcttcctctacagcaagctcaccgtggacaagagcaggtggcagcaggggaacgtcttctcatgctccgtgatgcatgaggctctgcacaaccactacacgcagaagagcctctccctgtctccgggtaaatgagtgcgacggccgcgactctagaggat

SEQ ID NO: 2 - protein, 5 aa, Homo sapiens
  Site (3): Xaa equals any of the twenty naturally ocurring L-amino acids
WSXWS

SEQ ID NO: 3 - DNA, 86 bp, Artificial Sequence
  Primer_Bind: Synthetic sequence with 4 tandem copies of the GAS binding site found in the IRF1 promoter (Rothman et al., Immunity 1:457-468 (1994)), 18 nucleotides complementary to the SV40 early promoter, and a Xho I restriction site.
gcgcctcgagatttccccgaaatctagatttccccgaaatgatttccccgaaatgatttccccgaaatatctgccatctcaattag

SEQ ID NO: 4 - DNA, 27 bp, Artificial Sequence
  Primer_Bind: Synthetic sequence complementary to the SV40 promoter; includes a Hind III restriction site.
gcggcaagctttttgcaaagcctaggc

SEQ ID NO: 5 - DNA, 271 bp, Artificial Sequence
  Protein_Bind: Synthetic promoter for use in biological assays; includes GAS binding sites found in the IRF1 promoter (Rothman et al., Immunity 1:457-468 (1994)).
ctcgagatttccccgaaatctagatttccccgaaatgatttccccgaaatgatttccccgaaatatctgccatctcaattagtcagcaaccatagtcccgcccctaactccgcccatcccgcccctaactccgcccagttccgcccattctccgccccatggctgactaattttttttatttatgcagaggccgaggccgcctcggcctctgagctattccagaagtagtgaggaggcttttttggaggcctaggcttttgcaaaaagctt

SEQ ID NO: 6 - DNA, 32 bp, Artificial Sequence
  Primer_Bind: Synthetic primer complementary to human genomic EGR-1 promoter sequence (Sakamoto et al., Oncogene 6:867-871 (1991)); includes a Xho I restriction site.
gcgctcgagggatgacagcgatagaaccccgg

SEQ ID NO: 7 - DNA, 31 bp, Artificial Sequence
  Primer_Bind: Synthetic primer complementary to human genomic EGR-1 promoter sequence (Sakamoto et al., Oncogene 6:867-871 (1991)); includes a Hind III restriction site.
gcgaagcttcgcgactccccggatccgcctc

SEQ ID NO: 8 - DNA, 12 bp, Homo sapiens
ggggactttccc

SEQ ID NO: 9 - DNA, 73 bp, Artificial Sequence
  Primer_Bind: Synthetic primer with 4 tandem copies of the NF-KB binding site (GGGGACTTTCCC), 18 nucleotides complementary to the 5' end of the SV40 early promoter sequence, and a XhoI restriction site.
gcggcctcgaggggactttcccggggactttccggggactttccgggactttccatcctgccatctcaattag

SEQ ID NO: 10 - DNA, 256 bp, Artificial Sequence
  Protein_Bind: Synthetic promoter for use in biological assays; includes NF-KB binding sites.
ctcgaggggactttcccggggactttccggggactttccgggactttccatctgccatctcaattagtcagcaaccatagtcccgcccctaactccgcccatcccgcccctaactccgcccagttccgcccattctccgccccatggctgactaattttttttatttatgcagaggccgaggccgcctcggcctctgagctattccagaagtagtgaggaggcttttttggaggcctaggcttttgcaaaaagctt

SEQ ID NO: 11 - DNA, 605 bp, Homo sapiens
ggcacgaggttggttggagcgagcatgtgggtctgcagtacccggcacgaggcgaacccccgcccggcagtggcgggggctgctcccagcttctggctgtcacggacctgccgcctcctcctactccgcatccgccgagcctgcccgggtccgggcgcttgtctatgggcaccacggggatccagccaaggtcgtcgaactcaagaacctggagctagctgctgtgagaggatcagatgtccgtgtgaagatgctggcggcccctatcaatccatctgacataaatatgatccaaggaaactacggactccttcctgaactgcctgctgttggagggaacgaaggtgttgcacaggtggtagcggtgggcagcaatgtgaccgggctgaagccaggagactgggtgattccagcaaatgctggtttagagtctcgctctgttgcccaggctggtgcaatcttggctcactgcaacctgcaacctccacctcacaggagaatggcgtgaaccccggaggcagagcttgcggtgggccgagattgcgccactgcactccagcctgggcgacagagggagactccgtctcaaaaaaaaaaaaaaaaaa

SEQ ID NO: 12 - DNA, 1493 bp, Homo sapiens
ggcacgagttttttttcatataaaactatttattcataaatattttccaaaatgaaaataggtttaccaaaaaatgtccctcactggggagggggatcagcatgcgggggaagggggtgggtagagggaggggccggtgtcactggaggtcccggtcctccaggtagcggtactcaaaggtgaagccttccttcttccgctggccccacttctcgtagtcaaagtagatgtaggtgccctgctcaaactcgtcagtgatggtcttgggctcctcgtgcctctggaaccacatcatgtacttggtgtggaatcgccatgactgcttctttagggccttggctgccagatactgtgccttagtgccctccagatagtagaagatgaagaagagagtctcggtcgacaggcgctggtagaattccacagtgtccgagtgtgggggtggcatctggtggtggtaggggggcgtcggacaggggttccgggggaggtactgccgaatacgctcagagtcagaggggtgaggcatgtggtgccaggcggcctcttccatggcctgctgatagagctgctccttggtgaggggcacagggcccagtggacagacacccagcgacagcggtatgttcacctctgacagctgcaggggcggctgggctgaggccggaggtgctgatgtactgctcaggatgatgtctcgctcggtcaggtgcagcgttggcacagggtcctcaatgccagagctgatggctgcccgttccgccatggacttcaaggagctcagaggctcagggccttgatttctgggcggtgctgaactgtggaggcccattgagcagggcaccggctgccttggcatcactgaagctgggcgttggggagctgggaggattcacaggcagtggcaccaggaggctgggtccccctgagttgttccctgagcctggggccacgcccccagcccccgttggggctgccgcactgggttccttcgaggtgctgggaggtgggttgtgggggccggaaggggggcccaaggcctggctgctggcattgttgcccccactgctgctcaaagccacctctgccgggctgtctgccacaactgagctgtaactggtggcgccattctgcttgccagcccctccaccggcactgctgttactactgctgctgctccctccgcctccgctgccgccggaggggtaggtgggcggcacagctggggactgagggtgctggttgctgtggacaggcttggagccgtttttggctggagactggctgacttcactgtctgtggaacgtcccctcttcttatcatcttcagagttttccgtggtacagttggctgggctgggcgggatgggagagctggaggtggttgaggtgggcgtgctgctggactggttgaagatctcatcctccatgtggctgtggctggggggggaggtggcgaccagcgcctgtggaatgtcctcgagggggggccc

SEQ ID NO: 13 - DNA, 1300 bp, Homo sapiens
ggcacgagagcaaacttgcaggccctaatagcaacaggaggcgacatcaatgcagccattgaaaggctgctgggctcccagccatcgtaatcacatttctgtacctggaaaaaaaatgtatcttatttttgataatggctcttaaatctttaaacacacacacaaaatcgttctttactttcattttgattcttttaaatctgtctagttgtaagtctaatatgatgcattttaagatggagtccctccctcctacttccctcactccctttctcctttgcttatttttcctaccttcccttcctcttgtctccccactccctccctctttgtttccttccttccttatttcctttagtttccttccttagccgttttgagtggtgggaatcaatgctgtttcactcaaaagtgttgcatgcaaacacttctctttatcctgcatttattgtgattttgggaaacaggtatcaaccttcacagttgggtgaacaagtgttgtcctacagatgtccaatttatttgcatttttaaacattagcctatgatagtaatttaatgtagaatgaagatattaaaaacagaagcaaattatttgaagctctctaatttgtggtacgatattgcttattgtgactttggcatgtatttttgctagcaaaatgctgtaagatttataccattgatcttttttgctatatttgtatacagtacagtaagcacaattggcactgtacatctaaaaatattacagtagaatctgagtgtaatatgtgtaaccaaaatgagaaagaatacaagaaatgtttctggagctagttatgtctcacaattttgtagaatcttacagcatcttgtgataaacttctcagtgaaaatgttggctaggcaagttcagttaaaatatagtagaaatgtttatcctggtatctctaagtatacatttaattgtacagaaaatttacagtgtaacattgtgtcaacatttgcagattgactgtatatgaccttaatctttgtgcagcctgaaggatcagtgtagtaatgccaggaaagtgctttttacctaagacttccttctcagcttctcccataaagagaccctaatatgcattttgatttgtaattggaaatgtaactttcactgaaagtgtcatgtgatgtttgcattacttttaactgctatgtataaaggaaagtgtgtcttttgacttcatcagttatttctcttgtgcacagagaaaaatgcattaaaaatgactaaaaaaaataaaaaattaaaaaatgaaaaaaaaaaaaa

SEQ ID NO: 14 - DNA, 3239 bp, Homo sapiens
ggcacgagctgtcttctgcctgcagtgcccaggagcttgtgaagctgctcaacgagctctttgcccgctttgacaagctggcagctaaataccaccagctgcggattaagatcctgggcgactgctactactgcatctgcggcttgcccgactaccgggaggaccacgccgtctgctccatcctcatggggctggccatggtggaggccatctcgtatgtgcgggagaagaccaagactggggtggacatgcgtgtgggggtgcacacgggcaccgtgctggggggcgtcctgggccagaagcgctggcagtacgacgtgtggtcgactgatgtcactgtagccaacaagatggaggccggcggcatccctgggcgcgtgcacatctcccagagcaccatggactgcctgaaagggagtttgatgtggagccaggcgatgggggcagccgctgtgattacctagaagagaagggtattgaaacctacctcatcattgcctccaagccagaggtgaagaaaacagccacccagaatggcctcaatggctcggccctgcccaatggagcaccagcttcctcaaagtccagctcccctgccctcattgagaccaaggagcccaacgggagtgcccacagcagtgggtccacgtcggagaagcccgaggagcaggatgcccaggccgacaacccctcattccccaacccacgccggaggctgcgcctgcaggacctggctgaccgagtggtggatgcctctgaagatgagcacgagctcaaccagctgctcaacgaggccctgcttgagcgagagtccgcccaagtagtaaagaagagaaacaccttcctcttgtccatgcggttcatggaccccgagatggaaacccgctactcggtggagaaggagaagcagagtggggctgccttcagctgctcctgcgtcgtcctgctctgcacggccctggtcgagatactcatcgacccctggctaatgacaaactatgtgaccttcatggtgggggagattctgctcctcatcctgaccatctgctccctggctgccatctttccccgggcctttcctaagaagcttgtggccttctcaacttggattgaccggacccgctgggccaggaacacctgggccatgctcgccatcttcatcctggtgatggcaaatgtcgtggacatgctcagctgtctccagtactacacgggacccagcaatgcaacggcagggatggaaacggagggcagctgcctggagaaccccaagtattacaactatgtggccgtgctgtccctcatcgccaccatcatgctggtgcaggtcagccacatggtgaagctcacgctcatgctgctcgtcgcaggcgccgtggccaccatcaacctctatgcctggcgtcccgtctttgatgaatacgaccacaagcgttttcgggagcacgacttacctatggtggccttagagcagatgcaaggattcaaccctgggctcaatggcactgacaggctgcccctggtgccttccaagtactctatgacggtgatggtgttcctcatgatgctcagcttctactacttctcccgccacgtagaaaaactggcacggacacttttcttgtggaagattgaggtccacgaccagaaggaacgtgtctatgagatgcgacgctggaacgaggccttggtcaccaacatgttgcctgagcacgtggcacgccatttcctggggtccaagaagagagatgaggagctgtatagccagacgtatgatgagattggagtcatgtttgcctccctgcccaactttgctgacttctacacagaggagagcatcaacaatggtggtattgagtgtctgcgtttcctcaatgaaatcatctcagattttgactctctcctggacaatcccaagttccgggtgatcaccaagatcaaaaccattggcagcacgtatatggcggcttcaggagtcacccccgatgtcaacaccaatggctttgccagctccaacaaggaagacaagtccgagagagagcgctggcagcacctggctgacctggccgacttcgcgctggccatgaaggatacgctcaccaacatcaacaaccagtccttcaataacttcatgctgcgcataggcatgaacaaaggcggggttctggctggggtcatcggagcccggaaaccacactacgacatctggggcaatacagtcaatgtagccagcaggatggagtccacgggggtcatgggcaacattcaggtggtagaagaaacccaagtcatcctccgagagtacggcttccgctttgtgaggcgaggccccatctttgtgaaggggaagggggagctgctgaccttcttcttgaaggggcgggataagctagccaccttccccaatggcccctctgtcacactgccccaccaggtggtggacaactcctgaatggcctcgagcctgcaacagtccaaaccggaagggagaatttattttttgaaactgaaggaagtcccgaccttcctggattgaagtgcacactcatggactttaggtttagaaacctcctcagccttcatttgttcgtggatgtgtgagctctgagggtggccctgctattcctgtgtgtgcctgtagtgtccccagcataggggtcttaggcatagggctgaacagtccttccagagccctcgttccaatccctgccgtccttgcccctgaggggccctgaccactgtgagcaggagggtggcagagctgggacaaagctgcctttgccgctgggctttccgggactgtggagggagcacaggcggggaagctccacttcagacagggcttggtggggcaggacatggctcccattttgaagggaggtctccatgtggtccgagtgaggtgagacggccctcgtcctggtgttcctgatcatcttgaaaggttcttctggaactcctgtccccttagtcatgagaacagaaagtgcaatatttcctttcacctggcaggggaggggggatttatttctgaaagaaaaatatataaacagatcttctacatttatatttttaatcttctgttaaatacactttccgatattgccttgccttttgagctcttgctacagtcgcctttgctactgctttaagagaatttacaggtattgataaagaacaagactgttttattaaaagctttattcaacttgaaaaaaaaaaaaaaaaaaaaaaaaaaa

SEQ ID NO: 15 - DNA, 841 bp, Homo sapiens
  misc_feature (23)..(23): n equals a,t,g, or c
  misc_feature (45)..(45): n equals a,t,g, or c
  misc_feature (69)..(69): n equals a,t,g, or c
  misc_feature (84)..(84): n equals a,t,g, or c
  misc_feature (762)..(762): n equals a,t,g, or c
  misc_feature (767)..(767): n equals a,t,g, or c
  misc_feature (782)..(782): n equals a,t,g, or c
  misc_feature (789)..(789): n equals a,t,g, or c
atttttgggaatttggcggttanatttacccggaacggttttccnttgttccgcaagtcgaattacctncctaagggaacaaangtggagttcaccgggttgcggccggttttaaactagtggacccccggggctgcaggaattcggcacgagatcctgacccaagctcaggcacacccaaggcacctgcctctctgagtcttgggtctcagttcctaatatcccgctccttgctgagaccatctcctggggcagggtccttttcttcccaggtcctcagcgctgcctctgctggtgccttctcccccactactactggagcgtgcccttgctggggacgtggctgtgccctcagttgcccccagggctgggtgcccaccatgccccttcctctttctcctcctacctctgccctgtgagcccatccataaggctctcagatgggacattgtgggaaaggctttggccatggtctgggggcagagaacaaggggggagacacaagtagacctcaggtagaacgacactgggcggagccaccccagggcctgctcccagggagtgctcgaggcgcatcaggcccgttttttaccagtttatatcacggtcttcatttttaaaagtaacgctaactttgtagggacgatgtctcatggattaaataatattctttatggcagtaaaaaaaaaaaaaaaaaaaaaaaaaaaaaaaaaaaaactcgagggggggcccggtacccaatkcgccctrkagkgmktcgnattanaattcactggccgtngttttanaaattcgtgaatggggaaaaccctggggttacccaacttaaacgccttgcag

SEQ ID NO: 16 - DNA, 667 bp, Homo sapiens
aattcccgggtcgacccacgcgtccgcgcagtccgaggcacgcagtccgaggcacgcacaggagtcccacagcactgcgtgtgtcggcgggacgcaggcacacgtgggtgtgtgtgcatgtgtgtttgtgtgagggcagcgtgtcctccagtgtgcatggtgtgtgggcttgggccccatccctggcccgagcatttcatcctgtgggggaggggtgctgacctagtgggaggagccccactgtgatccatgagctgccctgcccacgcctcccctccctgtagcaacacctctgggtgtttggagtttagcttttgtgggtttgctctccctatcccatctcctgtactacacagttcatggcagggtggggaggggtggggttggttcgggtgggtgaggggctttttcctctgcgtgcgatgttgttatctgacagttctccgtccctactggcctttctcctcgtcttcatatttgtacggtacaagcaataaagacactcatttcagaccaggaaaaaaaaaaaaaaaaaaaaaaaaaaaaaagaaaaaaaaaaaaaaaaaaaaaaaaaaaaaaaaaaaaaaaaaaaaaaaaaaaaaaaaaaaaaaaaaaaaaaaaaaaaaaaaaaaaaaaaaaaaaaaaaaaaaaaaaaaaaaaaaaaaaa

SEQ ID NO: 17 - DNA, 2318 bp, Homo sapiens
ccacgcgtccgcccaaagttctggggtgacaggcgtgagtcactgtgcctggccacttcctggttcttagatgctgtctttttccctgtgtcctcccatagtaaaggggcagacaagctcccctgggtgtcttataaaggcactgatgtcactcacaaggcttctatgcccaataactaatcacctcccaaaagcctcctaataaaaccactttgggggttaggatttcaacataggaattttggggagggacacgaacatttagtccttaacagtgatgtatttatttcccatgttgtaaaggattgggcatggcttattttttgtcacatttgttccttattacatgctaatgatgggaaccctggtgttgatattactacatgatgttattgtcacatttactgagttttataatgctcagaatttaaaatggtgattaatatttttgcaggtaattcatgaatattgtactttttttctgaacccttattcagaaaaggggctctgccaagtggaaaaaaattatttttcatcattaaattttgaggtagtacttttgtgaatgtatggttttaataagtaggactatagacatacagcccccctttttttaacctttacagctggtaggtattttcctattttggttaatattggctttgttgcttgattatagcacactgctttgccgtgtttaactttgagggtgtgttgtgttgttgaacagaaactgaccttttcagatatttcttctttggtgaagatcagacagttgaagttgaagtattcttcccatcaaattatcctgagggaggactacagagccagtttagtgaggattaaaaaggaaaaaaaaaataggtgaacctttgtaaatgccatcctggactctgccaactgcttttccggggaatactgtggtggtctgtggccttgtcacaatcagggatattggtgaaaggcattccctgaactgggggccgacagcaggctgacttttgagcagtcctgccaccactttgattttttatcttcttcctgtgccatgacttttatgcattgtttatccagctccaaccagggggagacccactcgaaagggtcctccagaatgaatggagactttccatgaggagtccctgtcatgacagtgacctggtgtgtgcaagctctccccacttactgatggctggaaggcagtagtgcctgcaggtttgcccttgccgaacagtatgatgtcagtgtgaatcgggaccaggcctcatccaggctttaatcttttttttttttttttttttttttgagactgagcctgggtgacagagtgagactccatctcaaaaaaaaaaaaaaaaaaaaaaagtaaatagctttattgagatagaaatcgagtcacacacttgtgtatccatcaccacaatcaatttcagaatattttcagcaccccaagggaagaagcctttagcgatcgcaatccctccctattctctccttccccaacccccggcaaccactactgtattggactctctgtctccatgggttcacctattccggatatttcatatgagtggaatcatacaacatgtgttcatttcttatccggcttctttcactgaggatgttttcaaggatcatccatgttgcagcacgtgtcggttctttttatggccaaataatatttcattgtatggctagaccacattttcctgattgatgcatcagctgatagacatttgaactggttccaccttttggctagtatgaagaatgctgctgtgaacagtcaggcacacatttttgtgtggccatcggttttcgcttatcttggttctataactagtggtgaaattgctcagtcccatgggaattctgtttgttgagtggacaaggattccacttgtttctaggatttggagtgtgaggaaattgggagaaaaggcacattgttaaaaggtacataaatgtgttctgtgaaggagggctttgttgagctaggtcctaatgataactgctttccattactattttttctttattttctttttagaaggaagagattgttgtgactctcttaccagctggtcactgtccgggatcagttatgtaagggggtcatttattttgtcattttattatatgtagacacatattgtatttgtagaaataaatttttagggtctaaaattaatagggggctgggtgcagtggcacatgtctgtaatcccagtgctttgggaggctgacgcgggaggattgcttgagcttgggagttggaggctgcagtgagtttttttttaaaaaaaaaaaaaaaa

SEQ ID NO: 18 - DNA, 1913 bp, Homo sapiens
  misc_feature (12)..(12): n equals a,t,g, or c
  misc_feature (14)..(14): n equals a,t,g, or c
  misc_feature (398)..(398): n equals a,t,g, or c
ctcgcaagagantntttgtgtttctaatacaggatctggaagtagtgctttctaatcctcatttcctgtaggatgttcctgcactataacaagattatgttttcttccttctgcagcagctttctgcttcttgggtactactagctattgttcaattcaggtgaggcctgtgatgacatatatgtagcatgtgctctgcgctccctgcaagctgagcagatacaaccaatgcatcactgtatactcttgctgagaatgtggatgcagcctcacagatctttgcaacactccaaccagccaggaccagttgatcagaactgatcttattggtctgataaccaatcttatttgtgaactgattcatatctgtctttccactcttggttctcttgccgtangaacaaaaacagtttaggaagcataattacgaacatttaggaaccaatatgtataagtaattcggagactccaattcacctgcccctcccccatcccaggttgtggaggctcgaggaagctgacttcttaggctaaaggacaaaaaaatctctttacctccttggccattttcatgttctctgccaattactataggcagtcttcattttgcagaggtgaggtaagacttcatcttattcttcatgtaatcccaccttctaacaaaaaataaataaatatttaaattccaaggagaagtgttctttgtgtatttctagcagaaaacagatgcttaagcctaagaaggaagatccgtccatgacaaaggaaagtggaaaactgaaccagttatctgaatacttcatgccaggacagttgctattagcaactgttttgcaccttcagggctttaaaatgggctctgcagacagcatttgcatatgcaagactcagtagccaagcctccactgccaattgttgaaggcagtttcagatcgccaccttttgaggtacatttctttaagcacaagagaagtagaaatggcctttgccttgtctccagtggtttgtccctctggtgcctcagcagataccagagcttattcttatgaccatttggaagtagtcctcaaagtaaagatcaagaaaaaattggattctttttccattttctcataatagtagcctagtcaacacaagactcccataaaatatgactcactattgggagccatactattttataagcttacttcctgctgacaaaactagctttcctcaaggaaatataaaggaggggaaagtcacatagtgttaggaaaacattcctgtgttttgaatacgatgaatccataggatagagaaaaatctgcttgttctattctgagagttctctgagatatcccttcactctgcttggcatttggccattgatattcaacaggtcactgaccaagcttttctaaatttttcagagagagttacttaccaataaggtctgttcttaaacctacctagttgattttcatatctttccataaagtgtcatgattctatcatagaccctgacttaacattgtaaggactatgagtcctcccattttttaattaatttttttttagcaaattaggacttcggcaggttttcctctcctaaactcattctttcctccacaggattgctttgtccatctcctgctttcatttcaagtgcataaacaaaacctcaaagggcctgggaaggtgaggcaggccagagtctgtgttctgtgttgagtgtcaagctatttgttaagaaggtctgcaacaggcctttggtgtggctctgccagagactgttctgaacactttgcttgagatccgtgccctgtaaaatggatatgatgttttactgatgtctgtaatacatttgtaaacttccaataaaatttgaataaaaaaaaaaaaaaaaaaaaaaaaaaaaaaaaaaactcgag

SEQ ID NO: 19 - DNA, 330 bp, Homo sapiens
ggcacgagccagcaccagcgtcctagatggccccagcaccagctccaccatccggaccagaaatgctgccagagctggcgccagcttcttctcctggatccagcaccgttgacgaactgcagcgatcttactggccaagccagagcgcctcctctcagattccttctcgacacagcaccctaggcggcttcttcctgtcagtcggaggtggcatgcaagatgaagctctctttgctcttcctgctttcattttgtgcttttccttgtgttttcatgttttgggtatcagtgttacattaaagttgcaaaattaaaaaaaaaaaaaaaaaa

SEQ ID NO: 20 - DNA, 743 bp, Homo sapiens
gattggtcagatttgccttttttcagaatctgaagtcattccgtactgtatgtacacatttgtgtctggcttggctccagataaagtttttgggattcatgaatgttgttgcacgtattaggagagactcctttgtattgctgagtagtattcccctctgtggttagaccatgatttatttatccatctacctgttggtgaacattttggctgtttctaattcttggccatcatgaataaaactgctgtgaatgttcctacaataataattgtctaaacatatgtttttatttcttttgtgtcttagtccgtcgggctgctataactaagaaccacagcctgggtggcttataaacaacagaaatttatttttcatggttctggaggctgggaagtccaagatcaaggtgccagtggattcagtgtctgttgagggcccatgtcttgattcatagatggcggtcttcttgctgtgttctcctagacatggcagaaggggcaagggagctctctggggtctcttttataagggcaccaatcccattcatgcaggctctgccctcatgacctaatcacctccgaggaggcccaaaggccctacctccaagtaccatcatatgagggattaggtttcaaggtatgaacctggggaggacataaacagtcagtctagctttttgggtaaatgaattgctgggcttaataataaatgtatatttaactgtaaaaaaaaaaaaaaaaaa

SEQ ID NO: 21 - DNA, 1592 bp, Homo sapiens
  misc_feature (5)..(5): n equals a,t,g, or c
  misc_feature (805)..(805): n equals a,t,g, or c
  misc_feature (857)..(857): n equals a,t,g, or c
  misc_feature (1587)..(1589): n equals a,t,g, or c
ccccnataacaatgcataagttatagattacataccattcagtgtagcatgatgaaatctcttgccaatctgttccatccacctgggatgtgaatcatccctctctctggtgtattcayactgtatgtgctagccgtctctgttacgagatcagctgtcgtggaatcagtgctagtgttcaggtaactcttatttaataattgcctcaaagtgcattgtgctgtgcctaatttataaaataaacggtatcataggtatgtatgtatacgaaaaacatagtatatgcagggttgggtactatccacagtttcaggcatctactggggggtcttggaatatatccccagaggtaaggggtgactactgtatacagccatgccaacatgctggttctcagagagttataagagagattaaaaatacatgcagctgtttgggcactttcttcccaaataaaatacccagtaaaatgtaacatactacctatagcttgataatctatctgaggatgtttatgatgtctgtctatatactttaatttggccttagcttctttgtaggtatcaagttatcacttgcaaatttattttcaaaaagcatagtttcttgtacattttagaagattagtttttcttattttgggacacctacaccaatgttttaaatgtggataaattttaatgtggaatttcttttaaaaataatcctcttcatagagcaatacaacaaaaatgtgttgtatcttggagatttacattataaatgtagtaacatttatgagcttaaatttaatgaaacctttttntttttttgagacagtcttgcactgtcgcccaggctagagtgcagggcatganctcagctcactgcaacctccgtctcccgggttcaagcaattctcgtgcctcagcctcctcagtaactggcattataggtgtgcaccaccacacctggctaatttwrgtatttwtcataaagacgggggtttcaccatgttggccaggctggtctcaaactcctgacctcaggtgatcagcctccctcggsctcccaaagtgctgggattacaggcatgagccatggtgcctggccaaacgtttttattacaaatattacattaaactaaagctcacaactgttactatgcatcaggaattaacagtcatttctcatttgtgttatycyccwattkgatamcatatagtgactatctctttatgggttaaatatcagtttcttggccagaattcaagatctgcccctaactaatcctacttctcccagtacccttacagcactcctaccctactagtaactctgatatctcatagtcctcagatttatcaagcaaacgaaactgaatgagcactactataaggtaccacaaactacaaaaggagacagttttgcccttgttgctttcagttaaattattgtgctattttttgcttaatttctaggttttttttgcgtgtttatcatgtctccgtaggtaaagtggccagaaatctttttctactttacatttcctgtaagtgctgtttgtttgaataaagttaatgtgtgaggttaaaaaaaaaaaaaagnnnaga

SEQ ID NO: 22 - DNA, 1284 bp, Homo sapiens
gagctggccctatctgtctccgtccttgctacacacagctactgggaggatcattccaaaacacaaatctgagagagtcttcccttgccctcaacataaagactagactccagccaggcctaggaagccctgctcaagccagagtccacctacctgggccctctctcctatttcccattctgctactctgcttaacacacatggaatttatgccaaactacttggtgctctcaaaacatgccatggtgtcttttgcctctgtgtcttcacatattgtgtgtctctgcctgaaatgcttttccccgccttgataacctggtgaacttccagtcattccttgctgatgcagacagatgggtgagtgactgtacaccttcctctcccttgctaccttccatcagagaggctgggaagcaaaccctctacttccccagcctcccttgcagtgaggggtgcccacatgagagacattgtctggcaccagcccttccccactgctttctgtcttgaacccagatgtgatgcctggtgcagctgcagccatctcatgaccatgtcacaacaaacaccacaccacccaagtgacaagatgaacagtgcctggatgcctgatgacatggttcagctgccaggccaaccccaagcagccaacctccggaattctcatgagataattaaacattgttaagactgaagacactgtgaatcaaattgcctgtcacttgcaactaaaagcactcctgattgacactgggcctcacctcaagcacccactactcactgaagtccttctggatccctgctcctagtacaccttgcacaagcccatctcagcacttgtcctgttcactatattagatttgctcattgtctccctcccccattatactgagaccttttagaggaaagagactgagtctttccactttaatctttagtacctagcccagcccctagcacacagcaagtctttagtaggtagatttgtagaatataggtctattttccagccttatattgtaattttatacttacagtatttttattacaagctgcctccattccttattttaaaaaggccaagagaaacctagatgtccatcaataatggactggataaagaaaatgtattatggccgggtacagtggttcacatctgtaatactagcactttaggaagctgaggcaggaggattgtttgagcgcaggagttcaagacaagcctgggcagcacagtgagaccctatctctaccaaaaaaaaaaaaaaaaaaaaaaaaaaaaaa

SEQ ID NO: 23 - DNA, 5684 bp, Homo sapiens
  misc_feature (706)..(706): n equals a,t,g, or c
  misc_feature (755)..(755): n equals a,t,g, or c
aattttgggactgttgaccttgctgtgagaaaagagacaacgactgagcaagcactaccaccagcactgttactgggaattagaagacctgagtttctgtccagaccctcagtgcaaactgaggatgctccatccaaagtgaattatggtacttgccattttccaaaatgccttatcctttaccatctctgcacttttgttcatactctcattctactttggaactgctgctctgtggcttttcatctgtcaaaactgccattttctcagtatccaactcttatgccctcttttccatgagtctcctaactagccagaatagagctttaaagttttatgacatttcgttatgtatcctctatctgtatacaaaatcctgtaaaatagttacttgcctgcatttactgtctttgcagatagcagactccttgaaagcagggtccttgtttagtgcatctttgcccacatacaccacaacttatcaagatgcatttattaggaaggaggagtttagagagcaggctatcagaataaccactcagtaagtgttttcttaattgctatgtgataacttacattactcttaatgaggagaaaagtcgctagatatggatcatgtttatgttttaatgttttttaattctaaatttkgatctagggagccctcagacataaggagaaaccaatatgttgaakgatggggtantacatacagaaggaccaagaccttattttctccyacttaagaggaatcntgkyaagatgmmmggacagctttttaaaaggagaaggtcataagacagtttgaggaaggcattggaagaggaagargggcaatgtctcctttgktttattgttggtatataaacttaaaatctcagttctttttatggcacttgtggagccacttcctctcctcaccaaaaaatgcccagtaccctgaatccgatcaaattactctcctaaagtataaggcttagtttctgtgtgctgcttcgcgagacagttcccacaaatcgagagtgttaatcagacttttgtgttttcttttttggattgctgttgtttgttttcatttatcatttgtctttgcctaagccaggctcatcaagaattaacagccatcaggctgccgatgtgctgacagcagacccacttagagtcctgtgtttgtaattccatgcattkgttattttacctgttttgkccctgccccttctagtcctgtgcctcctgattgctgagtgttcacctggaccttctgactaccttccctgtgctattccatcagcctacagacctggtacctggatttttgcccgagatgattcctaccaccttactactgacgaagacacccattccagtggaccactgtgacccaggaggcattcagccatcatgatgtggcctttacctccactcctgtcttgttctacccagattcagcacagccctttatagtgaagtcagagtcctcaagccaaatagctaaagctgttttatcacaacaaaggcctagtttgttccatgagtgtgcatttcatttcttcagttaaagccttcagagacacacaataaatttggaccaggggattttttagttattaatgctctctgaagaaaggcaacatctttttgagagcagcattggaccacaccccacaatctcaaatgattgaaattcatgaacatctaggatcccatgaaggtcactggaccctgttttttctacttcaaatcctgtagtagcctactgaatgagaaaacatattctgacccattgggatcaaatcaaaggcacagtgaactcctcatagcatcttctttggaattactcaggaaccagaactttttacacaaatgtaagaaattctaccaaggagtccccttacctaacagcatctcacaaggctgcaccagattccagaaaaggcttctcttgatacatcaaggtagaaccwctatgcattttgtgaccgacttattcttagatcattggttttccaaaggctttgtggccatgaagccctttgagtgaaaactgtgcagaagcccagagtaaaagtgaagctgctctggatgaagtagtgaagcaagagtaggggcctgaatcctgctacaactatcttcctttaccaccgtggtgacacctaaggggacttccttacaacaccttgaactcttccgaacacagtttgaaaaccactgccccagacagcaatatgtttgacctgaatggcattccaatcttttctgtacctccactcagcacagttcatgttcagtagatgctgaacattcttagaaatactgtgtgtgaacttagaaaagtgcaagaagacaggcatgtctttgaccccaggaatgatcatttgctgaagatggtgtcaagtgaacctagattaacagccctccactccagatggatatccagtgattcctagaatgggatatagccagagaacaattctatgcaccctacactgacagactcccttaagcaacaccagatgctctactggtacttgaagtacatgactttgaagtcttgaccctccatgaatacctgaattatcagcaagcgggttttgaagctggtgcctcattgaggccatattagagcaacttgtacatttgacctcttgttatcagccatggtactctacttcgtgtgcaagagataactatgaaagccaaattcaaatactggcaacatttcctaaaggggctcaatatctatcattcgtcttcttttccaaactacacatcactgtatgactcaaccagtagcagttatattgccccttggtttttattcagtttaactactgtttccaagataaatgagctaataagctttaaaaaaaaaaaaaaaaaaggctgaattcttttttcttcatcactggcatatctgcctattctccagaattattatgactattcagctcactttaacagttgaacttcaagcgacaatctttgaacaccccttctcatgtgatttaaaatgaaaccatttggaaaagtttcttctagccagtaatagattttttttttaattgctctgccttgtgccgagagatgttcttttaagatgaatcttttgatgtctgataccaccaaatataggtggtagggagagttggaggctggccctttgagcaggccattagcttacttgctgggcatttccgatagcttattgcctacctttttgctggaaacaaactgatttgaaaaacaaaatctatgaagactgcagctaaggattttatcggtagacttaagagcttttgtccttgtggatattttagtggaaccacatcagtctcaatactgtcattttacactgactcagagcagctgacttcattccttgccatgatatatatttaaggcaggcattgtaacagacataaagacaacttatctgtttcagcaggaaggattcagtttatgaactctcagaccagatcatgttgaacaaggagactttgatgtgtgtcatgagaaaactcattctttacttcccagtcaatttaaaggccagctatcctgagctactcgaatgaatgcactggttaaacattggaaatagtttgtttatatccttgtctctctctaggccaattgtgattacatgactcgactctacatctcgtcaaacaaggcctaggtctggttgctgtagactgctcgccctcaacaaataaaatctggttgactagcctccttgtatatacaactattatttgttaagaagaaattatcgtcaattttctactaccttccaattgtcagctctttttttcctctctggtttttcctatactttacagaaaaagacattgatctatactgccattccctctaatcctgccatactcagtcaaaaggaatgacttaagatgaagatgatcatctgctcgagtctaaaatatacattgtatataagaattggtgattagaaaagcaaaaaacctaaaacttaaatctaggagtctgtatactgtctccatgtctccatgcctcagatctcatctaaatctttgaacagcaccattcaaccaatctgaggccttgacttgcttgtaagatgattctcagagatcggctgagttaaaaaagatgacgacttgattaccaaagaaagtagggccaactttgacaaatctggctctgctgaccctgtcactcccagatgtagcatagactcctaaacagaacctcaagtctgattgaggataaggccttctcctgagctgaaagttctttggcagatgagcaagaaactgaaagctgatgtacctgactggctctgtaagatcagaaaactgtatccagaataagccctatggattaacccctgagtacccagagtaaaaactaatttacagaacttccttattgatctgctggttcttccagatcatattctggctattggtatggctggcctttctgaaggtaccctgcttgtctattttcctgactcagctcttgcctgcctttttcacatgttgctgcaattagactcaccgtgaggactacagtcaatttcagtctatcttgtgcccaatacaacaaggatttttaatagtaacaacccacacctcacccactaggactcaatgttcacaacaggaaggaccattgctgcatactccttgaccagcaacttttttgaagatatttttaagtgcagagtaggcctctattcctgtatgtaattgttcattttcagcacctggaacctcatctatcgggtctggaaggaatacagcagttcgaaagccgcgtccatttctctccttcagtagtgcagaaatgagtccgattcaccagtacacacagaactgtaccagttcaacctagcaaaagaagaaaagtttccactgtacttaaaatttacagctgactcaaattgcctcacagaattatttgatgtagaaggctagttgtcttacttcagatcagcaggacagttgggctctcagactcatgaccactgagtttgcttgtgttgaaactgtggtttcatccaacatatgctattggacatgattattattccattcaaatggattacagacttcttgaggacaggacaaacttatctctcatggtgtttttttagaatacttttataaccaaggaagaaaccatgccagctgttaccattcaacttcttaagcagagattaagctttttcatatctgttcttatcctggacatcagtagtttttaattgcccagcatccgttccatcttgtaacaactccctgatgtttcttaaaaccacctcttcctattttcagtctgtggtttggacagtctgacccaaccttgagctttgtgggtgaacatgtaattcagacctcatcaatcagcaaatccatctgaactgtggaggagaagctctctttactgagggtgctttagctttgtaggatgaaaacctcaaactaacagggcctaccatgtagagaatgaagccagtgcaggggaaagcagagccaaaatatggagagacttgaatcctgatgacagcgtttgtgcccctggatccaaccgtgcctgaagctagaatatcccctggacttttcagttatgtgaaccaataaatacccttttttgcttaaaaaaaaaaaaaaaaaaaaaaawaaaaaaaaaaaaaaaaa

SEQ ID NO: 24 - DNA, 785 bp, Homo sapiens
  misc_feature (9)..(9): n equals a,t,g, or c
  misc_feature (22)..(22): n equals a,t,g, or c
  misc_feature (39)..(39): n equals a,t,g, or c
  misc_feature (44)..(44): n equals a,t,g, or c
  misc_feature (774)..(774): n equals a,t,g, or c
caattggancgcaaccggcaanttaaatggtggagttancccantcaattaggcaccccaggctttacactttatgcttcccggctcgtatgttgtgtggaattgtgagcggataacaatttcaccacaggaaacagctatgaccatgattacgccaagctcgaaattaaccctcactaaagggaacaaaagctggagctccaccgcggtggcggccgctctagaactagtggatcccccgggctgcaggaattcggcacgagtgtgagctaggtcttcaagatttatagaatgttacttatgaacaaaatataattatttatggtacaattcttgtactttagcaaatctggagttagttcatagtcaaagtcagttaatatttcttagaggaaagttttgctttttgtggcaacatttttatagcttgtgtgagttcttttttatttaatgatttgaaagcatttttgcacagtcgtgaccgtgtgtggtggcgtcactgtaaccaaagtatatgcaccagcccttgtgcatttattgtttctcctgattttgtggatttaaatgtccaaatgcaaacctttgtgacttcctttggaggacttggcagcacagcatgcccccgtgacctgcctgctgtggtatgagctatgaccaagagcaggcttcctgctccatggagtcctgagttgctctggggcaggggattacgttatgaaaactaaccatgtgtaacaataaatctaccttagcagaaaaaaaaaaaaaaaaaanaaaaactcgag

SEQ ID NO: 25 - DNA, 874 bp, Homo sapiens
ggcacgagtttattagatatattttcactaagaaaagaaagcagagtgaggttgaagctgatctgggctatccaggtggaaaggcgaaagtcatccataaggaatctgatatgatcatggcattttctgttaataaggcaaattgtaatgaaattgttttggcttcaacacatgatgttcaagaacttgatgttacttctctactggcctgtcagtcatacatatggatcggagaagaatatgacagagaatccaaaagttcagatgatgttgattatcgtggttccactacaactctttatcaacccagtgcaacatcctattcagcaagtcaggtgcatccaccttcatctctgccatggctgggcactggacagactagcactggagctagtgtgcttatgaaaaggaatctacataatggtaagagaatgacttcacacccagtccatcaatactatcttacaggtgctcaggacggcagtgtacgtatgtttgaatggacgcggcctcagcaacttgtctgctttcgtcaagctggcaatgcaagagttactagattatattttaattcacaaggcaacaagtgtggtgttgcggatggagagggttttctgagtatctggcaagttaaccaaactgcatcaaatcctaaaccttatatgagttggcagtgccacagtaaagccacaagtgactttgcatttattacctcttcaagtctagttgccacatctggacactccaatgacaatagaaatgtttgcctctgggacacattaatatcacccggaaacagcctcattcatggtttcacgtgccacgatcatggtgccacggtactgcagtatgcacccaaacagcaactcctaat

SEQ ID NO: 26 - DNA, 2440 bp, Homo sapiens
tacggctgcgagacgacagaaggggccttctagcagaaatggcggctgcggcggctcgagtggtgttgtcatccgcggcgcgcggcggctctggggtttcagcgagagtcttctaatccgaggcgctgcgggacggtcattatattttggagagaacagattaagaagtacacaggctgctacccaagttgttctgaatgttcctgaaacaagagtaacatgtttagaaagtggactcagagtagcttcggaagactctgggctctcaacatgcacagttggactctggattgatgctggaagtagatacgaaaatgagaagaacaatggaacagcacactttctggagcatatggctttcaagggcaccaagaagagatcccagttagatctggaacttgagattgaaaatatgggtgctcatctcaatgcctatacctccagagagcagactgtatactatgccaaagcattctctaaagacttgccaagagctgtagaaattcttgctgatataatacaaaacagcacattgggagaagcagagattgaacgtgagcgtggagtaatccttagagagatgcaggaagttgaaaccaatttacaagaagttgtttttgattatcttcatgccacagcttatcaaaatactgcacttggacggacaattttgggaccaactgaaaatatcaaatctataagtcgtaaggacttagtggattatataaccacacattataaggggccaagaatagtgcttgctgctgctggaggtgtttcccatgatgaattgcttgacttagcaaagtttcatttcggtgactctttatgcacacacaaaggagaaataccagctctgcctccctgcaaattcacaggaagtgagattcgtgtgagggatgacaagatgcctttggcgcaccttgcaatagctgttgaagctgttggttgggcacatccagatacaatctgtctcatggttgcaaacacgctgattggcaactgggatcgctcttttgggggaggaatgaatttatctagcaagctggcccagctcacttgtcatggcaatctttgccatagctttcagtctttcaacacttcctacacagatacaggattatggggactgtatatggtttgtgaatcatccactgttgcagacatgctacatgttgttcaaaaagaatggatgcgactctgtacaagtgtcacagaaagtgaggttgcacgagccagaaatcttctgaaaacaaacatgttgttgcagcttgatggttcaactccaatttgtgaagatattggtaggcaaatgttatgctataatagaaggattcccatccctgagcttgaagcaagaattgatgctgtgaatgctgagmcaattcgagaagtatgtaccaaatacatttataataggagtccagctattgctgctgttggattctttcttcttaggatataatcacagaagtgaacttcatgaatggaaatggaacaagttattttccaaaaggcaaactatttcatactcctacgtgaacatccttttaccacagcctcagccacagtacgtctaattatttaaaatttgtgattatcgctggtggtcaacaatttttttgtttttcatcctttaactggaaaaaggaggggctgtctcagtttttcttctgactctgtgtgtcacttacaattaataatgctagctgttaacatctacatagcagttgacatgtgccaggcctgtttaccagttaatcttctccatgatcctatgaggaaagtgctattgctgtctccatttcatagatgaggaaaatgaggcacagaggagacgttatgtagccactaccactgcaacttgctcaaacttccggccaagtcggctctagtccagacagcctgactcctcagcctgcgtctgtatgctgcctctcctaattcattatgtttattaataatttttccccgttttgttaacacttatgtttcaaaaacagtcatctttatttacattgactgatcatttcttttgtaatttcttctagtacttacaatagttctagtttcattaacatttcctatagactgaaaaaattttttaatctttttggaattttaatatagtcaagaaagtatctaaacttctcatttttcaaaatcttactgtcatttaataatccttcccttttccactgawwwgtgacactataatagtaaattttacaagggcttgttttggttacttattcttgccctggggttatctttaaactgaccacagytttctaatatatttgatcgtaacttccaaaaactgtgtaatttttgcttatttgtcttgcatctagtcacttaactctcttttgcttttctaggcagatcctatattatctacaaataatatatttatttccttctttccaaaaaaaaaaaa

SEQ ID NO: 27 - DNA, 1142 bp, Homo sapiens
gaggcaataggtcggggaaggtgatgaatgttctgtggggcatgtcaaattgggtggaacctctggggccttctgtgggaratgcccagggagcacagatttaggagatgggagcaactagtgtgatggtggtgagggctggttgaaaccctggggagtatgtggagctcatctgtgtttccacagagcttatctcccaggagatagccatcgggagtgccttgcctggcatgttcccctgctgaggtctgttacccaggagcctgcagacacaaagagcaggctggtaatgctgagaagcgaacattcagtacctgtcaccagaacccagcatgggtgttcaacactatctggtgactctgtgagaagaccctatgctcaggggatgaagtgtgttgcttgtgcaagagggatggagagagagtgttttccaagtatatgtgtgtgtgcatgtgtgtgtacccaggtggaaccctcctgcatgctcacatatgcctttatgaatactggaatctctaaacctaccatcatgcatctcgtcttagcttcctacctctctctttctacccctgcaacagccatgttattgccagtaacacatgagaagagtgagggagacctgtctgtagacaagctcagtgtgctgctaaggaagcaggcagcagttctgtcctcatgcgttcccattgtgccctgtcctgggatggcaaatgcaaggccagacaggctctgggstctctggtctgaccactaatagcatcttctcctcccgctaggctgaccagcctccaaggcaggactctgacaccagggttataaatgcatctgtctgggcacattatctaaattgttatgtatcaccctgggtaatggcaaaagtaaaaaccgctgttagctcagtgaataaatccttggtgctgatcaatcattgcacgacatagactcttttaataggcacaatttacacagaggcttggcagactgcttcgtcttctaattgctgatggaaaatggatgccgagctctgctgtgccgtaaaaatgtaaactataaatgacttaaaaacttgtgtgctcccttctccacccagcactcattttaaccttttatttagaaacaaaaaaaaaaaaaaaaaactcgag

SEQ ID NO: 28 - DNA, 1346 bp, Homo sapiens
ggcacgagcagcgggacagtcagacaggcatggccaatccctttagggatcctttcatcaattccctcaaacaccggttgctggtatatttgtggcgccgggcagaacaggatggtagtgcaatggccaagaggcgcttcttccagtattttgaccaactgcggcagctgcgaatgtggaaaatgcagcttctggatgaaaaccacctgtttatcaagtacactagtgaggatgtagtaacactgcgagtcacagatccatcacaggcatctttctttgtggtgtacaatatggtgacgacagaggtgattgctgtgtttgagaatacatcagatgagcttttggagctctttgagaacttctgtgacctttttcgtaatgctaccctgcacagtgaagttcagtttccctgctcagcttctagcaacaattttgcaaggcagatccagcgccggttcaaagacactattataaatgccaagtatggagggcacacagaggcagtacgccggctgctgggtcagctccccatcagtgctcagtcttacagcggtacccctatctggatttgtctctcttcagttatgatgacaagtgggtatctgtcatggagcggcccaagacttgtggagatcacccaatcaggttctatgcccgggactcgggcctgctcaagtttgagatccaggcggggttattgggccggcccatcaaccacacagtgcgacgccttgttgccttcacctttcacccttttgagcctttcgctatttctgtgcagaggactaatgctgagtatgttgtcaacttccatatgcgacactgctgcacgtaggtgcctcaccagagccagattatctggtcttccaagactttgccactcacttatctcagtggactccaaagcaaaagctcccgactactagctctgttagttccagcctgctatacctcagatgggagagagccagagagaggagtgagggtggctcaacctaatggaatttttaaattgtatacaatactgctactgattgttataatatcctcttgcgttttccctgtgggaatgcccagcattaattaagtccatttcatttttgctttactttgcatttgattgctgtgaagatgaaagcattagacttttatccccttcatgtcacttcttcggcattatggtttgcatctgaaagcagttaaatcttgtttactgatgagaatgacatacatcctttccatttagctcataagcacggctatctttttaagagaaaaataaagccatggtattttcatacttaaaaaaaaaaaaaaaaaaaaaaaaaaaaaaaaaaaaaaaaaaa

SEQ ID NO: 29 - DNA, 1237 bp, Homo sapiens
tcgacccacgcgtccgggcagccatggagtctctgggatatttatgaaatatgatctcagttctcttatggtgacagttactgaggagcacatgccattctggcagttttttgtaagactctgtggtattgttggaggaatcttttcaacaacaggttaacaaccatttcctttttgtctaatttctgaaagtgttgcttatacttaagttgcttcttctcaaaggggcaagaagtatacagattttcatgtttcggtgtttaatagcttttgctttaattacaaaactccaaaattatatggactaaccagtaaacataactaatttcattgtattcaatgatgtaaggtagattatataatggtgagttggaaagatcctgggtgttaacatcagattgaagtagaattgaatgtaagttctgtcatttacttggtggtagcttggaatagatcacctaccttttctgaggttttctaatcagtaaaaatagcaataataatacctaatttgcaagtgtgctataggattaaatatgaaaatgcctagaaggcatttaagacatttttaactgtacagtatgtaaaatcatatgttatagtactttgaattatgcaatacatgaaactagatttgtaatcagtaacatgtttatgatttttgtcctgagatcctggaattcgctaagattatttgtcgaattgtaatgatgaaaattgggagttaagtccatagagaaaaaggaaacaatcctattttcaccttcagtccttattcagtattaatggagctggggtatttattatacttagaatcatatttttaaatgaatgaatagctttcttcgaaattcttgttagtgctcatttcatctatttaaatttgtgtggttgactcattattccaaatgtttgggtggaactgaaaagattgtgtttaggcccggtgcagtggctcatgcctatatcccaacactttgggaggccaaggctggcggatcaacttgaggccagaagttccagatcagcctggccaacatggctaaaccccgtctctactaaaaatacaaaaattacccggttatggtgtgcgcatttgtactgttagctactcgggaggctgaggttggggaatcgcttgaacctgggaggtagagattgcagtgagccaagatcatgccactgtactccagcctgggcaacagggtgagactctgtctcaaaaaaaaaaaaaaaa

SEQ ID NO: 30 - DNA, 2345 bp, Homo sapiens
  misc_feature (1088)..(1088): n equals a,t,g, or c
  misc_feature (1909)..(1909): n equals a,t,g, or c
  misc_feature (1913)..(1913): n equals a,t,g, or c
ggaactcctcgatgaggaccatctacagtgcttttttttttctatctctctgtctctcagttctgctttcttctacagtatttgatgactggcatcccatttctataagctgggtccagaactttgggctcacaccttcctttgacgtgcaagtgccacagaccctgagatgtttcttcagatcagggtgccgctggcatccactgaacttgcttcagtttaagctgagcaccttcctgagaatcatttcattttatctttcattctgtagtgagaagaggcttcagcatgaatagtctagggacatgcaagatgtataaaatagaatggagttgtgaattaggktatatgagggrgaaatttataaaaaatataaagcattgtaaagacaaatgcatgttacacaaaaccaggrgaccacttcattttaagaggtacctgctggtctcagaagctttaagtgatttataatctagtcaacaataagtggcagatgaactgaaaatatatttgcatgaagttcttagttcagaggtaaagctagggatgctatgcatggcaacactggaagggaaagagcttttgawatccaggtctgggcatttgcyctaatcagaggtcaacatcttctctgccctcataacccamtccccgccaggggtcctgtctcctagaccacacattagcagatataatayckgkcawtctggkttctcattctctttccagaaaaatccagacatgattttattgcaagatggagagaaaaggagacagcatcacatgtcttatattagtcacaaaaactggatgggttttatttcaggcgctaattcttttgagaacacaagggaaactttgatcttaatctatttgatgtggttttaagtaaaggagcatcttgtgcttactttgaaagtgtttttttacttcgggcttggtcaaatattacattttgttccagagaaaaactcatttggaaggcagcatggagtatagaattagacatccctgggcttgaagcccatctcagccatgaactacctttatgactttcagctagttacttttcctcactcagcttcagnttcttcatttataaagyaagtgcctcaacatcgctttttgactttcttaatcttgtctacgcatctacaagtagcccttttattactgatttttaactactcctggccattggaatgaccgagaagcccatgtctcattctcagacgggggattttgattctaatgacagtcatggttgagagtccactgtgttaaagtctcttcatttgaagcatctgatgtgaattctattttctgcttaaaccccagacatagatgttaagtttcaaaattatgtcgtacattcactcccactacatactcattgaatgcttaccatgtacagactctgtgatagactatggaaatacatagaaagaaattccctgtttttaagaactttacctagtgtttagaaattgcatttaaaactgataattaaaatactatagaccttggcttaaaggatgcaccttgtaatctgtaatcatatttgtagttatatattgctttgaaaatacactgtagacagtaagacaaaaaaggaaataaaaagtacatgaattgcgaaggagaaaataaaattggctttggtcacagatgacatgattggctatgtagaaaatcccgaggaactgacaaaacaaacaaacaaacaaatctagaactaattagttctagattatagcaaggktgcaggatcaagcttaatacctgaaagwaaattcctttcctatataccagccmtgaaccattggaatttgaaatcaaaatacmacaccattaatawtattaccaaaagagagagagggagamaatatgtattatgctaacaaaagangtanaaaaggtatgtgagaaaaactacaaatctctgatgaaataaatcaaaggagatctaaattaatggaaagacaaactatgctaatggataagaaaactcaatcttgttatgtgtcagttcattccaatttgatccatagattcaatgcaatcctagaaagctactttgtggacatctgcaaactgattctaaggtttacacgaaaaggcaaaaagatgcaatagtcgaaacaatattgaagaagaacaaagaagtcggactcttcttgacttcaagtctttctataaagctacaataatcaaaatagtgtggcattggtgaaagaatagatagatcaaaaccaattcaatggagaaagggaaaagacagtctttttaacaaatggtgctggaactggagttccttatgaaaaaaaaaaaaaaagggcggccgc

SEQ ID NO: 31 - DNA, 5143 bp, Homo sapiens
ggcacgagtggaactccccttcgtcactcacctgttcttgcccctggtgttcctgacaggtctctgctccccctttaacctggatgaacatcacccacgcctattcccagggccaccagaagctgaatttggatacagtgtcttacaacatgttgggggtggacagcgatggatgctggtgggcgccccctgggatgggccttcaggcgaccggaggggggacgtttatcgctgccctgtagggggggcccacaatgccccatgtgccaagggccacttaggtgactaccaactgggaaattcatctcatcctgctgtgaatatgcacctggggatgtctctgttagagacagatggtgatgggggattcatggcctgtgcccctctctggtctcgtgcttgtggcagctctgtcttcagttctgggatatgtgcccgtgtggatgcttcattccagcctcagggaagcctggcacccactgcccaacgctgcccaacatacatggatgttgtcattgtcttggatggctccaacagcatctacccctggtctgaagttcagaccttcctacgaagactggtagggaaactgtttattgacccagaacagatacaggtgggactggtacagtatggggagagccctgtacatgagtggtccctgggagatttccgaacgaaggaagaagtggtgagagcagcaaagaacctcagtcggcgggagggacgagaaacaaagactgcccaagcaataatggtggcctgcacagaagggttcagtcagtcccatgggggccgacccgaggctgccaggctactggtggttgtcactgatggagagtcccatgatggagaggagcttcctgcagcactaaaggcctgtgaggctggaagagtgacacgctatgggattgcagtccttggtcactacctccggcggcagcgagatcccagctctttcctgagagaaattagaactattgccagtgatccagatgagcgattcttcttcaatgtcacagatgaggctgctctgactgacattgtggatgcactaggagatcggatttttggccttgaagggtcccatgcagaaaacgaaagctcctttgggctggaaatgtctcagattggtttctccactcatcggctaaaggatgggattctttttgggatggtgggggcctatgactggggaggctctgtgctatggcttgaaggaggccaccgscttttccccccacgaatggcactggaagacgagttcccccctgcactgcagaaccatgcagsctacctgggttactctgkttcttycatgcttttgcggggtggacsccgcctgkttctctctggggctyctcgatttagacatcgaggaaaagtcatcgccttccagcttaagaaagatggggctgtgagggttgcccagagcctccagggggagcagattggttcatactttggcagtgagctctgcccattggatacagatagggatggaacaactgatgtcttacttgtggctgcccccatgttcctgggaccccagaacaaggaaacaggacgtgtttatgtgtatctggtaggccagcagtccttgctgaccctccaaggaacacttcagccagaacccccccaggatgctcggtttggctttgccatgggagctcttcctgatctgaaccaagatggttttgctgatgtggctgtgggggcgcctctggaagatgggcaccagggagcactgtacctgtaccatggaaccsagagtggagtcaggccccatcctgcccagaggattgctgctgcctccatgccacatgccctcagctactttggccgaagtgtggatggtcggctagatctggatggagatgatctggtcgatgtggctgtgggtgcccagggggcagccatcctgctcagctcccggcccattgtccatctgaccccatcactggaggtgaccccacaggccatcagtgtggttcagagggactgtaggcggcgaggccaagaggcagtctgtctgactgcagccctttgcttccaagtgacctcccgtactcctggtcgctgggatcaccaattctacatgaggttcaccgcatcactggatgaatggactgctggggcacgtgcagcatttgatggctctggccagaggttgtcccctcggaggctccggctcagtgtggggaatgtcacttgtgagcagctacacttccatgtgctggatacatcagattacctccggccagtggccttgactgtgacctttgccttggacaatactacaaagccagggcctgtgctgaatgagggctcacccacctctatacaaaagctggtccccttctcaaaggattgtggccctgacaatgaatgtgtcacagacctggtgcttcaagtgaatatggacatcagaggctccaggaaggccccatttgtggttcgaggtggccggcggaaagtgctggtatctacaactctggagamcagaaaggaaaatgcttacaatacgagcctgagtctcatcttctctagaaacctccacctggccagtctcactcctcagagagagagcccaataaaggtggaatgtgccgccccttctgctcatgcccggctctgcagtgtggggcatcctgtcttccagactggagccaaggtgacctttctgctagagtttgagtttagctgctcctctctcctgagccaggtcttcgtgaagctgactgccagcagtgacagcctggagagaaatgggacccttcaagataacacagcccagacctcagcctacatccaatatgagccccacctcctgttctctagtgagtctaccctgcaccgctatgaggttcacccatatgggaccctcccagtgggtcctggcccagaattcaaaaccactctcagggttcagaacctaggctgctatgtggtcagtggcctcatcatctcagccctccttccagctgtggcccatgggggcaattacttcctatcactgtctcaagtcatcactaacaatgcaagctgcatagtgcagaacctgactgaacccccaggcccacctgtgcatccagaggagcttcaacacacaaacagactgaatgggagcaatactcagtgtcaggtggtgaggtgccaccttgggcagctggcaaaggggactgaggtctctgttggactattgaggctggttcacaatgaatttttccgaagagccaagttcaagtccctgacggtggtcagcacctttgagctgggaaccgaagagggcagtgtcctacagctgactgaagcctcccgttggagtgagagcctcttggaggtggttcagacccggcctatcctcatctccctgtggatcctcataggcagtgtcctgggagggttgctcctgcttgctctccttgtcttctgcctgtggaagcttggcttctttgcccataagaaaatccctgaggaagaaaaaagagaagagaagttggagcaatgaatgtagaataagggtctagaaagtcctccctggcagcttcttcaagagacttgcataaaagcagaggtttgggggctcagatgggacaagaagccgcctctggactatctccccagaccagcagcctgacttgacttttgagtcctagggatgctgctggctagagatgaggctttacctcagacaagaagagctggcaccaaaactagccatgctcccaccctctgcttccctcctcctcgtgatcctggttccatagccaacactggggcttttgtttggggtccttttatccccaggaatcaataatttttttgcctaggtgcctgactcctttcagattccctctttatcttccctcacagtttggaaaggatgagggttatcttcctcgattcttccaccctctcactttcctgcctgttccccactccacaggagggagctgacgttggcttgaaaggagtaaagtcaacatctgctgctttcctgtggactctggtgattcatagagccggatggggagagtcaacaggaaaaaaggagggaggaggaaaagccacaagagacattctgtacaattccaaggaacagagaagcctttagacaggcaactgccatcccccctgaaacctgagacctgtagtgcactcgaccgccctcaggtgttggtgaaacagagctgcccccaggctcgctgggcataggcttcctgattccaagccttttctgggagcaaagccagggcctggtgcctgattttctgaagccaggagccctcaggtggctggagctggaatagcagggaggactgggtgtacctaggcagtattttctctacttctctcaagtcttatactcactcttgagccctccttggggcctgcttagaaagcagacaggagagagagtactgctacttgatgatgggaaatgctttcactttaccagctttgggaagcagcagccccatgggatctaaaagtgtggagtctgcattaagaaacctacatgggtggcatggggctctggggagcaagcccttacttgctcagcactggttatgtagcacaaatagctcctaggaaaatgtttctggggcaaccctagaaccctggtcatattttgcagggtttctctggtggaatcagtttgccagcccttgcttgatgcttactggaaatctccaggttaatttctatctctgatccctccccaacccactccatatttgggtcatggacagtaaaggcagttggattctcatagacaactgggtaacttatatttctttgtaatcaagacttgagatatcgaagtcagttattggtctccagagtgcagctctgggagccttttgaagaatcagcactcattaagagctgagaagagagaagacctgattgggtggttgactagcagtcacagaacctgtcctcccaggctgttcctgaggcctgaccacagtatttattttggcatgtctctggccttctgcagaggcccaccctcatgggcattgtctctgtttcccagtggggtggacagtatatcagatggtcagaacaaataaagttcagtgtcwaatgaaaaaaaaaaaaaaaaaaaaaaaaaaaaaaaaaaggggggggg

SEQ ID NO: 32 - DNA, 607 bp, Homo sapiens
ggcacgagtgggcctggaattcgccacaggacggatcttacagaggcaagtggtccctggacctctcttgcatccattctctagacggccgtgtcagaggctccaccctgttgtgaacttggtatggaggcaaaggcttagaggctggaccagcattcttgggcaaggactgactctcgaagggttttgttcttggctttggacacctgagaaccccctcctcccctcccccaatacaaggtttttgacatgagtgtactcctgcttagttcctcttgtggggctgcatttgcggtgctttgccctccccactgtgagtgaggggccaagggatctcctcaatcctgtctccccagcggctctgtttcctccttctttccttggcctctgtcctttgctgacttcctcttccttacccagcagaactcaccctggggtcggggcagtggggaggggcctatccactgctcttcctagtccttggcagctggcctaggtgggcagactataggagggactggttaggagtctgcattgctttgacttccctctccttggttaataaacacaaatgcttgtttctcaaaaaaaaaaaaaaaaaaaaaaa

SEQ ID NO: 33 - DNA, 1048 bp, Homo sapiens
gccgtcctgcaggtggttgccatcgcggccttcaccaggtagctacggacacccgggaataccccacactggggccctcctcctgggcctgaccagtcccccagctgtcacctccccattcctggacaggaagggcacttttcctagtgaactggccatagatggttttggatggttccatctgttctggcaggagtgggagcaggagccagggcagaacaaactgctggaggccctggtgttgggaacagctgcggggagggtagggaccagacagaactgccttcaagatgagtcccaggagcgcacactcagccctgtcagtggggtctggctttagcagccaggcctccacagacccccatgggcccccagggccgagagggaggacagagcccttcagaacagaggcctcatctcactgcatcccccatcaccccctagttccccaatggtcctaatttgtgttctgagatcccagtttactccgtggccaggccccacctgtgtttccaagtcgggctggagacgcaggatggggtaggccttgtgctctgagcaaccccagctctgcctcacaggcaggcaggcccggtgcaagagtggactctgggttcctaaagcaataaatgcaaacaagccaacagctctgctgcctagcaatttccatcttagccacacttctcccttcaggggcttcggaggagaggtcagggctaaggccggggatgagactgcaggagagagagcagcggagggccacattcggagcctccgtccactccagttttatcagcttttgccttttgcacggagtgctaaacaaattctagctctgtgtttttttcccattcccagatttactatcagttctccttaaaaagtatctaagctgttacagtagctttcccttcacttgattctattgtgtgttttctatgtttggaataattacacccaaatatctagatattttctcttcaccgcattttgtaaataaagagatgtgtatgccwmmmwraaaaaaaaaaaaaaaaagggcggccgc

SEQ ID NO: 34 - DNA, 596 bp, Homo sapiens
  misc_feature (564)..(564): n equals a,t,g, or c
  misc_feature (569)..(569): n equals a,t,g, or c
  misc_feature (571)..(571): n equals a,t,g, or c
  misc_feature (578)..(578): n equals a,t,g, or c
  misc_feature (580)..(580): n equals a,t,g, or c
cagctatgacccatgattacgccaagctcgaaattaaccctcactaaagggaacaaaagctggagctccaccgcggtggcggccgctctagaactagtggatcccccgggctgcaggaattcggcacgagaattggggaaaagggtattcaatatttattaagtaacaatgagaaatgcaacaaacttccttatttatgccttatgaataaaagagtgtggaatgtaaggtgaaattttatgtgcaagatcctgaaggaatgggtattcttgaaggcagggactgtcttttctatgtttgttctgtacagctctcagcacactcttggtgcttgataaatgttatgatgttatataataccaataactaagcacatttttagatcttttttcaaatggcttgtgtaaaatttggttaatgtacaatggttggtttgaagctatcatgtaaaattggcctctccaaatataatcagaaataaaccgaaaaaaatataaaaaaaaaaaaaaaaaaaactcgagggggggcccggtacccaattcgccctatagtgagtcgtatacnctaantnctttttntncctatagtgagtctta

SEQ ID NO: 35 - DNA, 1380 bp, Homo sapiens
gagtagatattcaacacatggacaagtgtttaattattctttgtatattcctgttgtttgtaaaacagcttataatttttaaaactattttaaagggaatgaaagtaggaattacagggaggcagttatcaattagatataaggatgaattctctagtagagttagatgtaataaagatattgccacactctatccatatgtttatacatcaaatttttactgagtacatacatcatgagacaaaataaacttcctgtcacaaaaggtgcttgaccaaaactcaagaatcacctttcagggatactgttaaaagtgttcccacatcagctaggagttagctctagagggcttttaagagctttggccatcccgaaattctatgcttgaaacacgttttctcatagaaacgctcctaccaaaggccagtgagagaactatcactttgtgaagaatttcagaatgcccactagctctcctgtagccctaaaaggtaatgagagtctacctgttcagactgagagctccggctgccttgtgctacagaagcagtaagtgcatgtaaaggacgccatatttctaagacaaaagcagtaacaatgactcaaggatgatgcctaatagacgatttaacctataactttgctaattgtcatattttcaaaacagccctatgggaagggtacacaaatgtctggggagtatttcctgctttttagcacccagggaactacaaccaggagcccagcttattttggattggggatggggatagacaagaagagatggggcagggagaagagacggctggtttattttacatacacatattttatttataatacatctctgtgtctaggaggctctatgctggtctcataaaatctgaattatacaaataaaagtttaattcctggctgtttttgaatgacttgggcctgtattacaaaattaatcagatacaattatactatcttcacaacaacaatcatctacattggggtttgacaatgtacaaagtacttccatgtgtattatttcgtttatctttaccacaacctttgaagtaggaagacatgatgatccccattttactgcctaggacagagagacatcaggaggttaactgacttgttcactgagaaagcggaggagcacagactataactccaacagtttgaccccatactgcatacgcatcagggccttaatcatgagactgtatgacccttctgagcctgggattcacttgcaactgggtattccctcttctacctcaggccccctataccttttcaaaaagtgtccttcactgtaaataatcttcctggtggtgaccctaaaggatctgacaacctggatctacgtaaaaaaaaaaaaaa

SEQ ID NO: 36 - DNA, 903 bp, Homo sapiens
agctcaaaacaaacaaacaaacaaaaaaacctaagtcccttcgctgtcaaatccttaggggagtaaattctgtcatctctgggtacctgttttcctgacttttcaaggtgttgaaaagagccttatgattcagccaaactttccaacagctctgatgggcagtttatcctcactcccactctacccagctctgttcctttcttctcttccactgtgtctgaatttgacagggtcccagtctcagtggtactgttcaaagtgtttataatgttactcttctgggcaatttttgcttcatacgtctccatccaatcaatgcatttcaggtgttgtggcagagagatttttgggggtgctggtacaagcaagacaggaatamcccttaagtcacaataaaggcctctgcagggagtttttacattcacttcattttagacatcctcatttccctttcctacatcatgtaatttgtgtgattttttttttttagatggctattcatatgaaaaggaagcaatggaaaattggatcagcaaaaagaaacgtacaagtcccatgacaaatcttgttcttccttcagcggtacttacaccaaataggactctgaaaatggccatcaatagatggctggagacacaccaaaagtaaaattgttgatattgtattatttatattttcagtgatctcatttgaatgatttataggtaaatactaatcagacattattaaaagcaaaacaggaaaaaggtaaacttcttaaatttagttacctataaaaattgtcaattttcattctttaaaaacacatggacttactataaaagcctttttgtactagtgaaaagaatcttcagctatatagaaataaagttatactttaaaaaaaaaaaaaaaaaactcgag

SEQ ID NO: 37 - DNA, 934 bp, Homo sapiens
ggcacgaggttgtctaccctcattagtttatttttgacaaaaagttgcttttagaaatactttacttgttgaagttgttttactatcaaagcatacctattagcttttgaagggagtcctcctgtaaaatttataggattaaaagttttcatgtgcttgtgactaattatgaggtttatagtggtttacattttgagatagttatatatataatatgcccttttcttttgtgacattatacgtatttttttatattgcatttaaaattaaatgacttgcttttgccagattaaatacagataccattggggttttctgttttgattcctaatgataatatggattgatttcaggtgtaattattgaaacagatataattggttcagaccttttgaagaactctgacccagagacacagtccagcatgcctgatgtaccatatgaaccagatttggatatcgaaatagattttcccagaggtactcaaaacctttatgactatggaatttagttatggagtcaactgtggttatgatcatttaccatttgatgtttgtgtcattgccttttagcagtgttcatattttttattcttgttattttttaaactcaccttaagagttaacttcatattttgttgttgtttttttttaaaaacccaccttaacagttaacttctggaatgagatcacttgagtccaggagttcaagaccagcctgggcaatgtggtgaaacactgtctctactgaaaatataaaaattggccaggcgtggtggtgcatgcctgtaatcccagctactcgggaggctgaggcaggaggattgcttgagaccaggaggtagaggttgcagtgagccgagattgtgctgctgcactccagcttgggcagcagagtgagaccctgtctttaaaaaaaaaaaaaaaaaaaaaaa

SEQ ID NO: 38 - DNA, 850 bp, Homo sapiens
gggctgcaggaattcggcacgagaaaatagtcctcccttcaacatggctatcttttttcaagttttatatgcatagctctctcagcacttgaatggaaaaactgttacagcatttgggagttgtttttcttttagacatttgcagatcttatctcaaggtgactaggaacccagagctaagtatctgtgaggcaatctctgcgaacgctgaacttacctagttggtttctatgaaatatgtagaatgcactgcagtagccattgtaagaaggtactataccggttttttggggcttgttgttgttgtttggtctgagaatgtactgccaacccctcttttataagagagaactgattttgatacatattttaaaatatgatagtacagagttaatggatgttaaaattttatttctttgttttggtaagtagattaaatcgagaatcatataatcagtacatttgagaattatataaccagtatataataatactggacacaaccatttgccatcttttcctgttatcatcccatagagtgggtggggagaatgaatagacataaacctagaataatgataaatggtttttaaaactctatattgaatacattccagctgataatgacttttctttttcaccttggtgatatcagcctcagggtaaaaaaaaaagtttcataaatcttttagttataaacaggaaagttttatattagtgtgtcatttcatttctagactgttgatggtgatgatgataaagaatttggagccaattttgatatatgaatgtattgcttttacatgtgatgattaaagctctccattagcaaaaaaaaaaaaaaaaaaac

SEQ ID NO: 39 - DNA, 1713 bp, Homo sapiens
gtctcaatggacacttagaagaatttgatgatcttactgtcataaaatcagtaatgaaattctcagcaaaactatttggtaaacattgcaccctgtatttttacccaacatcttgttatgaaaattatcaaatacattaaaaagttaataattttatagtgtactcactacctagatgctaattagcattacctatgcttgctttgtcacatatccattcatcatttcatattattatttgatgcattttaaattgcatatcattaactagagttcattgttggcttttttacataaaattagcatgcaatgaagtgcatagaaatatgtgttcactgaggtttggcaaatgcatatagtgctatggaaataggaaacgttatcaccaccctagaaagtttccacactgccctttccagtcaattcctgtccctacttgaccctcaaaggcaaccactgttcctttttctaccataagatttttctgttctaaaactttatataaatagagtcacgcaacatgtacgcttttctacaaggcttcatttttttattgctgttcttttttattgctgagtagtattccactgtatgacaatattacagtttgttttcttaatttcctattattgatagatacctgggctgtttccaggattggccattataaataaagctgctatgaccattcttacgtaagtctttgtgaacataggttttcatttctttgcagtaaattccttggattagaattgctgggtcacagggtagttttaaaagaaactgccatacctttttccagttcagttttattgtgccctgtattttgtattttgatgtgcataaaggtgtaaactatttttatgatccatattgaagtattagaagaagtgagtttggaataacaatggcattgttcatggtcaaggatgacaattggaactatctgaggaaagcaaagacctgtctgccccagacagctcctcaaggggttcctatgcctgaaactttagcaatatttcactccttgaaaggttaaagcccaaccatggtgatatgttagctagaagaaacagcactggtttgtttatgttactaactttcaccacccgttttcagtaggtaaagtaagactgatcattgaacagaaaaggttatttctgtgatgaggttgagggggtagtggaaagcatgtattgctagtaagccccaggtacagctatgtgagagagagtcacctggacagggaagtcccccaaatggtggccagaagagcagaaaacggggtgggaaaaattctacctcacagttttgcataggggatagctatgcttttacgggacattttagcgtttaaaaatattttcaatattgtctctttattcaataccacccagctgtagttttttcacactctgatgactctcttatccactcttttacctctcccagctgttctattacatacagcattcacctgtattagtctatagaattataatcatctgtgtgtttctaatgctcattttcaaaaatatgtatggtttattcgatttttcctattaaaattttaagggctgggaaatttggcttctactgtaaatccttataatgttccacacattgtaaatatgcaataaaaatgttaacaactawaaaaaaaaaaaaaaaaaaaactcgactcgtgccgaattcggcacgagcggcacgagc

SEQ ID NO: 40 - DNA, 720 bp, Homo sapiens
ccacgcgtccggggaaatggcagatactgcatgtgattctgatgtcctgcttcagctggtgcttgtctggctgggtgaagtgctaggtgtcattggggactgtccagagctagttcagcgctccttcctggtggctagtgttctgcctggccccgatggcaacattaactcacctacaagaaatgctgacatgcaggaggagctaattgcctccctagaggagcaactgaagctgagtggggaacattctgagtcttccactccacgacccagatcatctcctgaagagacaattgagcctgaaagtcttcaccagctctttgagggtgaaagtgagaccgagtctttctatggctttgaagaagctgacctagatctgatggagatttgagtgttggggtcatgagggggtgtggagtgggggtgggaacatgtgagggagggtaaaggggcttagggaaaagggggcataccaggtggggtatttggtttctattttttaattttataccaccactcccccctgaagttgacttacacttccctgtggatttgtggattaattaggaaaaccaatagtaatcacgtctgagccaaggagctggcccattggtcattcacttctgctaaaaacaggtttttgtgactttttttttttttaaatttaaatcactgtgtttggtatttttctgacaaaaaaaaaaaaaaaaaaaaaaaaaa

SEQ ID NO: 41 - DNA, 1856 bp, Homo sapiens
ctgactttccacctttcctacaaattccgattactgttgctgttgactttgtgcctgacagtggttgggtgggccaccatgtaactacttcgtgggtgccattcaagagattcctaaagcaaaggagttcatggctaatttccataagaccctcattttggggaagggaaaaactctgactaatgaagcatccacgaagaaggtagaacttgacaactgyccttctgtgtctccttacctcagaggccagagcaagctcattttcaaaccagatctcactttggaagaggtacaggcagaaaatcccaaagtgtccagaggccggtatcgccctcaggaatgtaaagctttacagagggtcgccatcctcgttccccaccggaacagagagaaacacctgatgtacctgctggaacatctgcatcccttcctgcagaggcagcagctggattatggcatctacgtcatccaccaggctgaaggtaaaaagtttaatcgagccaaactcttgaatgtgggctatctagaagccctcaaggaagaaaattgggactgctttatattccacgatgtggacctggtacccgagaatgactttaacctttacaagtgtgaggagcatcccaagcatctggtggttggcaggamcagcactgggtacaggttacgttacagtggatattttgggggtgttactgccctaagcagagagcagtttttcaaggtgaatggattctctaacaactactggggatggggaggcgaagacgatgacctcagactcagggttgagctccaaagaatgaaaatttcccggcccctgcctgaagtgggtaaatatacaatggtcttccacactagagacaaaggcaatgaggtgaacgcagaacggatgaagctcttacaccaagtgtcacgagtctggagaacagatgggttgagtagttgttcttataaattagtatctgtggaacacaatcctttatatatcaacatcacagtggatttctggtttggtgcatgaccctggatcttttggtgatgtttggaagaactgattctttgtttgcaataattttggcctagagacttcaaatagtagcacacattaagaacctgttacagctcattgttgagctgaatttttcctttttgtattttcttagcagagctcctggtgatgtagagtataaaacagttgtaacaagacagctttcttagtcattttgatcatgagggttaaatattgtaatatggatacttgaaggactttatataaaaggatgactcaaaggataaaatgaacgctatttgaggactctggttgaaggagatttatttaaatttgaagtaatatattatgggataaaaggccacaggaaataagactgctgaatgtctgagagaaccagagttgttctcgtccaaggtagaaaggtacgaagatacaatactgttattcatttatcctgtacaatcatctgtgaagtggtggtgtcaggtgagaaggcgtccacaaaagaggggagaaaaggcgacgaatcaggacacagtgaacttgggaatgaagaggtagcaggagggtggagtgtcggctgcaaaggcagcagtagctgagctggttgcagstgctgatagccttcaggggaggacctgcccaggtatgccttccagtgatgcccaccagagaatacattctctattagtttttaaagagtttttgtaaaatgattttgtacaagtaggatatgaattagcagtttacaagtttacatattaactaataataaatatgtctatcaaatacctctgtagtaaaatgtgaaaaagcaaaaaaaaaaaaaaaaaaaaaaaac

SEQ ID NO: 42 - DNA, 802 bp, Homo sapiens
ggcacgagagccagcagaggcgagggaaggcgtcactgccccggcggggagacgggcaggacgccctgccccgcaccagcagcctccgccggggcgccctcagctccctgcttggctctgtctctccacacccggcagggccgcgggctgccccagccctgggggtcgtgggcagctgctactcagtgccaaccccgtggggcacagagccatatacctcgctgtccggcccccaccccagcctcgccttcccaccccatcgtctccacttcaggaaaagccgcactttacacccccacctgcctcttccccctccatccctgctccccgatcctgagcggttggggtggggtccctcagcaaccccaggcgtgggtttgaggagacaggtgatttacatcccctttgctgtcctcccccggtaccaaggcagggagcctccggaggagccggccctgctggccacgcaggggccagactccagcctgtttccccagccctgcaggtcttccttctgtgggaagcttcctagcaagatggcttggagtcctggtccccctcctccctggccctctcgttcgtttctgtttctgtttacacgttggagtggggtcctccgtgggcggcggcgcgccctgccccgggtgtcgtccggcctcttgtgctcgagcccctttccgagttggactcgaccatccctcaccccaccaaggaccacactgtgaagtgataactgccttgaacccccctttgctgttttatttattaaacttgatttgaagccaaaaaaaaaaaaaaaaaa

SEQ ID NO: 43 - DNA, 1647 bp, Homo sapiens
ggcacgagatgaagccctgtccaggctatgggcatcaagacagcattgccggcggctgagctgggcctctactctctggtgctgagtggggccctggcctatgctggccggggcctccttgaggcttcacaagatggggcccacaggaaggccttccgggagtctgtgcgacctggctgggagtacattggccggaagatggatgtggctgacttcgagtgggtgatgtggttcacctcctttcgcaacgtcatcatctttgccctctccggacatgtgctgtttgctaaactctgcacgatggttgccccaaagctccgctcctggatgtatgctgtgtacggggccttggctgtgatgggcacaatgggcccttggtacctgctgctgctgcttggtcactgtgtgggcctctatgtggcctcgcttttgggccagccctggctctgtcttggccttggcttggccagcctggcctccttcaagatggaccccctaatctcttggcagagcgggtttgtaacaggcacttttgatcttcaagaggtgctgtttcatgggggcagcagcttcacatgctgcgttgcaccagctttgcactggagagctgtgcccaccctgaccgccactactccttagctgacctgctcaagtacaacttctacctgcccttcttcttcttcgggcccatcaatgacctttgatcgcttccatgctcaggtgagccaggtggagccagtgagacgcgagggtgagctgtggcacatccgagcccaggcaggcctaagcgtggtggccatcatggccgtcgacatcttctttcacttcttctacatcctcactatccccagcgacctcaagttcgccaaccgcctcccagacagtgccctcgctggcctagcctattcaaacctggtgtatgactgggtgaaggcggccgtcctctttggtgttgtcaacactgtggcatgcctcgaccacctggacccaccccagcctcccaagtgcatcaccgcactctacgtctttgcggaaacgcactttgaccgtggcatcaacgactggctttgcaaatatgtgtataaccacattggtggggagcattccgctgtgatcccagagctggcagccacagtggccacatttgccatcaccacactgtggcttgggccttgtgacattgtctacctgtggtcattccttaactgctttggcctcaactttgagctctggatgcaaaaactggcagagtgggggcccctagcacgaattgaggcctctctgtcagtgcagatgtcccgtagggtccgggccctgtttggagccatgacttctgggccatcatcatgtacaaccttgtgagcctgaacagcctcaaattcacagagctggttgcccggcgcctgctactcacagggttcccccagaccacgctgtccatcctgtttgtcacctactgtggcgtccagctggtaaaggagcgtgagcgaaccttggcactggaggaggagcagaagcaggacaaagagaagccggagtaggagggagcgggtagagggatgggctctgctcagctattcttgggccagatggggcctgaccgatagaataaaagacttttctacaacaaaaaaaaaaaaaaaaaaa

SEQ ID NO: 44 - DNA, 1782 bp, Homo sapiens
  misc_feature (1765)..(1765): n equals a,t,g, or c
  misc_feature (1771)..(1771): n equals a,t,g, or c
ggcacgagcccgcctcagcccaacatggcgatgcacaacaaggcggcgccgccgcagatcccggacacccggcgggagctggcggagctcgtgaagcggaagcaggagctggcggaaacattggcaaatttggagcgacagatctatgcttttgagggaagctacctggaagacactcagatgtatggcaatattattcgtggctgggatcggtatctgaccaaccaaaaaaactccaatagcaaaaatgatcgaaggaaccggaagtttaaggaagctgagcggctcttcagtaaatcctcggttacctcagcagctgcagtaagtgcattggcaggagttcaggaccagctcattgaaaagagggagccaggaagtgggacggaaagtgacacttctccagacttccacaatcaggaaaatgagcccagccaggaggaccctgaggatctggatggatctgtgcagggagtgaaacctcagaaggctgcttcttctacttcctcagggagtcaccacagcagccataaaaagcgaaagaataaaaaccggcacaggattgatctgaagttaaacaaaaaaccacgagctgactattagaagacacattagtgcagaagcttccaggctgtagagccctgcttcccttctctgacctcacaaagataaacatccttcacctgagttcgtggccatccacctctgctctcccagacccagtgcctgtgactttgagtagtttgttctaaatgtggtgacaaacaagtcatttctgtaagacattgggtcttactttatgtcatttttagtaacagaactgcaggaagatcaagacaatgttgtaatcccggcaagttgctaactgtgcgtttctcccttcttagaatgaatgtctcccccaaaactggctggcaccagcttcatctgtgatacccttcaagaaatgttctctggttttgttttatgctgaaagtagaacacaagtcacatttcagatggaggctgtaaatatctggcattttcttatattgttttatgttttcttgtttttctcttgttgtttttatcttattttctttggggtttttttgtaatgcctttgtacagctcatactttcctgctgacatatctgatcatctctttcatgcagttgccaatattcataactgaaaataatctggtttatcataagtaaaatgggaaacttgcctctgttttttgcaaggggaggtaaagagtgtttagtaattacctatcttaaatctttctgagttggtagtagattcatgttcaaggaacaggaaaaatggaaaaacataagtttaaatcagttctttttaaataactttttattcttttgtataaataaaatttcacaggcttcaaattctcatgctttacttttaaacccgagattgttttttcacttatttattcatatcatgccttatggaaatttctttttctgtattttctctctttgctggtattcacctgattaaatattgctctaaaaatcaccatggcatatggaaagtctcaaaattataccaaaagtgataacttatgtcgttcttaagtggagtgaaaggatagcatcagtgatagccagtgttgcccaccaggtctccctttcttggagggcttgttggggctgaggaatctgctagtaatcgttacctgcctctagtgctgtggtgaacttgcgacagggtctggctggcacattggaatcacctgagaagcttttaaaatacttcatgncctggnattcccattcc

SEQ ID NO: 45 - DNA, 619 bp, Homo sapiens
aaattttgtttcactgaatatgtttagagatgccgccagaacattaaccattgtttcatttttatgtaagttgaagaaaaatgaagctagatagcatgttctccatttgcagtctacaaaggggaattttattgcttaaattaaagtttcattttctggcctgtgcaagagacttttatatctaaaatatggatgtacgtttttcatattttagagttcattgtatggaaaaataccatcaaagttgaccaaaagattttgaaaatccttaccagttgtttgtcatatgttaaagtcttatggttaattttatttattttatcttgttctcttgctggttattggcagactcagtctttctgttttcacaaagaactcatgaagaggacgataggggaaacccacgtatgcctttgaggctagggactatgttgtaagttcacctgtgatggccaggtcatacagtcatggcacagccactaaccccattcacagcaccaaggactggggacccagaaggcacttggttatggcttccacactaacgaaaatggaaattccttaaattgagagaactgggaccacccaggaaaaaaaaaaaaaaaaaaaaaactcgtag

SEQ ID NO: 46 - DNA, 1693 bp, Homo sapiens
gatccggggtcaccagttattagaggaagtaacacaaggggatatgagtgcagcagacacatttctgtccgatctgccaagggatgatatctatgtgtcagatgttgaggacgacggtgatgacacatctctggatagtgacctggatccagaggagctggcaggagtcaggggacatcagggtctaagggaccaaaagcgtatgcgacttactgaagtgcaagatgataaagaggaggaggaggaggagaatccactgctggtaccactggaggaaaaggcagtactgcaggaagaacaagccaacctgtggttctcaaagggcagctttgctgggatcgaggacgatgccgatgaggccctggagatcagtcaggcccagctgttatttgagaaccggcggaagggacggcagcagcagcagaagcagcagctgccacagacacccccttcctgtttgaagactgagataatgtctcccctgtaccaagatgaagcccctaagggaacagaggcttcttcggggacagaagctgccactggccttgaaggggaagaaaaggatggcatctcagacagtgatagcagtactagcagtgaggaagaagagagctgggaacccctccgtggtaagaagcgaagccgtgggcctaagtcagatgatgacgggtttgagatagtgcctattgaggacccagcgaaacatcggatactggaccccgaaggccttgctctaggtgctgttattgcctcttccaaaaaggccaagagagacctcatagataactccttcaaccggtacacatttaatgaggatgagggggagcttccggagtggtttgtgcaagaggaaaagcagcaccggatacgacagttgcctgttggtaagaaggaggtggagcattaccggaaacgctggcgggaaatcaatgcacgtcccatcaagaaggtggctgaggctaaggctagaaagaaaaggaggatgctgaagaggctggagcagaccaggaagaaggcagaagccgtggtgaacacagtggacatctcagaacgagagaaagtggcacagctgcgaagtctctacaagaaggctgggcttggcaaggagaaacgccatgtcacctacgttgtagccaaaaaaggtgtgggccgcaaagtgcgccggccagctggagtcagaggtcatttcaaggtggtggactcaaggatgaagaaggaccaaagagcacagcaacgtaaggaacaaaagaaaaaacacaaacggaagtaagcagagctgccaggctcccaggagagcatggggactaggaggaagggtgtggcatggctcagtctggcccccttgattaccggcctagcccctgctcacatcacagctgtctgaagaacagtgaggtggagtgcctagaactcccgtggtggtcctgagcagagaggaggatgtcctcctgcctgcctgaaggtctcccatgaaaacactgctgaactgtgttgacactcatgaccctttttttaaaccgttaaagggaagttcggtgttggagcgatactcaatgtagtcagtctacacctggacgtgtgggccacttaagccctccccacccccatcctattcctaaataaaaccaggataatggaaaaaaaaaaaaaaaaaaaaaaaaaaaaaaaaaaaaaaaaaaactcgagggggtcc

SEQ ID NO: 47 - DNA, 1685 bp, Homo sapiens
  misc_feature (1667)..(1668): n equals a,t,g, or c
ctgcaggaattcggcacgagtactattataatggcaattaaattccaacatgagttttggaggggccattcaaaccatagcagtactgttagcctgttagtcacatggccccaggtcgctgcaagggaggtggggaatgcagtcttggctctgggcagctgtgtgctcagctggctgtccctgcttctgggggatgaaggcattgtgagatttttgattaaatctgggccatttccaggctgaaaagctggaccagagcttcagggcttgagtctctcacagagagatttcccaatggggacatcagtcctgccttgggaccagaaagccacatgctgtaggccaggaagggggaagcaggggctgagcccgagggagaaaggctttagaggtgttagcagacagctcagtggcagtggttagaattagggaggcagcgacctcttcttagtgtggtcagagcatgccaagaaagtgtggtctgtgtctgggctgctgaggcccgagggcaagggccaagctcattcataggacagtggccaagaagcggggactgaaaggcttgggaaaagtaaggaagctctgcaggttctgggacacaagtgaacacggtaagcagtggaaggcccaccccaggacagggttagactgggagcactgtctccttgtagcccacaagaggccaggcaggggtgggggtggaggcttcctgcgtcctcctcacctcatgcccaccccctgccctgcacgtcatgggagggggcttgaagccaaagaaaaataaccctttggtttttttcttctgtatttttttttctaagagaagttattttctacagtggttttatactgaaggaaaaacacaagcaaaaaaaaaaaaaagcatctatctcatctatctcaatcctaatttctcctcccttccttttccctgcttccaggaaactccacatctgccttaaaaccaaagagggcttcctctagaagccaagggaaaggggtgcttttatagaggctagcttctgcttttctgccctggctgctgcccccaccccggggaccctgtgacatggtgcctgagaggcaggcatagaggcttctccgccagcctcctctggacggcaggctcactgccaggccagcctccgagagggagagagagagagagaggacagcttgagccgggcccctgggyttggcctgctgtgattccactacacctggctgaggttcctctgcctgccccgcccccagtccccacccctgcccccagccccggggtgagtccattctcccaggtaccagctgcgcttgcttttctgtattttatttagacaagagatgggaatgaggtgggaggtggaagaagggagaagaaaggtgagtttgagctgccttccctagctttagaccctgggtgggctctgtgcagtcactggaggttgaagccaagtggggtgctgggaggagggagagggaggtcactggaaaggggagagcctgctggcacccaccgtggaggaggaaggcaagagggggtggaggggtgtggcagtggttttggcaaacgctaaagagcccttgcctccccatttcccatctgcaccccttctctcctccccaaatcaatacactagttgtttctaaaaaaaaaaaaaaaaaaaaannaaaaaaaaaaaaaaaag

SEQ ID NO: 48 - DNA, 1135 bp, Homo sapiens
gctcaaaagtaggctcttaattctaccagtgataattataccttgcatgcttagtccatttactcttttgctctcttatgcaactatcgtacacttctgcatgcccctaataccttttctccttattcttactatcaaatgatgatcttgcttttcacttttactgtactaagaaagatggaagcaattagaagagcacatttagcacagtctagccaacaaatctgactacctacagccacctacacctatgttattcttgttttccaccctattaccataatgacccatgcgttctacttacaacacattttcacactttgttgggtcatttcatcaacatagaaawacattgttacttctctcatcttagaagaaaatcttcctttgatccaacctcctccgtaagttactttcccatttctttatttccctttgaagcgaaacttttcaaagagtcatctccatttctccgacttggtcttctcccattctctggtaagcccatttcagtcaggattttgtccctgtctctctgcatgcgcacacacacaggtttagcctaaaaaagctctcgaaaaagagcaatggtaagagggactggcactgctgatgtgtaaaatacttagtaaagttatggtagtttttattttatttttttagaatttaatagatacttcacagttcaaaatatcagaaagataaatatgaagatatcacagaccttttctcaccatttttattttttatttgtccttttttcaaatgtagatgtttttctcccttatttcacaacagtaaactataatgattaaaaccatgtagtataggttcagaaatacataggcaaagcagtgggtaaatagcctcaacaaacataaagatacatgaggacttggtagatgataaagatgacatctcaaattggtgggaaattggtgggaaataggtggtagtgacataactggttagctgtctatggggcaaatctttaatatgtcactctttagaccaaaattaataccaggaggattaaagacttcattgggggcagggcaaagtgctgggattacaggcatgaaccactgcacccagcctatttctctctcttaaaaaaaaaaaaaaaaaactcgta

SEQ ID NO: 49 - DNA, 2325 bp, Homo sapiens
  misc_feature (51)..(51): n equals a,t,g, or c
  misc_feature (2323)..(2323): n equals a,t,g, or c
ggccaacggcttcctggccctggacgtggctgccaatcggctgtgggtgantcccggggagcgggagcccgccgtggcgccggactttgtgcccttcgtgcagctgcgcccgctgagcgcgctggctgaagctggagaggcggtgctgctgctgcgggaggggcttctgcgccgcgtgcgttgcctgcagctggggtccccaggtcctggccccgtggccgccggccccgggsccgcctccgtctctggccttgccgcggggtccggccgcgactgcgtgctgctgcaagaggactttctggcgcacaggggccgaccccacgtctacctgcagcgcatccagctcaacaaccccacggagcgcgtggccgcgctgcagactgtggggcccactgccggcccagcccccaaggccttcaccagtaccctggagaaggtcggagaccatcagttcctcctctactcaggccggtccccgcctacgcccactgggttggtgcacctggtggtggtggccgccaagaagctggtgaaccgcctccaagtggctcccaagacgcagctggatgagacggtgctgtgggtggtgcacgtctctggccccattaacccccaggtgctcaaaagcaaagcagccaaggagctcaaggcgctgcaggacttggcacggaaggaaatgctggagctcttggacatgccagcggcggagctgcttcaagaccaccagctcctctgggctcagctcttcagcccaggagtggaaatgaagaagatcactgacacccacacgccgtctggcctcaccgtgaacctgacgctctattacatgctctcctgctcgccagccccactgctcagcccctccctgagccacagggagcgagaccagatggagtcgacgctcaactatgaagatcactgcttcagcgggcacgccaccatgcacgccgagaacctgtggccggggcggctgtcctccgtccagcagatcctgcagctctctgacctgtggaggctgaccctccagaagcatggcccagcaggaccccgggctgcccttcctcttctggttcagcgtggcctccctaatcaccctcttccacctcttcctcttcaagctcagctttggggggctgcagttcacagagaaccacctccagttccaggccgaccccgacgtgctgcacaacagctatgcattgcatggcatccgctacaagaacgaccatatcaacctggccgtgctggcggatgccgagggcaagccctacctacacgtgtccgtggagtcccgtggccagcctgtcaagatctatgcctgcaagcaggctgcctggacgagccagtggagctgacctcggcgcccacgggccacaccttctcggtcatggtgacacagcccatcacgccactgctctacatctccaccgacctcacacacctgcaggacctgcggcacacgctgcacctcaaggccatcctggcccatgatgagcacatggcccagcaggagtaaggaagatcccagtgtctgagtgaactaacagtcctgctttcagccaccatttgcacaagacacccagcactgaaagtcccgctgccaggagcaagggatcctttggaagcacccgccctttgtgccttgttgggggaaaccggtgacgcagaagtgagtgtggatacaccagagtttgcattggaaggaatgagtgtcacgtggggagggaaggggccagtggaccttttgtaagctttccactcaataaaatgaacctgtatggcaaatacttgaaatggaactcactccttccactttccccctttcttctgtcccaggaaatagatcatcttttgaaaagactcttgtctaggaaaagttgtgtccttttcctaatttaacgtgttctttcttaatgaagttttaatttatttttgttgagattttgctagatggcttttgcatcccctgtagatggtgagtgttggcggtgatgtccrtctcggcgttcggaggccccacggtcccgaggctgggccggggccccccagggtggctgtgctgctgcctgtaggagggtgcgggttgtgctgtcatcctcgggtttgcacgcccttttttaggagcctgtggacatctgtggttttgtactttggggcttcaggggaggtgtttaactttctagtgattgatgattgtcaggttttgaaataccaaagcttttttgttctgtttttaaataaatatctttcaaactttmaaaaaaaaaaaaaaaaaactcgagggggggcccggtacccaattcgccctatagtgagggggtantc

SEQ ID NO: 50 - DNA, 750 bp, Homo sapiens
ggcacgagtttcaacatgagactaatccagggtggtgacatgccggtctttgtagttcttgcttcggggttaatgaggggcaggaaagagttccttagactcctgcatggcatcatgaatgctgctgttcttcttaccttggtttttttcctcctcctctaccttttctaccttggtgtgctgggatcagatcctgcttatcttccacttcttaagaaaagctgacatagaagacacattgggactataacagggctgggtctcctcttccactcccactagacacatgctgcagtacatcagagagtttgtcaccagttaagcaggctcctcggaagtccccctccgacactgagggtcttgtaaagagtctgccttctggatctcaccagggcccagtcatatatgcacagttagaccactccggcggacatcacagtgacaagattaacaagtcagagtctgtggtgtatgcggatatccgaaagaattaagagaatacctagaacatatcctcagcaagaaacaaaaccaaactggactctcgtgcagaaaatgtagcccattaccacatgtagccttggagacccaggcaaggacaagtacacgtgtactcacagagggagagaaagatgtgtacaaaggatatgtataaatattctatttagtcatcctgatatgaggagccagtgttgcatgatgaaaagatggtatgattctacatatgtaaaaaaaaaaaaaaaaaaaaaa

SEQ ID NO: 51 - DNA, 543 bp, Homo sapiens
  misc_feature (529)..(529): n equals a,t,g, or c
  misc_feature (533)..(533): n equals a,t,g, or c
ggcagagcgatcctcccagcaacccacaaggaagcttcacagagaggcagatgccacacaggccacccacccagatgcagagccagattccctgcgtggactggacgggagtttcccagctggagttctctcggccaagctgcctgtgacatggggttggaggtgctccagagagtcatggccacccctggaggaagtgacttgtggctgactgctcaaggggaagtcctgtggcagtggagtcgtcagcattaattcaaataagatctctccctgcacacaatctgctttcgtgttcctgatggattgaatcaagagtgaatgagctcctacttcgcgaaagcaaaacaaactaaacgcatcaaccacgaccgcagagcccccatctctcccaggagggtgagcccatgttgtgttttcatttgtcagaaatctatcttaggaagccattcctgagatctgttctaatttaggccatttttaaaaaaaataatgcagttgaaaaaaaaaaaaaaaaaactctaggggngggnccggtaccca

SEQ ID NO: 52 - DNA, 1629 bp, Homo sapiens
ggcacgagaagaaaatgatttggatgattctttaagtgtaaaaaatggtgatagtagtaatgactttgtgacttgcaatgatatcaatgaagatgattttggtgattttggtgactttggctctgccagtggctcaactccaccttttgttactggtactcaagattcaatgagtgatgccacttttgaagagtcttcagagcactttccacattttagtgaaccaggtgatgactttggagaatttggggatataaatgctgtttcttgccaagaggagacaatattaacaaagtcagacctaaaacagacttctgataatttatcagaagaatgtcaattggcaagaaaatctagtggaacaggcactgaacctgttgcaaaacttaaaaatgggcaagaaggtgagattggacattttgattctgtgccaaatattcaggatgactgcaatggttttcaagactctgatgattttgcagacttcagttcagctggtcctagccaagttgtagattggaatgcttttgaggatgaacaaaaagatagttgttcttgggctgcttttggagaccagcaggctactgaatctcatcatcgaaaggaagcctggcagtcacataggacagatgaaaatattgatactccaggaacccccaaaacgcacagtgtaccttcagcaacttccaaaggagcagttgctagtggccatttacaggaatcagccacttcagttcagacagctttattaaaccgcctggagcgaattttcgaagcatgttttccttccatacttgtccctgatgctgaagaggaagttacttccctgaagcacttgctggaaacaagcactttgccaataaaaacgagagaggccttacctgaaagtggggaattgctagatgtgtggactgagctacaggatatccatgatgcacatggcttgagataccagtggggcggctcccatagcaacaagaagcttttgtcctccttgggaatagacacccgaaacattctcttcacgggcaataagaagcagcctgttatagtgcccatgtatgcagcaggattgggtatgttagagcccaccaaggaaccactgaaaccactttctgctgcagaaaaaatagcttccatcggtcagacagccaccatgtcaccagatatgaacacatgtacatctgatcagttccaggagtctctaccacccgtccagtttgactggagtagcagtggccttactaaccctttagatggtgtggatccggagttgtatgagttaacaacttctaagctggaaatctccacctcaagcctcaaagtgactgatgcatttgcaagactcatgtctacagtagagaagacaagcacatctaccaggaaaccgaaaagagaagagcacctaagtgaagaagctatcaaggtgatcgctggccttcctgacttaacattcatgcatgccaaggtgttgatgttcccagccacgttaacaccttccacaagctctcaagaaaaagcagacggataactgatgtgaattggacagtttctattgcttttccttttttccatcccttccctaccatcaaaagcatacctgctctaattaaaaaaaaaaaaaaaaaa

SEQ ID NO: 53 - DNA, 1076 bp, Homo sapiens
ggcacgagtcctgaccttgtgatccacccacctcggcctcccgaagtgctgggattgcaggcctgagccaccacgcccagcctattttgtgtttttttaaagctaactaccattaagatcattatagaagtttggtataatgaagatttgggtttttcagtccaatgagtttccatattcttgaatgaaaaagatccacatttcatcatttgcctgtttcattttcttttagtacttttgaacttagtttggtcagaaaatactagaattttagtttgatctaaagaaccagcttatataacttgctgttgccatgtacattgtatgtctttgctgtgtcaaataactggatcgattttagctcttttaagtggtgaaagcaatgcattttattcttcaaattcagacattgaatgtgtataaaatgtgtgtgcttacctttaatcctctccccaccgacaattaggaacacgtttctccaattactgttggcaagactaccaagaaaaattgttgaattagaatcccagcaccgggcacggtggctcacgcctgtgatcctagcactttgggaggccaaagcaggcggatcacctgaggtcaggagttcgagaccagcagggccaacatggcgaaaccccgactctactaaaaatacaaaaattagccaggcatggtggtgggcgcctgtaatcccaactactcaggaggctgaggcaggagaattgcttgaacctgggagttggaggtcacggtgagctgatatcacaccattgcactccagcctgggcaacagagcaagactctgtctcaatcaatctatccatcaatcgataagaaccccagattgtatagctacatgttttagcccccttttcaaagtatatgttctccttggtacttattttgacattctgacttttctacatatgctttatcaacctcttaattaaaccatcattgtctattttgagagataactgcgctgcttcccgttgtgtgttttaaatgttattgttcagtttgagtcaaataaaaggatatttaatctgtgaaaaaaaaaaaaaaaaaaaaaa

SEQ ID NO: 54 - DNA, 1652 bp, Homo sapiens
  misc_feature (1500)..(1500): n equals a,t,g, or c
  misc_feature (1527)..(1527): n equals a,t,g, or c
  misc_feature (1546)..(1546): n equals a,t,g, or c
  misc_feature (1614)..(1614): n equals a,t,g, or c
  misc_feature (1640)..(1640): n equals a,t,g, or c
tcgacccacgcgtccggattgttctgtttttctcaccctactatgtgaatatatattctgttagagatgggctgttatctgcaatgtggactcaataccatgggcttgagtttggttagttcatcattagagattttttttcagcagttggtttactttatgagaaaggatcatgagtttaattttcccactgatatatttgtgttctcattgctgagatataagtttcttaatgatttgttacctttttctattttcctagactagtattaaaattttgatggcatatgggtttggttccacttgtagagaataaatgttcacaacttactggtattagcacacacacatcacatgcagaaatggtgttttcttgccacttactctttctcataagatgcttatattcctgtgggcatttgtcttccacactacagcacataatttgatgaaactgattttctgtgcaagagcttgtgtttctccaactctgggttttatggaccacttttcattggtatataggaggcggttaaaacgtggtggtagaatgcaggttttaggttagctgggtgtgaagaatcccaggtctttgggatagtcttggcaagttactcaactcctctaagttagtttcttgatctgtcagatgmcagtaaacctcagagttgtgaaaattaaatggatataatgtgtgtaaagcacttagcataatgctttatacatcgtaaaactttcaaaaataggagtagtaattattacaaagaaatgtgaagaagagtcctagtgggctgcatgttaaaaatagtttttagttaatgaaaattaaatcacatcttagatgtttatcatctgcatggtacttttctggttgctgctttaacctttgtatagttgaaagtctgtaaactttctagtattctttgatttctggcccatttccctcctaccattcacgcttatattttttggttcaagtcaccattccttgcaaaactaattaaatacattcctaaatacataatattgccaatattcattcacatccaccacgtctagatccaagtcttcatcttctttatgctggtctaatttttgctgagccttagaagcaaagacagactccgggggttgatatgggacctccagaatggggattgcacagaataatcttatttttcctctattcttctagtctgttatgttctgaacccacacatgttttcggaaggaccagatggctgacactggctaatgggaaccaaaagacgagtgaaagtaacctggttgtcacatacccccagcttagaggtgcttcaccctgccccaaggtcaatttcttttttctctagagactttaccccattatatcaaaaacctttactacagcctgactttatctgatgttagagtatcattaagtcaagcagcagcatttattgagtgaaaaaagattgtcacaggactggaagagaagcatctgcctttaaaatacagtanaaggccggcatggtggctcatgcctgnaattctagcactttgggangccaagcaagtggattggctgagctcaggagttcgagacaccctgggcaacatggggaaaacctgctntctaaaaaaaaaaaaaaaaaaactcngggggggcccgg

SEQ ID NO: 55 - DNA, 1308 bp, Homo sapiens
gaaattaaccctcactaaagggaacaaaagctggagctccaccgcggtggcggccgctctagaactagtggatcccccgggctgcaggaattcggcacgaggatgaatggtttgcacatattttctcccattctgtaatgtgtttctttgtttattgtttctttggctgtgcagaagctttttcatttgctgtaatctcatttttcygtctttgcttttcttacttgtgcttttggagtcatatccaaaaaatcattgcccagtccaaagtcaagaaacttttccttacattttctttagtagctttataatattaggtcttacgtgtaagtctttaatccagtttgagttgatttttgtatatggtgtgagataagggtctaatatcattcttctttatgtggatatccagtttttcagacatcatttattgaagagactgttctttctccattgtgtgttattggcatctttgtcaaatatcaattgaccataaatgcatggtttatttctgggctctctgttgttccactggtctgtctgttttcgtgtcagtaccatgctgtttttattactatagatttgtagtatattttgaagtcaggtggagtgtgacgcttccaggtttgttcattttgctcaagattgctttgactatttggggtcttttgtggttccattcaaattgaaggattgtttcttctatttctgtgcgaagtgtcatgagaattttgatagggattgcattgaatctgtagattgctttggctagtatggacattttaacagtgttaattcttcaaattcatgaatgaacatgggatatctatccatttattcatgactaatttctttcatcagtgttttcagtataaaggtcttttatctccttggttaaatttattactaagtcttttttttaagctattgttaatgggattgctttcttgatttctgttttggataggttgttgttattatgtaagttttaaagatgaagaaagtgaggccaggtgcagtgctcacgcctgtaatcccagcagtttgggaggccgaagcgggtgaatcacccgaggtcaggagttcaagaccagcctggccaacatggtgaaaccctgtctccactaaaaatacagaaattgccagatatgttagcacatgcctgtagtcccagctacttgggaggctgaggcaggagaatcacttgaacccgggaggtggaggttgcagtgagccgagatggtgccactgcactccatgctgagcgacagagtgagactccgtcttaaaaaaaaaaaaaaaaaaaaa

SEQ ID NO: 56 - DNA, 726 bp, Homo sapiens
ggcacgagggatgacaaagctcatgaatcggcttttaagaactgtttccatgttggagtatttcatcaaccggagttgggaatggagcacgtacaatacagaaatgctgatgtctgagctgagtcctgaagaccagagagtattcaactttgacgtgcgccagttgaactggttggaatacattgaaaattatgttttgggagttaaaaaatacttattgaaagaggatatggctgggatcccaaaagcaaagcaacgcttaaaaaggctccgaaatattcactacctctttaatactgccctcttccttatcgcctggcgccttctcattgcaagatctcagatggctcggaatgtctggttcttcattgtaagcttctgttataaattcctctcctactttagagcatccagcacgctcaaagtttaagagcatttagccatcgctttttatctggaacctctcagatacctctaaaacagcaaactgtgattctcaagattagaaagtaacaaggaatatgcccaaactgtcaaatgtcacctgttatgtattcgtccctattccttaactatgtatttttatttcagtgagagaaggaaagttgtaaactagcccatagtcacctatattttagggaaaaaaatccaaattgtttcctaacattctattttatgcccttgcgtattaaacgtgaaagtactcccaaaaaaaaaaaaaaaaaa

SEQ ID NO: 57 - DNA, 1118 bp, Homo sapiens
ggcacgagagggttctgacctgggtggatgacgggcaaatggtcctgaactctctgctgtctctctccttaatgtcctctgtctgttctaagctgagatgttagatagaccttcagggatccctgacaaagaggcatctggtcttaactgcttgcttctagtggccatgtgctcattactttcttcacttcattgagactgccccatgtgctagagaggtctcttccatgttgggaaatgcctctgccctcatctgggcagttctgatctgtgttcatgggttatttttcccattgtcagggtgaggcattcactctttggggaagtgaggaagctcatcacagacgagtttgtgaagcagaagtacctggagtacaagagggtccctaacagcagaccacctgaatatgagttcttctggggcttgcgctcctaccacgagactagcaagatgaaagtcctcaagtttgcatgcagggtgcagaagaaagaccccaaggactgggctgtgcagtaccgcgaggcagtggagatggaagtccaagctgcagctgtggctgtggctgaggctgaagccagggctgagtggttccaacaccagcactggctttactggcgaacccagcaccagcacgggcttcagtagtggacccagttctattgttggcttcagcggtggaccaagcactggtgttggcttctgcagtggaccaagcaccagtggcttcagcggtggaccgagcacaggagctggcttcggcggtggaccaaacactggtgctggctttggtggtggaccgagcaccagtgctggctttggcagtggagccgccagtcttggtgcctgtggcttctcgtatggctagtgaggtttcagatttattccccatgtttacagataccgctaataaattgcagtagtccttcccatggagccaaagtacatccttggaatctttgtccacacagcagtcaaggcagttatggccaatcagctgagggtgtcatgtgatggaaaaatctgtttgctgttcctgctttattgtttgctttctgtgtgctgtcatattttggtatcagagttacattaaatttgcaaaaaaaaaaaaaaaaaaaaa

SEQ ID NO: 58 - DNA, 2793 bp, Homo sapiens
  misc_feature (223)..(223): n equals a,t,g, or c
  misc_feature (2782)..(2782): n equals a,t,g, or c
  misc_feature (2786)..(2787): n equals a,t,g, or c
gaaagatacactcaccggagaaaagaagtttctgaagaaaaccacaaccatgccaatgaacgaatgctatttcatgggtctccttttgtgaatgcaattatccacaaaggctttgatgaaaggcatgcgtacataggtggtatgtttggagctggcatttattttgctgaaaactcttccaaaagcaatcaatatgtatatggaattggaggaggtactgggntgtccagttcacaaagacagatcttgttacatttgccacaggcagctgctcttttgccgggtaaccttgggaaagtctttcctgcagttcagtgcaatgaaaatggcacattctcctccaggtcatcactcagtcactggtaggcccagtgtaaatggcctagcattagctgaatatgttatttacagaggagaacaggcttatcctgagtatttaattacttaccagattatgaggcctgaaggtatggtcgatggataaatagttattttaagaaactaattccactgaacctaaaatcatcaaagcagcagtggcctctacgttttactcctttgctgaaaaaaaatcatcttgcccacaggcctgtggcaaaaggataaaaatgtgaacgaagtttaacattctgacttgataaagctttaataatgtacagtgttttctaaatatttcctgttttttcagcactttaacagatgccatyccaggttaaactgggttgtctgtactaaattataaacagagttaacttgaaccttttatatgttatgcattgattctaacaaactgtaatgccctcaacagaactaattttactaatacaatactgtgttctttaaaacacagcatttacactgaatacaatttcatttgtaaaactgtaaataagagcttttgtactagcccagtatttatttacattgctttgtaatataaatctgttttagaactgcagcggtttacaaaattttttcatatgtattgttcatytatacttcatcttacatcgtcatgattgagtgatctttacatttgattccagaggctatgttcagttgttagttgggaaagattgagttatcagatttaatttgccgatgggagcctttatctgtcattagaaatctttctcatttaagaacttatgaatatgctgaagatttaatttgtgatacctttgtatgtatgagacacattccaaagagctctaactatgataggtcctgattactaaagaagcttctttactggcctcaatttctagctttcatgttggaaaattttctgcagtccttctgtgaaaattagagcaaagtgctcctgttttttagagaaactaaatcttgctgttgaacaattattgtgttcttttcatggaacataagtaggatgttacatttccagggtgggaagggtaatcctaaatcatttcccaatctattctaattaccttaaatctaaaggggaaaaaaaaaatcacaaacaggactgggtagttttttatcctaagtatattttttcctgttctttttacttggttttattgctgtatttatagccaatctatacatcatgggtaaacttaacccagaactataaaatgtagttgtctcagtcccctccaggcctcctgaatgggcaagtgcagtgaaacaggtgcttcttgctcctgggttttctctccatgatgttatgcccaattggaaatatgctgtcagtttgtgcaccatatggtgaccaggcctgtgctcagtttggcagctatagaaggaaatgctgtcccataaaatgccattcctattttctaatataaaactcttttccaggaagcatgcttaagcatcttgttacagagacatacatccattatggcttggcaatctcttttatttgttgactctagctcccttcaaagtcgaggaaagatctttactcacttaatgaggacattccccatcactgtctgtaccagttcacctttattttacgttttattcagtctgtaaattaactggccctttgcagtaacttgtacataaagtgctagaaaatcatgttccttgtcctgagtaagagttaatcagagtaaatgcatttctggagttgtttctgtgatgtaaattatgatcattatttaagaagtcaaatcctgatcttgaagtgctttttatacagctctctaataattacaaatatccgaaagtcatttcttggaacacaagtggagtatgccaaattttatatgaatttttcagattatctaagcttccaggttttataattagaagataatgagagaattaatggggtttatatttacattatctctcaactatgtagcccatattactcaccctatgagtgaatctggaattgcttttcatgtgaaatcattgtggtctatgagtttacaatactgcaaactgtgttattttatctaatccattgcttaatgagtgtgtttttccatgaatgaatataccgtggttcatatgttagcatggcagcattttcagatagctttttgtttgttgggaagttggggttttggggggagggggagtattagtacgttgcatgaaatagcttactttataatgatggaattgctttttcttttgtcttgtgatttttttttttgaagtgaaatttaactttttgtgcaagtagtactattatacccatcttcagtgtcttacttgtactgtatcacattccataccctcatttaattcttaataaaactgttcacttgttaaaaaaaaaaaaaaaaaaaancccnngggggg

SEQ ID NO: 59 - DNA, 1974 bp, Homo sapiens
  misc_feature (1967)..(1967): n equals a,t,g, or c
tggttgggatgtggagttgttgctggactctcaggcgaacgtgaagtcattgaagtgtgtgaagctctgtgcttgcatgagggcaagcaaggaatggctgtgctgaggctgctctgggaaactccttgccccttgacctcttttgagagcattcacgtggtcttcttgctcatccccttataaatgtgctttgcctgcctcagcctcatggtcagagcagtggagactggagccctgtttgcacgttctagttgttcggagaaagcctaggttctgggctcaggtccagatgcagcggggattctgttctctgactgtggcgaccttgctttggttcttgttgaagtgaaccaagcccggccaccacgcatggcatgctgtgcttggctccccataagacgtcctctttgggtgcacggtgtcaaagtgtgggcaggagtggagagctggtgccctcaggaggagaccacagcatgtccatcagctcagcagagctcgacagccacaagtcctgagaagctttgaccttgaagggcttctgggagaggaggaatttctgcatggggcgtgaaggcacactgtcccaccacaactgaaccagaagagagtgaagactcccctcttcccatcctctgtgccaggtgccagactgwctccagccaaggtgcaaagacgagattatgagacaggtcctcaggcctgtgttccaagtactcacaggggctctgggtgcccatcgccgggagtatggttcagctgccaccggcactgtccatttgcctgtctgtcaagctcagagcatggataagccacacagcagggcagtgcaccctggcaccatgcacggccagcaagaatcaaggcccgcagatgctaagagggcctattgtcaggggaaggtccccgctcctgcacactctctatggatacttgggttgtgggggctctcttggagagtaagtttgtggtttgtttctggtttacagtggtggctgacaccccttgtaagaaagcattcctgggaagtcttctgtgggtccaaacatgttgctccgatcatcacaggagagcaaaaggccctagataccccctttggaatgtgagagtcttgttgtctgatatttgccactgagctggtgaagcccctctaaagagatctcgaccctggggagcagaattcttgtcatctatgaggggtcctgagaaagacttgtcattttttttcctggagttcttcccattgaggtcctaggatttgcacaccactgtcccacaagagctttcctgcctaatgaaaggaggtcttgtggtgtgtgtctcctctcttctctatagttcccgagttggcccccattgcagcccccaccctgtgggtagtcttccagaagtgatgcagtggtgtgagatgccctacaccttgttatttgggagactttgagagtcattcacttccatggtgactagtgtttgttttgcctgattttatattctgtgttgcatttctccccactccctgccctgctttaataaacagcaaaccaatatctaggaagaatgactgagggatagtattgggtattggccccatggcaggaacagccacttgcatctggtcccggtgccacactgcggtgcttggtgtggttgtggagcctgtccctgcgcgccttgctcccgttgagccacgctgtctggtgggtgattctctgccctgagccaccaccctggactggcccagtctccagagctggcacaccctgcctgttttctctttttagacacaacagccgcagtttggccagccactaagtcccaccagctgaggtccgaggaaagcggggtgactcatttcccttgtccagggcccgaggagagtgaggtgtccagcctgcaaagctattccagctccttggtgttggtttgcaataaattggtatttaagcagtaaaaaaaaaaaaaaaaaaaanactcgag

SEQ ID NO: 60 - DNA, 2111 bp, Homo sapiens
  misc_feature (225)..(225): n equals a,t,g, or c
  misc_feature (612)..(612): n equals a,t,g, or c
  misc_feature (1142)..(1142): n equals a,t,g, or c
  misc_feature (1203)..(1203): n equals a,t,g, or c
  misc_feature (1245)..(1245): n equals a,t,g, or c
  misc_feature (1765)..(1765): n equals a,t,g, or c
tgataactaaacacacatgtggtgaatcgtcactcatggtcctgatcacttgggttcattgtgcttgtcaatcaaaaggaccccagacgtgcctgccaccaatccccaggctgacccagatgcttctagtgactcagttaggaggatggagggcaaactgacaacaagcaaaattctaattgttgggaaggtattttgggtttcctgcactttgttttatatttnttttttttgagaaaaagatagtcaaaccatccaggcataaaatcattctaatagaaaagctgttgagaatcatggagaaaaaaaataaaccctgtacactggagctcactgcttactcacaggcacttacatcaggatagcagcagcagcggcagcaggagcagaaaaacaggctaatcagaaggaagaaaaaacattctctgaaaacgctaaaatggagcaacagtagtggcctagaaaggggtatcatatgttttggtaaaaataataataataataataagccatgtagcaatggagaattgaaattcctgagagtcactgaaactgttcaggggctcctttcattctcttcttcacttccaaaccctgcaaatcccccacggnagctctttgtatagasataatttctcagactacttagcggagaaattcatacttttatagaaaggtatgtgatgatggtgtatttatgtgtgaaagagaaaagaggaatttactggtctctccatcttcaagaaagaaaattctaagaattttcacatcaccacctacagaccatgacaatgtcttccagaaaaataaacattgttccttttatggcttttagaactagaatgcagaattcaattatttattttaaaatccctaacaggattttatcctggaggagaaagcgtgcacaagtaaaaggaattgtaaatgctaacaaaataaaggaaaaaagacaaaaaggctcattatagaattttcagtatcaggggattctaattctaaactgtggattaaattcgtgtcattgttgattacatcttctgggctgtgaccagtgttgtaaaagaataggagaagcatgaagtctcaaaggcaacttctcttctccatgcccatgggaatatcttagagctcacaatgangttaataaaaagcccctgattccttggatctcatggataaagagctcaccaattamcaggncccacaggaaagaacaaagcagcttcatatcgaaacagaaanaacaaaaaacaaagccctgcaatttgcaaatgtccaagaagtgcatggaatatcagtaaataatggaaaggaatacaatttttaaaaaaataggctctgtgcatatttgaaagtgtctttttttccagataaataattctagatgaacaatttcatacacacagagcatttgaataattccatagaatccattttaccagatctttctgcctaattacaagtctttgaaccagacaccggtacttgaaagatcaatgcctggctgcacaaagcatatataaagcataattaagaggaggactgctcgacagagccacggataacatgcatatggatgtgtgaagtcttcacatgtacacactttatagctgtgatatgcacatcagacacatactctcactgtccaaaatgtctttggctgccattttataaatgaggcaatcaaaggaaaatggaattaaaaacaaataataaggtaaccaaattttagatcatcttcttatttgaatctctgagtatnaagcaagtctatttaactccattttgaagtatttatctctgaaaataccttacttcctatttagatcaaaatttggtacatttctaggaaatacgtggattttaaatgtgaaatgatttgttcaacttgcttctcatttttttaattccaaatcaatataatcaaacattaacactttggactactcagaaagtatatttatactttcaggaaggattatggtagagtatgtacttaagtgggagcattttgtgtgtaaactaggaaggttggcttagtctctgggaggcaaacaaatcgaagtcgcggaattcgatatcaagcttatcgataccgtcgacctcga

SEQ ID NO: 61 - DNA, 592 bp, Homo sapiens
  misc_feature (8)..(8): n equals a,t,g, or c
  misc_feature (451)..(451): n equals a,t,g, or c
tttgcctnctgccatgccttttccctacccgcttcctcagccctcgccacctcccctcttcccacccctgccccaggataccccttttttcccaggccagcccttcccaccccatgaattcttcaactataatccagtggaggacttctcgatgccaccccacttaggatgtggccctggagtgaactttgtgcctggccctctgccacctccaatccctggccctaatccccatggtcagcactggggcccagtggtccaccgggggatgccacgctatgttcctaacagcccctaccatgtgcggagaatgggggggccctgcaggcagcggctcagacactcagagagactgatccacacatacaaactggacagacggcctcctgcccattcggggacatggcctgggtagactggatcttgggctgggactggatgtgccaatggnccttcagggcctgcctggcacctcaggtactgggctagggtgtctgctatgcctggtattgttcttgtccattgctgtcaccaataaaggcatggaagaacagagtgacaaaaaaaaaaaaaaaaaaaaaaaaaactcgag

SEQ ID NO: 62 - DNA, 1010 bp, Homo sapiens
  misc_feature (350)..(350): n equals a,t,g, or c
  misc_feature (584)..(584): n equals a,t,g, or c
ggcacaggtttaaacgaggtgagttcacataacaggaattctggaactgcttgaaaactaggacgattgggcaatatcggccttaactccacctgatggcaggtgacccggatagaaaatggccctgcgtttagccaggatgtggctctccagcttggcttcagtgtgatcacttgtcagtgcgctttctctttcgatagtgaaatccttctctatacctatgttttgttttgtttcttaagttgggaaacagaatgggccagggaggttgagtgactgaagaccaagggttggtgcagcctcctcgccgcgctgcgggggctgggccgcacaggcttctgcccttctcnggtgtccaggctccttgggtratgctggagttktmatgsccgcagttcagtgtgagattttttaccaggtattgcgcttaaagggacatgattttccattttcttcgcccggacaacttgaatgaaatgggcactgttgattccacttctgtcragragcttcggggctcagagaggtgatgacgtgcccaaggtgacgcaactcgtgaacagccgtgcctgccttgggcgcanctccggcgccagagctgggctcttcaacacggcatttagcgcagaaagtcgtggttcaggcagtatgggccgctgtgacaaaacacctaagactgggtagtttataaagaacagacattcaggccaggcacggtgactcacgcctgtaatcccagcactttgggaggccgaggcgggtggatcatttgaggtcaggagtttgaaaccagcctggccaacatggtgaaaccccatctctactaaaaaaacaaaactagctgggggtggtggtgcatgcctgtggtcccagctacttgggaggctaaggtagaagaattgcttgaacctgggaggcagagattgcagtgagccgagatcacgccattgcactccagcctgggtgacacagtgagactccatctcaaaaaaaaaaaaaaaaaactcgag

SEQ ID NO: 63 - DNA, 1219 bp, Homo sapiens
  misc_feature (575)..(575): n equals a,t,g, or c
  misc_feature (582)..(582): n equals a,t,g, or c
  misc_feature (606)..(606): n equals a,t,g, or c
ttttttttttttttttttggacatgtctatggaaggataattccagaagtatcatgcaacggtagccaaggcacaggtcctgtctttaagcagtttatggtatagtggggaaaaggggtggtaaaaacacaaaatacctcccatgcaaatgtcctaactctcttcattaatcaatatctacatgatcccacaggtctacttctttatcttcatctctgcaggactagatatttgatagttactactttcccaatgctaacttcttcatttatcctgtcatattttgtttgtttcagtttttatttttttgtttgtttgtgttctgttttttttagagacagggtctcagtctgtcactcaggctggagtgcactggcacacaaaaagctcagcagcctgggacttctgggcacaaaccctcctcacgcatcaacctccaaagtgggtaggactacaggcatgtgccaccacatctggcaaatttttaaacttttttttttttgcaaagacagggtctcactctgttgcccaagcgagtctggaactcccgggcacaagcaatccacccacctcancctctcnaagtgctgcaatcacaggcattanccaccttgcccagcctgattttgtttttaatatatttcacagtcacattcgctgaaacttacttctcccttattctcttatatttcagtacttttcaacattctgtttggataacgtcacttatctggtgccaaatacttaaatcgtagtctgatctattcccaggaattcagcattaccagtgttctgactcctaaagctacattcttctgcttatctatactcacaaatttcagatctatatcctgttaaatatcacttgcatttttcaaagataccttaagtacaggatatcttaaccagaatcattccaaggaaaatgtgctgctctttccacttttcccaaggttggcaaatggcaccactttttcctcaccctctcgggtaggtatctttggtatctcccactgttctccatagccttatccacatttctgcttagcaaatccctacttttccacccttcaaaccacggctatgattttttgtaacccacactcaagtcctcctctacttcttgtagcatataatcagtctctccatataatgcctctcatgcctttacttttaaacatcaaatctgctcgtgtcgaattctttggatccactagtg

SEQ ID NO: 64 - DNA, 2630 bp, Homo sapiens
gctgcacttcccaggccccaccagccgcggctccggctcgtagcccacagcccactgccggcggctgggcgctgccgaggctcggggcgcgcgcagttggcgtctgccagtgccaagactgtgccgcccccacagccgaggcgcgaaagggggacgcccggcctctgggccgctgccttcgctttctcttcgttgttgcgaacgccgtccgctcaggaggcgccccgcgaccggcgcgatgagtgccaacgaggaccaggagatggaactagaagcattacgctctatttatgaaggagatgaaagtttccgggaattaagtccagtttcttttcaatataggataggtgaaaatggtgatcccaaagccttcttaatagagatttcctggacagaaacatatccccaaacacctccaattctatctatgaacgctttttttaacaacaccatatcatcagctgtaaagcagagtatattagccaagctacaggaagcagtagaagctaatcttggaaccgctatgacctatacattgtttgaatatgccaaagacaataaagagcagttcatggagaatcacaatcccatcaattccgcaacatcgataagcaatatcatctcaattgaaactcctaatacagccccatcaagtaagaaaaaagacaaaaaagaacaactttcaaaagcccagaagcgtaactggcagacaaaacagatcacaaaggagaacttcctcgaggctggaactgggttgatgttgtgaagcatttaagcaaaactggctctaaggatgatgagtagcacttggaatttgagacaaggaaagagcattctttaaagagtaaaactgggttcaaaatctttcattactattttctggtattgaggcgactttttataaaacacaattttttgtatgtttcttacattaaaaaggttgtaagttgaaagttcatgaagagatcttgttgtattaaattattttcacaaacttgccttaataaaaggtgaaaatgttactgtttagtatactttatgaagccccttgagctttataaatggacaggcatggggaataagaatcagtgttaatttaaatgatcttatcctggtggatgtgctrttttcttaaaggagtatgaagcccttttcaaactatcatcccagtggagcggagtactcagtgaacagttactccatagtgcaatccatattaataggcttcttctcttaagtcttcatctcttcttttgcttaattactgaaccgtaaattacttcagagaaatttaaatgctggtatttgaactttatacatgatactttttgtagtttcttttaatttttgaaagatgaactgcttccttttaataaattaatatctatttatacttttctcttgatttgggtcaagatgtttgatcatgagtgctttgagtggtatgtggaataggagaatataaaaacaaatctgccaaatacactagaaagcattttagtaagaaatgctggccctttcttaaaacatttctcttgcatataccaggatgggagtaaaagatgccttaatatttagtttttgtattgttggagacattgattttaataaaatcctatttatctgctgttgtgtgcttttagttgttggataactgaggtctcctaaatggttcaacataaaaccacatttcaagtcttgtttctttttggagtgtcttttcaagtattcaaatgtatttctcaacctgagcatctttttaatcatatacatgggagtcttttaaatgctgaactgttacacatgcttgatttaaaaataataataatagaggaaactattggtctagttgtgccaagaaaagtttctgatgtttatgtgtgatgtacagtgattttgtatatgcgcccagctttaagaacacataaaactattacgtctggtaggaagattgttagtgcctcaagttacacctgtgcagcttgggtctgagttttgatagaacagtaaacatttaaagaagttaagagcagtttgagctgtatccgcggtttttactcgttaactgacttcagctaaatagtttgaattatagagtaagtataattacagcaaaggagttaatctcattttcaaagctgtttctcattttatttcttgaattaatgtagagcaaaacatgttaaaattcaggacmactggaatatggcaacttatgtttcagggttgtgtgtgggtagtatttgtggttgtattggtttgttttttgtttttggagaaacatctgctagtggaataaaatactttgttttgctctgaagagactgaaattgttcaggcttattatggctcatagattacagagaatgatgctagttacatgccaatgaactatttttactctttttatatgaaatgtaaaaatttgtaggggttctggtgatggtggtacctcttattaccttatgtaaaacacttgaacagcctcatcaatattgccgtcatctgtttaacactcccagtatattttctcaatgtctgtttacttaaaattttgtggagtgacataattaataagcaataaagtctgaattatacacagaaaaaaaaaaaaaaaaaaaaaactcgag

SEQ ID NO: 65 - DNA, 1276 bp, Homo sapiens
ggcacgagtttccgttccaggatcttgagtacagacatatgtggttttattgcactttgctttatcatgctttgcagatattgtgttttttacaaattgaagatttttgacaatcctatgtcaagcaagtctattggtgccattgttccaacagaatgtgctcactttttgtcacattttggtaattctgaaatatttcaaaagttattattaatctgttatggtgatctgtggtctttgatgttaatattgtaattgtttgggagcacaacaaaccatgcccatgtaggttgcaaacttagttggtaaatgttgtgtgtaatagttgctacaccaaccagctgttccccaatcactctccctctccttaggcctccctattccttgagacaaaataatactgaaattaggcaaattcacaaccctataatggcttctaactgttcaagtgtaaggaagagtcacacatctttcactttaaaccaaaacctagaaaggattgagcttaataaagaaggcatgtcaaaagctgagataggccaatagctaggcctcttgttccagttagccaagttgtgaatgcaaaggaaaagtccttgaagaaaactagaactactttagcgaatacacaaatgataagatagtgtgacattctaattgctgatatggagaaagttttagtagtctggataggagatcagccacaacattctcttaagccaaagctaactctcttcaattctatgaaagcttagaggtgaggaagctgcagaagaaaagttggaacctggcagaggttggttcatgaggtttaaggaaagaagccatcctcatagcataaaagtgcaaggtggtgcagcaaatactgatgtagaagctgcagcaagttatccagaagatctagctaagattattgatgaaggtggctacactaaacaagagattttcagtgttgacaaaagggttttcttttggaagaagatgccatcttggctttgaatagctggagagaataaggaaatgactgacttcaagggacaggctatcttgttaggggctaatgcagcaggtgaccttaagtcgaagcccatgctcatttaccattctgaaaatcttagggcccttaagaattatattaaatctatcctgcctgtgctttataaatagaacaactaagcctggatgccagcacatctgtttatagcatgatttactgaagattttaagtccactgttgagacttactgctcaaaaactaaaaaaaaaaaaaaaaaaa

SEQ ID NO: 66 - DNA, 1807 bp, Homo sapiens
  misc_feature (1807)..(1807): n equals a,t,g, or c
cccgggatcgacccacgcgtccgctttacatatcatactttggggttaaaggagattcctcagactcatccagcccttgggtgctgaccagcagagtcactagtggatgctgaagttacatgagctacatgttaaatatttaaagtctccaaaataaaacaccccaacgttgaccttacccggctgatggttagccccttgctgcctgctccatgtgtcttatgagagcccgtagttacagtgtcctctaatttgaaatccataagttaacaagtctatatcaggtgcagctggctttgattaaaggccatttttaaaacttaaaaactcaacacctcacagattataatagaaaaagaaatggcctcagtttgatctcgttcagaatgacccagattgtttctgctttgggtgcagctgtttagttcagagttatattacagagaattattttctgagataatcttaaactagaatgttcaaaactaattgataattgaagtatcaagatacgtagaacacctcagagatttttcttcaggaacttccacaaactttgaatccttgtatctttatttggtattcatactactagtagcaaaatacaggttttttgttttgttttgttttggcttcatagagtatctcaaattgaaacttttctgcacaaagaataaaattaaggattttataaactcaaattggcacctactgaattaaaatacataaaatcatttaaatataattcagcatatgggaagtaacattgcactaatatggaaatcactgccagagacagtctattttcttttaatttgttactacttagtcacaaaccccacattattccagtttggaattacttattaaggagaattggaaatacatatgcccatgcttaaattttatagctttaatttgtgttatttctttattgacgggaagaggtacatctttttttccttactgaaaacaaatatggattaattgcctcaaatttgtataagtgattggctagtgattcttgttttcagaagggagagtggtatagatagaaaatgacaaagatggcaatatacacttaatgttgttattgtatgttgttactgaagtacttagatttttaaaatttcaaatcctaaatcacttcttgtaggagggttttcattaactgcagtatatacagttcactacatatgggttgtttgagttttttgtgtgctgtatttctttctgttttttaatacctggttttgtacatatctaactctgttctcttttggttgttcagaaactggattttttttttcttaagcagtgcttaatttgtgttttttaattttgattcagaagtagtcccagctcataggtgttcatactgttacatccagaacatttgtcaggctctctgtcagctttcatgtacatatggtatagaaaccatggagttaggcacttcctggattttttttttatgagaaaaatactgtatttaaaatgtaaaataaacttttaaaaagcaggcactaatatatatttcttccagcctttgattacaaatttgtccttgcacatgttaagatgaattatctcctaaaaatatcattgttcttgggagcagtgtatgttactttacatagcagcggttcctgtcatgtgttcatgtcagaatatttttggttttaaactttcttattgcctttggctgttgattagtacagtacaagtgcgatttcaaaaagatcttgaaagtaatatatttaatcaattaaaatgtttatctgtaaaaaaaaaaaaaaaaaaaaan

SEQ ID NO: 67 - DNA, 1732 bp, Homo sapiens
  misc_feature (6)..(6): n equals a,t,g, or c
  misc_feature (56)..(56): n equals a,t,g, or c
  misc_feature (83)..(83): n equals a,t,g, or c
ttaaantggtttttggggttttattcccaaaggaaaaccttccaccaaaggttacntatttacctaggttcaaaattatattntttaggaaggtgccctggatttttggtcaggagatttcttacmaaccatwttaaaaamcamactttgaaaagtmtcctactaccagaagcacttagactatcacagaaaaatacatgaagagttaatgtctgagataagaccagcagcttatagttataagaaaaacacactgtacaatgtttgggggggaaatctgttgtttatagaaaagctttacctttttcttatttatcctcagataacgttgtgaaatctgctcatcagtaaggatgatatggaaagaattctctttttctatctatggtttatttacatattaaaattttactcagtttattaagtacacatatgataccacactagatgcaaatatatatacaggctatgacagtcaatgttcaatttaatactggtcaataaagtgaatttattcaaatgtaacaacttcacttgaattttttggatcacacatatcctatataaagccatctggtttctaatattatgcacaacacattccattttaattataacattcatctacaagaaaaacaaggaaaacaattcaaaactatgttagtaattagttcttgtttggtccattgtacgcaatcaggraagtataggacttaattagttgctatcaaattgaagcmatgaaaaaggtaaaaatcaagtacttaaaataaaaatatggaaataaccccccctccccaatactwwagggacacwwaacaacaactactgtcccatcaagcaaaagtggaaaacaaacagagcatgtgtgtaacctcacttaccatctttttgttattctacttcaacgggtcaagaaaggtgaagagagagaaggtagaagtaagagtcagaaaaggcctaaataaaatcctcactgaaatgtttaaacatacaagcaatagagacaattaggttgaggtcagatgcagtactactatatttaatggagttaataattagggccaaattaacatggacagttattcctgaatgcaaattaactcattaaacgatttaaatttccatttttcagtctaccacattttagctaacaagacacaaaaagtataagtcaaaatactaagcacaggaattccaaaaagtaagcttctttaattcattactgaacttaagaactttaattaagaaaaataaatgataacagcaaaggtctagctgagtaggcagagtgttagatagctcagggttgtttttccaagctctagtgttcaagttaaatttatttgacacaggtatcttttgctgktttctactcgaagaataatttaacttgataggcttacaagattgcacagagtgaacagaattgagccaatagaatacagaatgacaaaccatacmagcaaatgctgctagggaattccttggcaaaaatgktttattagcatactgacaaatttgatttctatcacttggccttaaacacgaagaaagtgggcatgaagagatgtgtagttatttgtgcctatgttggaaaataaatttatggctatacatgatatttcttcatacctcaaaaattttattgtccagtatataaaaaagccattctttaaaaacctgacactgaataaaaagtatagccttcaacttcattaaaccggcacga

SEQ ID NO: 68 - DNA, 1052 bp, Homo sapiens
gctgccgtgtgcacggccgtctggtctctctcccacacgtgtgcgcaacctgtcatggagatgtgagggccttgtgtgtgcttctgtgtgtgactgtgtgactgcgggtccagacccccgcctggcggtgatgtgggcccttaaatcactcttcctgctcaccccctccccagtgattcggttttactttgcagcactgtggatccgggcagctgggcggcttctcgggggtgggggatcccccaccccgcccacaagtctggccccagggttctcggaggcagggggtctctgttagtgcgctccctccagctgcaggcacatagcccgagctcacagctcgcctgagtcgacgccggctggggtgaaagctccaagtgggcctctggccttcccgctgctctgggtccagagtgtctggagcatgtggcacagaccagggccccttgtcctccgaggagggtgggacatcctctctgtctcacgcccctgggtggagattctggctggcctcctctccctgtttgccaaggtcaaagtgggccaagggtgcaggtgcttagcctggttccctctcccgggccccgaggttctgtgggttgggcagattggagacaggactcgtgtaagggctctgctggggtgaaggatggagacagagaaaatcaagatcctttcacaagttaattctacgtctgctgagccccagcccccgacacatcaccctgaggaggtgctaggcttctctgggccccctgtgccccatccacatgttgcagagtaaatctggccccttggacctggggtccgagatggacgcctggctgcccctcctggactgcgggtgacagctggcgagacactgcggggcttgggtgcggggagatggagtggggctgagctgcatttttccagccaccccacatcccacagaaggggagtcatggtcagtgccttgagctggaaagacgggcaatgcttccggcccacaccaaccaagaaaaccaccaggggctcattcatcctctcaaaaaaaaaaaaaaaaaactcga

SEQ ID NO: 69 - DNA, 992 bp, Homo sapiens
  misc_feature (405)..(405): n equals a,t,g, or c
ggttccagcccaccccatcccacacccacctggctcatgtctctctgacctcagttcccgcctgcacccccagggatgggtgggaagggtctagaaggtatggacctggagtgggtcacttctgggtggtaatctggctagtcagaagcatgagtgatcgaatgaacaagaatgctctgtaaactctgagacctttggaggctgcagagggagaggggagcagaactccagagatctgcatcttgtcagaggagtccatcaagctgatttggggagaagtccccgcactcccccagctccccggctctcccagcagctcatctacctgcccccaccctggggcacctgcaaagctgttaccatggactcggatttggatttcttcgactcctacagcatcactgnctgccgcatcgactgtgagacgcgctactggtggagaactgcaactgccgcatggtgcacatgccaggtcaggcykggggytccgagcatactcctggggtcctgggsctttgctgccyttcactagctccccatccatatcaatctcccttcccatcttctcccagcttacaccttctaggcctttggtactaccaccatcaccagaccccttgaattcccatcctgcatcattgtcttttctcctctgtaggggatgccccatactgtactccagagcagtacaaggagtgtgcagatcctgctctgggtgagcgcccctggcctggggcagtctgggggagggaaaaggtgctgccagccacgtgcgcaggagtttcaggtcacgctcccagaagcctcacataactcctggactgggctgcaccctctcttgtgtctgacattaaagctgagaatggtcagtcatggtggcttacacctgtaatcccagcactttgggaggctgaggtgggcaaattgcttgagcccaggagttcgagaccagcctggtttcatggtgaaaccctgactctatgaaaaaaaaa

SEQ ID NO: 70 - DNA, 1229 bp, Homo sapiens
ggcacgagaaaatacaaaaattatccaggcgaggtggtgcacgtgtgtagtcccagttactcgggaggctgaggtgggaggatggcttgaatctgggaggtgaagattgcagtgagctgagatcacaccactgcattcagtctggataatagaacaagactctatctcaaaaaaaaaattgtatactttattgactcatttatgtctgatgggtatttttgattacaaattgtttagtcactactttaaggcctgctttatttttttcttaattttattgactcatttatgtcttagtcttttttattacaaattatttattgttcagtcactaccttagagcctgttttattttttcttaattttattaaaggatgatattgatgatgaaatgtcttacgatgatcatttagaggtttattttgaacaactggcaattccacgaatgatggaataaaacatatgaagtagaaggactggaacctccagaaaaagtactttaagttacctacaggtgatcctagtcaggtatgaattgataagaaatgcctgcaccttccctccttcctatctttcccttgcctacagaaaattaaaaggcaaaacaatggacatctacatattcttcattcagatcaaccagtggctagcatttgccaccttttgcagtttctttctctttccataagtactttcttctctgaatcatttgaaagcaaatgaaaacagtagcctaaagtgtcagtttcaaccagaaaataacagctctgatttctcatggctcacactcttctgaaacgactcgggtagaggctgaggaaggccgtgttgtttgtctacctgggactagtaagtatagaaatagaattcctttgttcttaaattctacctttgactttacttttaaaatataatttctttggtacgatttagctcatgcctgtaatcctagcattttgggaggccaaagagggagaattgcttgagcccaggagtttgagaccagcctggacatcatagggagactctgcgcacgcacacacacacacacacgcgcacgctaaccgggaatggtggcatgcgactgtggccccagctgcctgggaggctgaggttggaggatcatttggacccaggaggtggagactgcagtgagccatgattgcaccactgcactccagcctgggtgacagagcaagaccctgtttcacaaaaaaaaaaaaaaaaaa

SEQ ID NO: 71 - DNA, 1811 bp, Homo sapiens
  misc_feature (1804)..(1804): n equals a,t,g, or c
tccacggattctctgccacaaggatatgtggctcagtgtggtcaagttccttccaaagaacctgcacttggtctgcgtggacatgccaggacatgagggcaccacccgctcctccctggatgacctgtccatagatgggcaagttaagaggatacaccagtttgtagaatgcctgaagctgaacaaaaaacctttccacctggtaggcacctccatgggtggccaggtggctggggtgtatgctgcttactacccatcggatgtctccagcctgtgtctcgtgtgtcctgctggcctgcagtactcaactgacaatcaatttgtacaacggctcaaagaactgcagggctctgccgccgtggagaagattcccttgatcccgtctaccccagaagagatgagtgaaatgcttcagctctgctcctatgtccgcttcaaggtgccccagcagatcctgcaaggccttgtcgatgtccgcatccctcataacaacttctaccgaaagttgtttttggaaatcgtcagtgagaagtccagatactctctccatcagaacatggacaagatcaaggttccgacgcagatcatctgggggaaacaagacgcaggtgctggatgtgtctggggcagacatgttggccaagtcaattgccaactgccaggtggagcttctggaaaactgtgggcactcagtagtgatggaaagacccaggaagacagccaagctcataatcgactttttagcttctgtgcacaacacagacaacaacaagaagctggactgaggccccgactgcagcctgcattctgcacacagcatctgctcccatcccccaagtctgacgcagccaccactctcagggatcctgccccaaatgcggtcggagcgccagtgaccctgaggaagcccgtcccttatccctggtatccacggttccccagagctttggggaccacgcgaaaacctccaagatatttttcacaaaatagaaactcatatggaacaaaataagaaaccccagccatgaaatctaccatgaagtcttcaagttcatgtcactgacaagcttgtgcaaagcagccaccttggaccataattaaatcaaggacattttctttgagacattccttatagttggagactcaagatatttttgttgcatcaggtgtattcccttgcatgggcagtggcttttataggagcattagtcctcattcgctgaaccctgttgtttaggtctaatttaagttttacatagagacccatgtatgactgcagcccattggctgcaagaccagggaggaaagtggcaagctgtagaaaatgtttacacgcatggaggggcattgctccagccctcagagcgtccggagcagcaggrtacatgggtgggaggttcattcagcacccaccagtcaggtatgttctgagtgaacccacagcagtcgcagaatgagcacctggcagggtgggtttcctaggaataatttattatttttaaaaataggcctaataaagcaataatgttctagacatctgtctaagtaatcagactcaggttccacacacaagcaacaactcgtgggcctcttttctatttcaatgtgctactaagaacccttggatgtaacatactagttagttaatgaattctgtgaattctgtgaagagtaatgtgattgaaaataagtctaaacagctgtaaaagtgaccacaatgacatgaaataaatttaataagtctagatcagcaaaaaaaaaaaaaaaaaaaaaaaaaaaaaaaaaaaaaaaaaaaaaaaaaaanaaaaaaa

SEQ ID NO: 72 - DNA, 2534 bp, Homo sapiens
  misc_feature (174)..(174): n equals a,t,g, or c
  misc_feature (1350)..(1350): n equals a,t,g, or c
agcaactctatagatcatagaggaaacggtacctgcagtaccggtccggaattcccgggtcgacccacgcgtccggcatgcatgggaatagcggccctggaggatgttagacttgctccctctccaagacagcagcagcctgcacctgccccgtgtgtgtggccggcctcytcntcacccttcccggcccccggccaaggacccaggcgctgcatacaggggaggggcgcacccacagctggggccggttttcctcagctctaggctgttctgtagcttatctgcccctcccccactttcaagacagatgagcaggagcttgggtctctctcggcccctgtctgttcccagcccctgcagattctgagcaaaggccctgggtaagaagggtgggagtggggcctttgccagcagagccagggcagggcgagctgcaggaatcacccctctgcccctgcagctggaatgtgccacagaggccccacctgaagggtgatgtgctggaggggtggcccagagccatactgcgtccaccctgagctcggggacaggtgacagtggctgctctgggaaggggcttttagatgtaacctacaattcagttaggctagagacagatgctggtggaggaagggctgggccaccagggatcacagaccacaggaagatgggaggtggaagcagaggccctgcccccaccccttcctgtctcactcttctgtcttgtccccacccatgcgccttcgtgcctgagaccagggtggccacacaggcagggcctggctccagtctcatcctcccattgcccagtgagccctgctcttctctccccagccccctcccaccgctgcctcgtagagtgacctcggacagagcccccctagcaatacagggaggctcccggggcctggacaggcgggctcggaggctacccgctgtggccggtgccagctgcccttgcagggtgggtgagctctcaggccgagagccttatttacctagtgcaaaaactgtaaaagtgtacagactcttcacagatttttatcttaattgcaagtctgccgattttgtaaatgttcttggtgtttgactgtaatgtaactatctcacctaatggttgtacatatcctttggtcctggtgctgccgagggctggccgggactgctgctctcccaagggttttattttatttctgaatctagagaacagtattgggcaggaggaaaaggcttggtgtctgcggggggtgtcttccctgcctgtggcatttgtgtgttggctttgcagctgctgtctgagtagtggccactggggtgccttcactgggccagtcaacggggggctcctgnccaggccacagagaacctgagttcccgggagctgggccctgcctgcagccagggctggggttgccagaggccctggagggaaggacagtccctgctggggaagaacagccccggggccccctggtcaccgagactcagcctctgctggagaaagccacgccctccctgctagcacagaggcctgactgacttttttgcttaacttccatgttctgggtgatggaaactgccaaacctcctgtcagtgaggactctttccgactgcccagaaagtgggggtggaggaccgaggctacagctccacacgccccggtcccccagagcatctgccccaggtacacctccccctgcgccccgcacgactgcgggagccagactgtccagggaaacagcctctctcttttctacacactcagccacaaagccccccagctcccacaccgcgtcccagctcccctcttttgtaagtatgtgaaaaggaaaaaatgcaaacgttggagtttgggctggagctcctccctccagctgcgacttttaactatgtaataatgtacagaggaagctgttggtgttctaagactctgtgtggctgtgcaatttctgtacatttgcaattagaaatattaaagatttatttagctattttaaaaaaaaaaaaaaaaaaaaaaactcgagggggggcccggtacccaattcgccctatagtgagtcgtattacaattcactggccgtcgttttacaacgtcgtgactgggaaaaccctggcgttacccaacttaatcgccttgcagcacatccccctttcgccagctggcgtaatagcgaagaggcccgcaccgatcgcccttcccaacagttgcgcagcctgaatggcgaatggcaaattgtaagcgttaatattttgttaaaattcgcgttaaatttttgttaaatcagctcattttttaaccaataggccgaaatcggcaaaatcccttataaatcaaaagaatagaccgagatagggttgagtgttgttccagtttggaacaagagtccactattaaagaacgtggactccaacgtcaaagggcgaaaaaccgtctatcagggcgatggcccactacgtgaaccatcaccctaatcaagktttttggggtcgaggtgccgtaaagcactaaatcggaccctaaaggagcccccga

SEQ ID NO: 73 - DNA, 1434 bp, Homo sapiens
ccacgcgtccggggagattgagttagagttgtgatgtttgggctagaggatgacaagatgagctgctttgtcggttccagatatctccagcccagcagagatggccctctgcagtctagccgtattttgcccttccaccattcttggctgtgacctggtccagctgggccctgaatgaatgtttgcttctcaggccagtattctcccctcctcaccaagccacctccacacagctctaaggaagctcccccaggtccaggcctcaggggagccctgccctcaggccgaccctactgccttttcagagccctccctgccctcctcggaagttgctgatgaacctcctaccctcaccaaggaagaaccagttccactagagacacaggtcgttgaggaagaggaagactcaggtgccccgcccctgaagcgcttctgtgtggaccaacccacagtgccgcagacggcgtcagaaagctagcaccatcccggccctccgcctcctggccctgcctctatttattgcattctggttctggccgcgccgcgttgctggggtaagggcaagcactggggtcaagagcctgcacacatgagccttccgggctggaaggctggcgtaggacttggggctgtagcatcatcttcctgaccctggcacctgtgtctacttgctcccgagaagaggagcgctcatgtcttttttgcaccccaagttggctggagcatcggccaccccaagattcatctgtgacctccaggcagcagtctctgctccagaatctctggacggagctgctggcagcttctgcgagaagagagagatgtggaaggcaccttttagaagagagcgtgcctcaggttactgaacttgaacggagactgtagactcccggactttcccctaggactgggggccctgtaggctgctgttggaggactgggtagagacattggagggaagggaagggcttttctccacacaagggcagagagtccgtctagatttcttgctgtcctgccagctctgcccatgcctgaggtggtcctacctctcacgggcaccctagctgctgacagccctttgtggccgccgtccccatcccctgccctcagcacacacatctgcacacacgcagctttgttctcacctctacctgtcattccagcatccctgcctcttgtcacaaactgccccagcaagaatttgaggttctgacaacagtacccatcccccacagtaccccttcagctcagtttctagaaagctcccttttctttgaaatctgcatgttgaattgaactttgtgattttattttttgtttcaaaaaagtttaagaaaatggaaatgggcaacagtgagtgaagacatattttagcactgaatagaatatttttaaaattaaactatttgaaatatgaaaaaaaaaaaaaaa

SEQ ID NO: 74 - DNA, 910 bp, Homo sapiens
  misc_feature (17)..(17): n equals a,t,g, or c
  misc_feature (857)..(857): n equals a,t,g, or c
  misc_feature (862)..(862): n equals a,t,g, or c
  misc_feature (883)..(883): n equals a,t,g, or c
ggtccggaattcccggntcgaccmacgcgtccggccgccatctcaggtctcttggctttgcagggcccaccggagaaaactgacgacccgtttctgtaatccttatgggagaccaaccttgtgcctccgggagatccactctcccacctggaaacgcacgggaagccaagcctccaaaaaagcgctgcctcctcgctccgcgttgggattatccggaaggaactcccaacggaggtagtaccactctaccctccgcacctcctcctgcatcagccggcctgaagtcgcaccctcctcctccggagaagtagagaaataaatttctcccaccctaaaccagtctttgagtgattgcagtatgactccatttccctggtgcattcatataatagttcacctggtgaaaacaatgaagattatttacaatgctaccctgctttttctggtgtcctgaacctggaagttgtgctttttaagtcttatgatgtaatcagcacgatttcacttcctgaatttcgatgaattctaagacatgggcaagatcgggttgtaagacctctgagatttaaggccatgccctggatcatggtgaacttaccaaagcaaacaatgcctgtgagatggtcctgcagcagccaaccagtgaactcttttggtgacatcctgttcttgttgtataactttatattcctataaatccattaaggccccaataaagtttgtctctaaagcgctgtgttagatctatatggactacatctagtaaaattgtgaattttwaagtaaatattttataaggaactcctatgtaaagcmttacttaaaattargtgttggaaatatggaccttctttccnaacanttattcatttatttatggtcntatttattccattattttaggggaaaa

SEQ ID NO: 75 - DNA, 1929 bp, Homo sapiens
  misc_feature (10)..(10): n equals a,t,g, or c
  misc_feature (26)..(26): n equals a,t,g, or c
  misc_feature (1912)..(1912): n equals a,t,g, or c
  misc_feature (1924)..(1924): n equals a,t,g, or c
cacccccgangatcccaatttggtangtaccctccaataatatatccaactatatattaaaaaagcacacttgaggagctagggaactattttgaaaaatatatacaatatttaaagatacaaacagtagtgcttaaaaatactacataaagcattattttaaaggttatactggaaagtgcaattttaaaatgagtaaaacctctgtatttctgctggcattaagggttgatggtgttaccatgtatcatcatggcggtactattttttaaaagaaattaaacactggatctctccttaagccaacattgaaaagacttgccgcacttctgagtccaaacactggaaagctctcctttgccaccgttagccggggctcattctccatgtgccttagccttaaacatgcccccactcccacatctctcaccctgtcccctcctccccagattcccaatcccaccgcaatgtttggcaagcctaggactgataagtagctctgatagaggagctggtggcttttatacttcttcctgggtttttgttggggtttgttgtttcgttgttttttgtttttttttttgtttggttggggaagtattgtcttctacgtgtgctattttcagtagcagagtaagcacaaggttttaatcgagttgcataagacacctttgcatagctatttaattgcccaatgtaaaactttaatgccatttctaatgcttttattcatttttgaagtatgagtttgtagggacaaagaatgtatgttatcgtagacaagacccccagagactcttttcagcagaaagttatgcttctagttgccttaccatgtttcttgcaaaactgtccatggtcctcaagggtgttggaaacattatgtttattaaatgggcctctyttcctttgctgtgcacttgatgggtgaactggattggggtgtgcacatccaggaggaggaggagagacctgtagaagtttaaagatagtttgtaaatatcttctaatgcttgtttttagtccttttatgttggagaagttcatggtatgtagtttaatgcaaaatgaaaccattttatttcaatgttattaaaaaggtttgttttattaggaagttaatgtattgttgcagtgttttgtgcctgtttaaaggcttttgtttagcagagtgaatgtaaaatacagtaaaatgttaagattgtcatctactttttaaaaaaaaatatcaacttggaattgttttttaaaggctcaatcaaggaagtgaggtgtgcaataaggtagcaagtaaaacgcagttgcgtttttatgtcatgttagagatccatacaattttccactcacgggatttttgttgatggctgaattcttgtggattcataagaggatcatgcccttagcaagtacttttgttttgttttaaattaagagattcccaaatgcctttttccccctcatcttgaaatgagatgagtttttatgtgtaagcaatatttatttaactattctataaaattattgagtgcctactgaggcctttaagcaccgctaacattcctttccatcattcttttaaatgacataaaataattgtgcaatgttcctgatgatgtaccccacaagctgcattcaaactcaaatctgtgggaatgagtgactcgacaaaatgtaattcggatcagatcctcatcccctgactgtgtgaaaaaagtactctccttctagtgaaggattgtcacagagtttcactggatgaaactatgacccagtattcttactgtattttacatatgcctgtaaattatttgcaaaaaagaagaagaagaggaagaaagaaaagaaagaaaagaaagaaagaaagaaagaaagaaagaaagaaaaaaaaaaaaaactcgagggggggcccggnacccaattcggnctata

SEQ ID NO: 76 - DNA, 788 bp, Homo sapiens
ggcacgagaagatggcggccccgcggcgagggagaggatcctccacagtgctctcttcagttccccttcaaatgctgttttatctcagcggaacgtactacgccctgtatttcctcgccacgctcctgatgatcacgtataaaagtcaggtgttcagctatcctcaccgctacctggtcctcgatcttgctctgctgtttctgatggggattctagaagcagttcggttatacctgggcaccaggggcaacctgacagaggctgagaggccgctggccgccagcctggccctcacggctggcaccgccctcctctctgcccacttcctgctttggcaggccctagtgttgtgggcggactgggccctcagcgccacgctcctggcccttcacggcctggaggccgtcctgcaggtggttgccatcgcggccttcaccaggggcttcggaggagaggtcagggctaaggccggggatgagactgcaggagagagagcagcggagggccacattcggagcctccgtccactccagttttatcagcttttgcctttttgcacggagttaaacaaattctagctctgtgtttttttcccattcccagatttactatcagttctccttaaaaagtatctaagctgttacagtagctttcccttcacttgattctattgtgtgttttctatgtttggaataattacacccaaatatctagatattttctcttcaccgcattttgtaaataaagagatgtgtatgcctccctgaaaaaaaaaaaaaaaaaaaaaa

SEQ ID NO: 77 - DNA, 1264 bp, Homo sapiens
ggcacagcgggaatgggcgtggcctgggcggggcgggcgctaggacccaccggagcgccgtgaacgtcaccgagcggcgccgaggccccgggttgagcgggaggcgcgatcggtccggtcggtggctccccgcggcggggccgggcccgatctcgggcgggaaccgagcgcagagccggtagcgggaaggatgaccacgctcacacgacaagacctcaactttggccaagtggtggccgatgtgctctgcgagttcctggaggtggctgtgcatctcatcctctacgtgcgcgaggtctaccccgtgggcatcttccagaaacgcaagaagtacaacgtgccggtccagatgtcctgccacccggagctgaatcagtatatccaggacacgctgcactgcgtcaagccactcctggagaagaatgatgtggagaaagtggtggtggtgattttggataaagagcaccgcccagtggagaaattcgtctttgagatcacccagcctccactgctgtccatcagctcagactcgctgttgtctcatgtggagcagctgctccgggccttcatcctgaagatcagcgtgtgcgatgccgtcctggaccacaaccccccaggctgtaccttcacagtcctggtgcacacgagagaagccgccactcgcaacatggagaagatccaggtcatcaaggatttcccctggatcctggcggatgagcaggatgtccacatgcatgacccccggctgataccactaaaaaccatgacgtcggacattttaaagatgcagctttacgtggaagagcgcgctcataaaggcagctgagggggcacctgccaccccactgatgcccaaactgtcagactttgggggatccccgcctagggcagtgctgcatggctgccctgattccaagtgctcttatcgcctctgtgtgtggatcgcccgccccagcccggggccgctcaggtctgcttggaggatgcctcccccaggagggcagtgagggatgccgcaacctcgacttctcagcctcctggggttccgccggccaacactgtctgtctcaaatactgtgctgtgagttgtttcaataaaggggccccaaggggctgaaaaaaaaaaaaaaaacattggggcctctgcggattcttgggctcgagggcaatttccccattgtgatcgaataaatccgaatcagggaaagcggttccgggggaattgtaaccgctcaaattcgaaaagtatgggcgaagcataatt

SEQ ID NO: 78 - DNA, 892 bp, Homo sapiens
  misc_feature (21)..(21): n equals a,t,g, or c
  misc_feature (33)..(33): n equals a,t,g, or c
  misc_feature (855)..(855): n equals a,t,g, or c
  misc_feature (868)..(868): n equals a,t,g, or c
  misc_feature (891)..(891): n equals a,t,g, or c
gaatatccctttaagctggtncgcctgcaggtnccggtccggaattcccgggtcgacccacgcgtccggatgactgtaattctccttgttaccgacgagagatcattggaagctgccttctaacactttgtgtagctctgtggagttggattttcttaaggtttaaaaagaatcacagcttcggaacttttaactgaaaatgagagacagaagccacaggggaagcaaagcaaataggattttcaatataaatatcagtgtggaaaaataacctattctgttgaatttagtgttcatgcacttgagaacaacattatttccatttactccgaaaatccttctgtgggggtttgagaaagtgaatgttgcagacatgttctgttgtgttgcactttatcctgtgtttatgtgtatgtgtttttagattaattcaagttgtgtgctatatttcttgtataatttacaaagttacacaaaatataaagagcagtaaacttgtctgaaagtttttggcaaaggaaggtaacttcaatgtaatagcttcctttaagagtacaggaaaatgcattctgtaatgaagtggggcccatgtaattgtttatattttcagttttaagcaggtatagtgcaggcttgktaggaatgtgtggaagggaagawtggaagtgatttttcctcttttaaaagtaaacaaaattcttyaaatatgccctagttaactatttcagcataccatttttacttggttaacagtgtacattttgataacctatcaggaatgaataaagtatttttatttaaaggtgaaaaaaaaaaaaaaagggcggccgytytagaggatccaagcttgcgtangcgtgcaaacganatcaggagtcgatgagtagcttnt

SEQ ID NO: 79 - DNA, 597 bp, Homo sapiens
ggcacgagcaaactctgatggattgtcattctctccagacgggctcacctttctgtgtttcctttggtggcaaaagccattatcatctgctgggaagtgccggcaagagtcctggggctgttgcagatggttctctcaccgctggagttccatccgttcttccccaaggctcatctgttctttctcttaaatatccctccatcttctctccctctttgccttggtacacatgccaaacacgttttatctgagccttcacgggagcctagttaactctttcgctgtcactagcctggccctcttgaatccatcttctggtgtgtcttacagttttctcaaaaacaaatgggttctcactttggtgtctaagtctctatgtaatctggtcccagtctccctctctctctctctctctctgtctgcctctttcgtgttgctgggccttgcatgccgtaccctggcctttgtgaaatgcccttcatctgtgctcttccctccacctggaatgtccgtctctctttttctgccaacccactcggcccctccctcctgcaagcccttgagtgtcccctccctccatgtcctgtggtggcagag

SEQ ID NO: 80 - DNA, 530 bp, Homo sapiens
  misc_feature (308)..(308): n equals a,t,g, or c
tcggcagagctcccctgcggttggaagtgttcatgcaaattccagatctgtcctggcccagcttggaggtgggccttcctgactgggccatcccttgcgagcgttctcagcccacactggctccctctgcgcaggcccctacttgtgaaggagctgagccgcactcggtgggctgtcctggggcacccatgttgtgtgttttggttttgtttattttgtatctgcctggtttttccaagtctaatcaggatgtcccctggggtgacattctttgctgagagaagggcacatgcctcggttccctgggnctgtagaaagccagtgctcagccttgctttctgccgcagacttggtgcccggagactcgctatcaaagtgcagtggagataatgtccaatgggaggctgaggcaggagaatggcatgaggcagagcttgcagtgagccaagatcgcaccaccgtactccagcctgggcaacagagcgaggctctgtctcaaaaaaaagaaaaaaaaaaaaaaaaaactcgag

SEQ ID NO: 81 - DNA, 1143 bp, Homo sapiens
  misc_feature (1109)..(1109): n equals a,t,g, or c
tcgacccacgcgtccgagccgagactgcgaaggagaacgcagcaagcccaggcggcggtggaaaggctggaggacacacctaaacatgtggaatcccaatgccgggcagccagggccaaatccatatccccccaatattgggtgccctggaggttccaatcctgcccacccaccacctattaatccaccctttcccccaggcccctgtcctcctcccccaggagctccccatggcaatccagctttccccccaggtgggccccctcatcctgtgccacagccagggtatccaggatgccaaccgttgggtccctaccctcctccatacccaccgcctgcccctggaatccctcctgtgaatcccttggctcctggcatggttggaccagcagtgatagtagacaagaagatgcagaagaaaatgaagaaagctcataaaaagatgcacaagcaccaaaagcaccacaagtaccacaagcatggcaagcattcctcctcttcctcctcctcttccagcagtgattctgactgaatacaggccctggacccttccctcaagtctcaccagttctgctctcccatcaagcttcagatgccatgttgtactgggggaatgtagcccttgtgctccccaccccctacctscacctgagcctcaccctgctgttgagccctgagtggctaggggaaatgggaagaggattgccatggcctggccatcttgttgctgcttggttagatcatatagctaatgaattaggcaggggagctattttttgaagatgatgaactaaatgttgaagacaagtttgagatctgtaaaatgtgattttttacttccacttataatacttgtgattggggaggtttgtggaaattcaattatgatgaaaaacctatcttttttgtaatgttggcatacttggggaatttagtggcaaatacattccccagcaggccttttgttggttgcactaactgcaaggttgctgggaagtagagtccatttggttgatgagctttgactgcggttttggaaccttacctctcctccttagcccaatatgctgtcttgggtcctattcaaataaagttatttctcctggtcnaaaaaaacggcacgagcggcacgagctacgtggg

SEQ ID NO: 82 - DNA, 402 bp, Homo sapiens
  misc_feature (373)..(373): n equals a,t,g, or c
  misc_feature (397)..(397): n equals a,t,g, or c
gcccccgggtctgcagtaattcggcactagcacagcctctgcatgggcccagagccgggmcccccccagcccagccccgccctccccagactccgcgcaatcacatactgtatatagacgtgaatcgattttatttttattctttaaattaaggtcgtgataaagtgttgccaaagatacctgctgaattctcgcgtttcaggaaacaaacaaacaaaaaaaaatgatatttgaggagggtcgtgttgactccatatgaaaggacacagctcaaagcttttttgtttggttgtttggggttttttgtgttttctttttttggggtgttttttttttaactgcctggtacaaaaaaaaaaagagaaaaaaaacncggggggggccccggaaccaaatnccccc

SEQ ID NO: 83 - DNA, 471 bp, Homo sapiens
ggcacgagccagcacccacttcccacaggccttccctcctcccctgcctgctgacccggcagctcccgacagcacggccttgtttcccagggaacaatgcatctgtgtcacggacaacaatgtcctttcatgtcaggcgcactggccccggtgcacgccgggacgtggcacaaagggtgctttgtgcagctcagggatgtgagttcctggctttgccatgttggtgctgccgacccggggcctctgtccttgggtcccagttatgcaacagtcagtcgaggctgtggggctggcccaggggctttatctgtctccctctccaacttttgccaagttacccttctgggcttccgccagccaggagcccacactccctcagccctcccacacgctcctctcaactcctagctgggcttcgctgacttgaacctggccgagtttgcgggctcggggctccaaggtgcgctgctg

SEQ ID NO: 84 - DNA, 467 bp, Homo sapiens
cggcacgagcctaccagtagctccctgtcagccccttcccccgtgacctgctcttccagagataacccatctgccattgtgtcaagaggggggttgagggttaagctcttctctggggaatcacatggaaagtctaggcacagttcgtccctcagagagccactgtgtgccatctccatgctctgaaggagagactccagcttcttgttttggatgtttatgtccacaaaatatttctgaatgcctttatctttatcagccaagctctccgcatggtttcgatgacctgtttgagctgtttaatctctttcctggcttctttgagtgccaactgggcctctacccggtgacactcctcctcaatccagtcctctcgcatgcgggccagctgggacttaagctccacgatttcactttccctagagtgccaagacaagcatggttaattaaaaaaaaaaaaaaaaaaa

SEQ ID NO: 85 - DNA, 761 bp, Homo sapiens
ggcasagaccatatacttaacatgtatccctacagtaacctagtgaggtgactctcactatcgccatcttacagataagaccactgaggcactggctccgggcttctcatccagttggcggcacagaggagtccaaggtcaggttgtctagagtccagctcttctcacgaccctagtccgcctccacagaaccagggacgccggacaaggaggacactgccttcaggacccttctgcggaggtccctcatggtgcagaagttgggagtagaggcagaaacagctgtgaaaattctgatttgtttgtttctctgagccaagctaaagtggataatgaagccaagctggcaattaccttcctgtgcgtgataatggtggtagtggtgatgctgactgcagcaggatgacggtgatgtcagcagcgacaccattggtcttattgatggtggcagtgcccagggtggtgtgggggtaatagcatgagtgggtgctgggatgctgttagtgatcctgctagggccaggttagcttggaggggagagtgatgtccatcactgcagtggtggcaatgctgctagagacctcctgagtagttggactcgggctggcattgctgctgggaccttccctcacccccatcaggaagacccctctgctcctccccaccctcagtgaarggggcagggctcagarccttccgtagaactggctttattgcattccctgttctggacagtgtaagcsatggccctgcctctcgag

SEQ ID NO: 86 - DNA, 943 bp, Homo sapiens
ccacggcgtccgctaaattgttctctgcatatagcaggaaaactagcatgaaatattgtttcaggccctgggttctatgtgacactacattaggaattggattgtttgggtttgctttgtgtttttgaggtagaggaagaaatgggaatcttttttttctcttccaggagtcagtggaagaatagttctctagctaaggaacggacatacctttgttttaaaatattttatacttacaaaaatctagaaatggagagggaactgttttgaataaggatttaaaatacctgcacaaggatagagagaaactatgtgactcattctgtgaaaagacttcttgcagttgtgagttatttagaaatgatcaaaatttgtaattaggctaatccatttagtgattcctaatattttgtactcacagagaactaattgactaaacaacttgaacgctagtggtttgtccttagacaatctgtctttgaatttaaagtctttatcgctaagaccttgactttaaatttttcatcactacaaccttgaatttaatttcaggtcttcaacatgatgaccttggatttaatttaaagtcttcaacactatgcgctttatcatattattcccagatgcatttttgaaatgtagtatgtaaaagtatgtaacgtgctgtttattaacaaaagattgttcacaacatctcatgtagtttaaatttgtaaatactgcttctgttttgtttctcctttatacacttgactgtctttgtgataagtgacatgaattttatgttaggattaagtatgttttcctgaaacttggattttttttgtaattatataattgagagttaagaatgaaatccttcaagtgttaaaaactcacattttaaaagcaaattttggttccaaaaaaaaaaaaaaaaaaaaaaaaaaaaaaaaaaaaaaaa

SEQ ID NO: 87 - DNA, 497 bp, Homo sapiens
ttttttttttttttattatgaaaccatgatttggccttaaaaacttaagaagaataaagtaagagttgctacaatgaagtcagaatgaaactattaaagaatggtaatggaatgatttcaggtatgagtgttattagaaacgtggctctctcttcctctatgcatcaacctgtaatgactccctaatacttatgtgataaccacactttgtctctcaagaattccaaaggcagagagaatgatcagtgattgtcagagtttgaaaacaatctcaaaagagcagtaataacttcaaattatttggaaatcccttattttaagaattcaagaaaatttagcatcatatttcctatttaagttgctacagagatatttaacatgacttatcaattaattaattataagtttccctactctgctagttttacttcaaataatgaagggaaacttataattaattgataagtcatgttaaatataagtttcccggacgcgtg

SEQ ID NO: 88 - DNA, 1536 bp, Homo sapiens
ccacgcgtccgcacatctcccccatagcaccctgccctcatgggacctgccctccctcagccgtcagccatcagccatggccctcccagtgcctcctagccccttcttccaaggagcagagaggtggccaccgggggtgctctgtcctacctccactctctgcccctaaagatgggaggagaccagcggtccatgggtctggcctgtgagtctccccttgcagcctggtcactaggcatcacccccgctttggttcttcagatgctcttggggttcataggggcaggtcctagtcgggcagggcccctgaccctcccggcctggcttcactctccctgacggctgccattggtccaccctttcatagagaggcctgctttgttacaaagctcgggtctccctcctgcagctcggttaagtacccgaggcctctcttaagatgtccagggccccaggcccgcgggcacagccagcccaaaccttgggccctggaagatcctccaccccatcactagagtgctctgaccctgggctttcacgggccccattccaccgcctccccaacttgagcctgtgaccttgggaccaaagggggagtcctcgtctcttgtgactcagcagaggcagtggccacgttcaggaggggccggtggcctggaggctcagcccaccctccagcttttcctcagggtgtcctgaggtccaagattctggagcaatctgacccttctccaaaggctctgttatcagctgggcagtgccaccaatccctggccatttggccccaggggacgtgggcctgcaggctgcaggagggcactggagctgggaggtctcgtcccagccctccccatctcggggctgctgtgtggacggcgctgcctcaggcactctcctgtctgaacctgcccttactgtgtttaacctgttgctccaggatgcattctgataggagggggcggcagggctgggccttgtgacaatctgcctttcaccacatggcttgcctcggtggccctgactgtcagggagggccagggaggcagagcgggagggagtctcaggaggaggctgccctgaggggctggggagggggtacctcatgaggaccagggtggagctgagaagaggaggaggtgggggctggaggtgctggtagctgaggggacgggcaagtgagaggggagggagggaagtcctgggaggatcctgagctgctgttgcagtctaacccactaatcagttcttagattcaggggaagggcaggcaccaacaactcagaatgggggctttcggggagggcgcctagtccccccagctctaagcagccaggagggacctgcatctaagcatctgggttgccatggcaatggcatgccccccagctactgtatgcccccgacccccgcagaggcagaatgaacccatagggagctgatcgtaatgtttatcatgttacttccccacccctacattttttgaaataaaataaggaattttaaaaaaaaaaaaaaaaaaaaaaaaaaaaaaaaaaa

SEQ ID NO: 89 - DNA, 1550 bp, Homo sapiens
ccgggctaggagacctgttctgatgatgtgtgtggtcctcaccacactgccctgcctcaccttttccatagcagtgactgaggttcaaaagagcattaatgggtccgctgatgtcttacctgatatgttacctgacctgcccgtatctctggttctgttatccctgatcatggttgatattattgaaaaactcaggatatatcctcttagagggagtcaaaagagtaagtgttcttttaaatgtgaatattttttaaagtttgatatatttttcacatttctgccactgtgttatctgacaacatgtttaatgataccttttcttagggctaacattactgatagaagattgcaaatgaagatatctaaacataattatttttaaacctaccttgatagctagatagctgcttttgtttgctattcgcattttagtagtactgataaattaaaaattatcaaatagttaataccaaaaaccttaatgtttattccagcaagaaattatccaagtaaattattatagatgtatatttttctaggaagtctcttaaagcttatgtttaaatggattaataaaaagcttagtttggagacttttactacaggaattaatatgactgtggtagttgtgtcctagataatcatgtgtttaattgtgaattataaaaatgccaaagatcacactaataaaaccaagatatggctgggtgcagtggctcacacctgtaatcccagcatttttggaggccaggatgggaagatggcatgagctcaggagtttgagaccagcctgagcaacatagcaagacaccatccctataaaaaaataaaatttaaagaaaactcaacaagatgtgtcacatctcctccaaagtgatgagttgaaactaaatacagattggcccttacaaaaagatattttgttaatggaatattttatttatttagtcgtaaattactccagcctgggtgatagaacatacctctgtctcaaaaaaaaaaaaaaaaaaggaaagaaaatttgcatgcgtgtgtgtgttgaatgtgtgtgtttgggagaagggagagcttcatcatgatcaacaatatttttgtgtgtttaagagtggtgttttatgtgagatttcatttgggggaaaaaaaagcttcctctgctaaatgtttaaaaatcattaacctagggcttcattcagcattgtaaccgcacctgtttctaggacactaccatttctatgaagagatagataggttgccaactctctctccaggcccagctccctggcaatcatgactgcaccacctagaggcaaagtgagcccccatctaaggtcttgtgactactgctgctgctctgggcagtttcagctttgtaggcagagtgacccgtcttggtggggtacaaactggcttgaggctcaacacctttgaaaaacagataaaccttttaacatgccatgttgaattttttctttccaatgttgcatttttccaaaagaacacatactcatttaaaaaagttataaaatagagataaaaaaaaaaaaaaa

SEQ ID NO: 90 - DNA, 1997 bp, Homo sapiens
  misc_feature (1468)..(1468): n equals a,t,g, or c
  misc_feature (1495)..(1495): n equals a,t,g, or c
cccacgcgtccgtatcttaggaaatgcccatgataattcagaagaacttgaaagagccagggagctgaaggaaaaggaagccacactatgtctagagtttctgcttcaaaatgatgcaaatccatctatccgggacaaggaaggttacaatagcatacattatgctgccgcctatgggcacaggcagtgtctggaattgcttttggaaagaacaaacagtggatttgaagaatcagattctggtgctactaagagtccactccacttagctgcctacaatgggcaccatcaagccttggaagtcctctgcagtcgttggtggacctggacatcagggatgagaaaggccgcactgctctggatctggctgcctttaaaggacacacagaatgtgtggaagcgcttatcaatcagggcgcatccatctttgtgaaagacaatgtaaccaaaagaaccccacttcatgcctcagtaattaatggtcacacactgtgtttacggctgttgctagaaattgcagacaacccggaggcggtcgatgtgaaagatgccaaaggacaaacaccactgatgcttgcagtagcatatggacatattgacgctgtttcattgttacttgaaaaggaaccaacgtagacactgttgacatcctaggatgcacagctttacacagaaggattatgacaggacacgaagaatgtgtgcaaatgctgctggaacaagaagtgtcaattctctgtaaagatccagaggagacgcccttgcactatgcagctgctcgtggcacgccacgtggctgagcgagctgctccaaatggctctttctgaggaggactgttgtttcaaagataaccaaggctacacgccgctgcactgggcttgttacaatggtaatgaaaactgtatagaggtacttttggagcaaaaatgttttcgcaaatttatcggtaatccctttactccactgcactgtgcaataatcaatgatcatgggaattgtgcatcattgctgcttggggccatagattccagtatcgtcagttgtagagatgacaaaggcaggacaccccttcatgcggcagcatttgctgatcatgtggagtgcttgcagcttcttctgagacacagtgctccaagtgaacgcagtagataattcagggaaaacagcactgatgatggctgctgagaatgggcaggcaggcgctggggatattttggtgacagtgcccaggttgatctgactgtaaaggataaggacttgaatacacccttacatttggcttggagtaaaggtcatgaaaaatgtgccttgttaatacttgacaagatacaagacgagagccttattaatgaaaaaaataatgcactgcagacacccttccacgtcgctgcgcgcaatggcgaaaggtggtagttgaggagttgctggccaaaggggcctgtgtacttgctgtagatgaaaatgttntaggtcaaatggaccccgttccacacntggaaccgctgtacaaaaagaagaatgagactctttaaaaattatgcacatacacatgcacacatatatgtgtgcgtgtgtatatatatatatatgtgtgtgtgtgtgtgtagttcatcagccagtacacatgaggaccaaaatgcatcagtctaaaatggaagatacacattttttttccttcaaaattcaagtgagaactgaagtagcttttttatggagttaaatgtaatctttctgtgttaccagtctttgttgtattttatatttcttaggacacagatttctagttgaccacttaacatttgtaactgatgatgtgttgacctttttttttttttttgccaaactagagaaaatgtccatatacttttgctgtaaatgtgtttatatttatttgaaatgaaacaaatggtgaggaaacatccattatttgttctctattttaattgctatgtatcttatttagaataacaaaaaaaaaaaaaaaaaaaaaaaaaaa

SEQ ID NO: 91 - DNA, 2582 bp, Homo sapiens
  misc_feature (1006)..(1006): n equals a,t,g, or c
gcagcccgctctccatgtgacttcagtttccgtccgttccttccgctggtgctaaaataatctgatgccccacagcaaggaggtagcccagccccgcgttcggctgctctcgaggaggccggagtccccggagacgatgcgccccgcgcagccgcctgcgcctgcgggagccggctgcccttgagatggagttgctgcctctttggctctgcctgggttttcacttcctgaccgtgggctggaggaacagaagcggaacagccacagcagcctcccaaggagtctgcaagttggtgggtggagccgctgactgccgagggcagagcctcgcttcggtgcccagcagcctcccgccccacgcccggatgctcaccctggatgccaaccctctcaagaccctgtggaatcactccctccagccttaccctctcctggagagcctcagcctgcacagctgccacctggagcgcatcagccgcggcgccttccaggagcaaggtcacctgcgcagcctggtcctgggggacaactgcctctcagagaactacgaagagacggcagccgccctccacgccctgccgggcctgcggaggctggacttgtcaggaaacgccctgacggaggacatggcagccctcatgctccagaacctctcctcgctgcggtccgtgtccctggcggggaacaccatcatgcggctggacgactccgtcttcgagggcctggagcgtctccgggagctggatctgcagaggaactacatcttcgagatcgagggcggcgctttcgacggcctggctgagctgaggcacctcaacctggccttcaacaacctcccctgcatcgtggacttcgggctcacgcggctgcgggtcctcaacgtcagctacaacgtcctggagtggttcctcgcgaccgggggagaggctgccttcgagctggagacgctggacctgtctcacaaccaagctgctgktcttcccgctgctgccccagtacagcaagntgcggaccctyctgctgcgcgacaacaacatgggcttctaccgggacctgtacaacacctygtcgscgagggagatggtggcccagttcctcctcgtggacggcaacgtgaccaacatcaccaccgtcagcctctgggaagaattctcctccagcgacctcgcagatctccgcttcctggacatgagccagaaccagttccagtacctgccagacggcttcctgaggaaaatgccttccctctcccacctgaacctccaccagaattgcctgatgacgcttcacattcgggagcacgagccccccggagcgctcaccgagctggacctgagccacaaccagctgtcggagctgcacctggctccggggctggccagctgcctgggcagcctgcgcttgttcaacctgagctccaaccagctcctgggcgtcccccctggcctcttcgccaatgctaggaacatcactacacttgacatgagccacaatcagatctcactttgtcccctgccagctgcctcggaccgggtgggcccccctagctgtgtggatttcaggaatatggcatctttaaggagcctgtctctggagggctgtggcctggggcattgccagactgcccattccaagggacctccctgacctacttagacctctcaagcaactggggggttctgaatgggagcctcgccccactccaggatgttgcccccatgttacaggtcctgtctctcaggaacatgggcctccactccagctttatggcgttggacttctctgggtttgggaatctcagggacttagatctgtcggggaattgcttgaccaccttcccaaggtttgggggcagcctggccctggagaccctggatctccgtagaaactcgctcacagccyttccccagaaggctgtgtctgagcagctctcgagaggtctgcggaccatctacctcagtcagaatccatatgactgctgtggggtgratggctggggggccctgcagcatgggcagacggtggccgactgggccatggtcacctgcaacctctcctccaagatcatccgcgtgacggagctgcccggaggtgtgcctcgggactgcaagtgggagcggctggacctgggcctgctctacctcgtgctcatcctccccagctgcctcaccctgctggtggcctgcactgtcatcgtcctcacttttaagaagcctctgcttcaggtcatcaagagccgctgccactggtcctccgtttactgacctggctgtgtgccaagactcgaaattcggtccgcacacaacaggacactttctctgccagctttcaagatgtgatgcagaggccaagtctgacgaattgaagtttcaattaaaatttaatatgtttccattcctcatcgcccaccccacccccgcccccaccaccgcccaagttctttttccatcattataattcatcctcattatcttggtaaaatatttattaagtgactttttcagaaataaaaggcaacgtgtctcataaatattttttaaattaaatgcaaaaaaaaaaaaaaaaaaaaaaagggcggccgc

SEQ ID NO: 92 - DNA, 1904 bp, Homo sapiens
cccacgcgtccgccgggagtcgctgggtgcgtggggctgcctcgccgcgtctcgccacgggctctgccagcagacagccttggcacacaggcacaagggctggagcccagagatgagagtgcccaagggagatgtgagcctggcgggctgcccgctaacctgtcgctgaagccccagaagcgggccctcaggccaggcctaccctgcctccggcccagcatgcgcctgtcggtgcggagggtgctgctggcaaccggctgcgccctggtcctggtgctggcggttcagctgggacagcaggtgctagagtgccgggcggtgctggcgggcctgcggacccccggggggccatgcggcctgagcaggaggagctggtgatggtgggcaccaaccacgtggaataccgctatggcaaggccatgccgctcatcttcgtgggtggcgtgcctcgcagtggcaccacgttgatgcgcgccatgctggacgcccaccccgaggtgcgctgcggcgaggagacccgcatcatcccgcgcgtgctggccatgcgccaggcctggtccaagtctggccgtgagaagctgcggctggatgaggcgggggtgacggatgaggtgctggacgccgccatgcaggccttcatcctggaggtgattgccaagcacggagagccggcccgcgtgctctgcaacaaggacccatttacgctcaagtcctcggtctacctgtcgcgcctgttccccaactccaagttcctgctgatggtgcgggacggccgggcctccgtgcactccatgatcacgcgcaaagtcaccattgcgggctttgacctcagcagctaccgtgactgcctcaccaagtggaacaaggccatcgaggtgatgtacgcccagtgcatggaggtaggcaaggagaagtgcctgcctgtgtactacgagcagctggtgctgcaccccaggcgctcactcaagctcatcctcgacttcctcggcatcgcctggagcgacgctgtcctccaccatgaagacctcattggcaagcccggtggtgtctccctgtccaagatcgagcggtccacggaccaggtcatcaagcctgttaacctggaagcgctctccaagtggactggccacatccctggggatgtggtgcgggacatggcccagatcgcccccatgctggctcagctcggctatgacccttatgcaaacccccccaactatggcaaccctgaccccttcgtcatcaacaacacacagcgggtcttgaaaggggactataaaacaccagccaatctgaaaggatattttcaggtgaaccagaacagcacctcctcccacttaggaagctcgtgatttccagatctccgcaaatgacttcattgccaagaagagaagaaaatgcatttaagtggaaatcggacctctaatccaagcatattgcttgctattaatcgccaaaacaggactgctgatgaggaatgtatttgcatatgtttgcaaaagctgaatcattgaaaacgtaccttgaaactctctatctctggacactccagggtagagaatgaagggtatggaagtagtccggcttttgaaacttaggtattttatatttttcccctcaagaactttttttaagagacagatttgccatcctccttaatttgcaggactgccttggtggctttgtttgctgggacaaggcccacaacctgtgcctctcctattgacccttactttgaattcaaagaatctatttaagagtttaatatatgaggctttctttgattcctcctcagttctacctagtttcacagaggaaaaaaatactctttgaataaagtgaacagaggctcaaaaaaaaaaaaaaaaaaaaaaaaaaaaaaaaaaaaaaaaaaaaaaaaaaaa

SEQ ID NO: 93 - DNA, 2187 bp, Homo sapiens
  misc_feature (347)..(347): n equals a,t,g, or c
  misc_feature (2097)..(2097): n equals a,t,g, or c
  misc_feature (2187)..(2187): n equals a,t,g, or c
ggccctcaatttatcctctgcctctgacaaatatattccattttgttacattgcaaaaatttcagcacattgctttgcttacccatctttgctctggaacgacttttaattcttcttttggcaatcttggttgttttgagatgtgtgaaattagaatcatatgcaggtgtttgagttcttttgattttgctttttaaaagagttttttttttgttttgttttgttttgtttttagaatggggcaatgtaaagccagaatatcaacgtccttttgtcaagatttcaaacctattkggstgatagtacacttacaagaataggtaaaaaagatcccaaagattttactncacttactkgaactactagccctactattaagagccacagcaagcttacagktcaaaaaaaaaaaaaaaaagagctgcaacattcctttcgcactcccactcgcccctgaggttcttccacttccttcctatggctttttttagaagcgagtgtgtttttctcacgtccggcaacaaaggatgttttgtgctactactgaggtttgtgtgtgtgacttactttagaactctttctagaaaatgcgattactatttgcataggtctggtagaactttgtattgagtgaaagtctccgatgactgtttttgtttttgtgtagatttgccactgcttaacatcaaatcactttcccctgtgtgttttaaaatacctctaataggacctgtcaaaattctcccagaagtctcacaaattcttacctttaaagaaagtgtaagtgataccttcagtgtattgtatttattcttatatacctttgcaaagacttctcatcacttccttaaatatgtctgatagtgccataatgagaaggggacatggtaattaaccatcaactttggttttcatggagaaaatctatctggagcagtcacagtatcctatgctggagctatcagatgccttgacattagatgtttccatctaattgtaattctctgagcaaggagacaaggtgggataaacagaattctcagatggctgagaattataccctaaatcctgggagagaatttacctttccattgtcagataatatgaatcatttaaaacatgtgctggaacagctttgccttttcttgaggaaaatggggtttctctctcaaagagaaagataaatgcgcctcagaagattttagtggtcgatctctgtcagtgtactaccagcaaaaatcccagcaatcaatattacaaagargcagcactcacttgagtacaraaktwacaacattagctgcttcgtwaacaagatggcatgggagatattctgttttgagtaaatgacaagtcctacagtctagataggaagatttytcctccatatggattttgtgatttygtcttgtgttgagtaaggaaggggagcttggattccaagatcaatttaatgtctatattccttggcattgtcatgttagagcagcacatctcagatggctttcaatagttattttagcattgattttcctctactagagtaaatcaaaagatgatttagaaaatcaaagtcagttttccttggagttttctcagaataaagggaagctgtggtgttgaagggtttttttggctcctatttacatatgatgcaaaatcaatctgtgtgaatctctttcctctgttgagctctactataggctctactatatgcagagccttgggtatttctgtgcgagggggattatgcaaaagaattttaaggcatgccacttgactttgtgaaaccaagtatttgtttaaagagacacgatattatagtgggaggctgttttgtgagaacccacactttcatgtcagcaccctgagatgggatcccattacgccctttaaccaggcaagggactttatgcagttcttcgtcaggaaaatggagacaattaaactgcttttctcataggttgttgtgtaaaaggcagcaagatgtggctgtgtaagaacatgactgaagccagactgcttatgcttaaaacctaggtgagctgtttacacctgatatgaccttggacaagtctcatctaacttctcttgccntcaggtgcctcatctgaagatagcagtgatgttagtgtctgccctcctgccctcataagcctggtcatggttggagaccatcctggccan

SEQ ID NO: 94 - DNA, 4115 bp, Homo sapiens
gcctgcaggaaccggtccggaattcccgggtcgacccacgcgtccggcgcagacgaggcctgaggcggcggcgcgaggcagtatggtttgaagtggtgaacatggatttttctcggcttcacatgtacagtcctccccagtgtgtgccggagaacacgggctacacgtatgcgctcagttccagctattcttcagatgctctggattttgagacggagcacaaattggaccctgtatttgattctccacggatgtcccgccgtagtttgcgcctggccacgacagcatgcaccctgggggatggtgaggctgtgggtgccgacagcggcaccagcagcgctgtctccctgaagaaccgagcggccagaacaacaaaacagcgcagaagcacaaacaaatcagcttttagtatcaaccacgtgtcaaggcaggtcacgtcctctggcgtcagctacggcggcactgtcagcctgcaggatgctgtgactcgacggcctcctgtattggacgagtcttggattcgtgaacagaccacagtggaccacttctggggtcttgatgatgatggtgatcttaaaggtggaaataaagctgccattcagggaaacggggatgtgggagccgccgccgccaccgcgcacaacggcttctcctgcagcaactgcagcatgctgtccgagcgcaaggacgtgctcacggcgcaccccgcggcccccgggcccgtgtcgagagtttattctagggacaggaatcaaaaatgttacttcttgctgcagattctgcgcaggatcggagctgtgggccaggctgtgtccaggacggcgtggtcggccctttggctggccgtggttgctccagggaaggcagcctctggagtgttctggtggctggggattggatggtaccagtttgttactttgatttcttggctgaatgtgtttcttcttaccaggtgccttcgaaacatctgcaagtttttagtcttgctcatcccactcttccttttactaggtctctccttacggggccagggcaatttcttttcgwtcttgcccgtgttgaactgggcaagcatgcatagaacacagcgggtggatgacccccaggacgtgtttaaacccacgacttctcgcctgaagcagcctctgcagggtgacagtgaggcttttccgtggcattggatgagtggcgtggagcagcaggtggcctctctgtctggacagtgccaccaccatggtgagaatctccgagagctgaccactttgctacagaagctgcaggctcgggtggaccagatggaaggcggcgctgccgggccgtcagcttcggtcagagacgctgtgggacagcccccgagggagactgactttatggcctttcaccaagaacatgaagtgcgtatgtcacacttggaagatattctgggaaaactgagagaaaaatctgaggccatccagaaggaactagaacagaccaagcaaaaaacaatcagtgcggttggtgagcagctcctgcccacagtcgagcacctccagctggagctggatcagctaaagtcagagctgtccagctggcgacacgtgaagaccggctgtgagacagtggatgccgtacaagaaagagtggacgtgcaagtcagagaaatggtgaaactcctgttttccgaagatcagcaaggcggttctctggaacagctgctgcagaggttctcatcacagtttgtgagcaaaggcgacttgcagacgatgctgcgagacctgcagctgcagatcctgcggaacgtcacccaccacgtttccgtgaccaagcagctcccaacctcagaagccgtggtgtctgctgtgagcgaggcgggggcgtctggaataacagaggcgcaagcacgtgccatcgtgaacagcgccttgaagctgtattcccaagataagaccgggatggtggactttgctctggaatctggtggtggcagcatcttgagtactcgctgttctgaaacttacgaaaccaaaacggcgctgatgagtctgtttgggatcccgctgtggtacttctcgcagtccccgcgcgtggtcatccagcctgacatttaccccggtaactgctgggcatttaaaggctcccaggggtacctggtggtgaggctctccatgatgatccacccagccgccttcactctggagcacatccctaagacgctgtcgccaacaggcaacatcagcagcgcccccaaggacttcgccgtctatggattagaaaatgagtatcaggaagaagggcagcttctgggacagttcacgtatgatcaggatggggagtcgctccagatgttccaggccctgaaaagacccgacgacacagctttccaaatagtggaacttcggattttttctaactggggccatcctgagtatacctgtctgtatcggttcagagttcatggcgaacctgtcaagtgaagacactactcattatttttgtacatttttgtatatactgggacagcgtgaaacactggaatccttcatggacgagggcatatacaatgatgggacagtgccacactccttcaataaacgtggctgctggccagaggacgtgagcgtgtgacgggcgccttggcgccacctgttgggtgctcactgcctctgcaggtgcagaggggtcagcagcaggagaagcgtgttgaacacgtggctctcagacactccttgtttttaacgggaagctctttgcatttgcatttcctcaacaaaggagcaaagcagaggaagctgagagtctggcgtgttcttgacgctttggtcttcagccttgcactggctcttctaaaggacttttggagggcagataatttcatctgttaaatccaacacacatttctttcagggaaaaacaatgtcaccaaattttcagagttctaaactcctttccttcaagccggaattttccttttttcagcaccagtaggtactaagtctccagatggggaaataactaaaatgtgtttttctgctttgttcgctcttacttctgaggaaggtttccagtcaggactcgctgtaccaatatccatggaggaatatgggagcgtttcgctctccttgtaggctgaagtcagtctgacttgaaggggcctggtttggatctaagcaaacacccagatggggttctctggtctcagcaaggcttttcctgttgggagtcacagtaaacagaaacccaaaaatctcatcttgggtgttttcagggcttgttttgagttttgctgaatagggagcgcaagacgccctgagcctccctctcactggtggtgataagaggagccgtctggtgtgtcagggtcacgaacccgttacatttcaggacgatcctttttccttcagcagcatttcttactggctgtggctggaatctgccttttatcacagctgtcaccattctcacgtgattcttgtgagactctttttggttataattactatttaatatttagactattttactgagcagactttataaatgagatatctacaaggcacttaaagtgttacagatgttttaccttaagaattatttaagttgtgttgggttaagacagttttcagtgtaccgtaaatgttgtgttttcagaaaaagacaaaacgatggtgctgactggttttctgtatattgcacaacagtcctcaaatacactgatgtatgaaactattcatacatcaagcagcatttttttcactctccttagaattggaactatgcagttaaggcagataaaatgtacagatgtttcatatattacaggttacatatataaatcaaaatttcctatataaaactgatttgggatttggggtggaaatattttgaatattaatttatttttaaagatgcaagataggactttgtgcaatgtatttttgtaaatgcttttcaaaatatctgtctttggtagtgcttctgctgctgccaccaaattgataagatgctattaagaggtttaaataaagagttttaatttttaaaagggaaaaaaaaaaaaaaaaaaaaaaaaaagggcggccgctctagaggatccctcgaggggcccaagcttacgggtgcattcaacgactaag

SEQ ID NO: 95 - DNA, 2196 bp, Homo sapiens
  misc_feature (1921)..(1921): n equals a,t,g, or c
ggcacgagctgagtttgtggctgcatttttatctctggtggctctgctacggcggcgcagaaatgaggcagaagcggaaaggagatctcagccctgctgagctgatgatgctgactataggagatgttattaaacaactgattgaagcccacgagcaggggaaagacatcgatctaaataaggtgaaaaccaagacagctgccaaatatggcctttctgcccagccccgcctggtggatatcattgctgccgtccctcctcagtatcgcaaggtcttgatgcccaagttaaaggcgaaacccatcagaactgctagtgggattgctgtcgtggctgtgatgtgcaaaccccacagatgtccacacatcagttttacaggaaatatatgtgtatactgccctggtggacctgattctgattttgagtattccacccagtcttacactggctatgagccaacctccatgagagctatccgtgccagatatgaccctttcctacagacaagacaccgawtagaacagttaaaacaacttggtcatagtgtggataaagtggagtttattgtgatgggtggaacgtttatggcccttccagaagaatacagagattattttattcgaaatttacatgatgccttatcaggacatacttccaacaatatttacgaggcagtcaagtattctgagagaagcctcacaaagtgtattggaattactattgaaaccagaccagattactgcatgaagcgacatttaagtgacatgttgacctatggctgcacaaggctggagattggggtgcagagtgtttatgaagatgtggytagagacaccaacaggggccacactgtgaaggcagtgtgtgagtcatttcacctggccaaagattccggttttaaagtggtggcccatatgatgcctgacctgccaaacgtgggactagaaagagacattgaacagttcacagagttttttgagaaccctgcttttcgtcccgatgggctgaaactctatcctaccctggtgattcgtgggaccgggctttatgagctttggaaatcaggaagatataagagttactctcctagtgacctggttgaattggtggctcggatcctagccctcgtgcctccatggactcgagtgtaccgagtacagagggatattccaatgcctttagttagctcaggagtagagcatggtaacctgagagagctggcacttgcaagaatgaaagacctcggaatacagtgtcgagatgtgagaaccagagaagttggaatccaagaaattcatcacaaagtacggccataccaggttgaattggtaaggagagattatgttgcaaatggtggctgggaaacattcttgtcatacgaagacccagatcaagacattttgattggcctcctacgattacgcaagtgttcagaagaaactttccgtttcgaattgggtggaggtgtctccatagtacgagagctgcatgtgtatgggagtgtggtccctgtgagcagccgggatcctactaaatttcagcatcagggatttggcatgctgctgatggaggaagcagaaagaatagctagagaagaacatgggtctgggaaaatcgctgtgatatcaggggtcggcaccaggaattattatagaaagatcggctacagattacaaggcccgtacatggtgaagatgctgaaataatggccacaccagtccactcttctgcagtatcctccctggcagaacacggagaatcaggatttcttaaatactcaacagagaggctgagcagagcaaatggggggcttcaccctcatcccgcagctgcagagactggaaactgccttcaaggccacggctggtcatctgctgaccacaccccagatccgccctctcctgcgtgcaccccaaaaaantcacttgcgtttttgaggcttaaatcatctatccagtttctacattttgcatgaggcctgcaggtggcctattttgactcagacggtgaaaaaagcaaattaactcatttggacaccataactcatgcaataaaactgattgtcattcgaggaaaaaaaaaaaaaaaaaaaaaaaaaaaaaaaaaaaaaagggcggccgctctagaggatccctcgaggggcccaagcttacgcgtgcatgcgacgtcatagctctctccctatagtgggtcgta

SEQ ID NO: 96 - DNA, 1489 bp, Homo sapiens
ccccctcccctttttttttttttttttttttttttttttttcactattcaaaatgctttgataatcttaatttttgtttctggtgctgagatattatgaaaggaactgcatttgcaacttattaaatacttccaggaacaaatagttcactttgcttgggacttgtagttttgagtaattaatcatccatggagcaggagccagtcaggagatacccgttggtaccactggtcccattggtggttgtcgcagtgtggggattctttcccggaggttctgagtcctcctcatctgagctagactcaatatcacttcgatcatccttggacaccttgcctcttgaaacagctttgcaagctattttcacaatcaagtaagaccagaagcagttcaacccttgtactagcaatagcagtaggttaaaaacccaccaggaagggtaaggtccaacgatctcccagctttcaaataatgtggtatttaacacccagagaggaaatacccagtcgtgtggtgataaaaaccacggcaaacataacaaacaggagatcacacattttctgaaacttggcataatttgccattttggcagcctccagaagagcatcagctgaatcatgaacacaaaggaccagcgttcctactcgggccatattgttgacatatgaaaaggtaatcaacaaaatatatacaaggtggtgcaggaacataatgccaaagtcctttcttttgatatcagtgaattgagaaatcatcaaagaccaataaaacgacagctccaggatgtaatagtagtgaaggtcagttgtgagtggctgataggggtagttgtaccagcaatgcctcgtattccacaaccagggggtctttttcaggaatctgactccgtaggtaaatacataaaggtaaaatgaaaatctccacatgctctcacagaacctcgtcagcgtgcttggcttctcctgattgcgtctttgtcgaaaccagcgctgaatgcttcgaacatcccagtccagttgcttggagaggccttccaatctcttttcatcaggatgctttgtaattgcagtgaagaccttttccagaatggcattgggcggagcaatttgtggtccattggcctgaatgttgagggctatggcgcacggtttggctacaaatctctcgaagatgagccgcaccatgaagatacagaaggccaggggaaaagcgagatagaggtcctcagcctgcgggaaggtggcctcctccgtgttcttcaggtccgcccaggtgacattgtgcgggagccaaaacctctcgttccagaaccaggctaagatccctgccatcttgctttgtccactcctgtcctgcggcacccgcagctccgccaagctctccaccgcgcagggcgcccggggatgcgcgcccggctggccccgagcctgtgccgccgccgccgctgctcccgcccgccgccgccgcctcctccgcggccgctctagag

SEQ ID NO: 97 - DNA, 645 bp, Homo sapiens
aattcccgggtcgacccacgcgtccgggcggactatgacttagttgcgttacaccctttcttgacaaaacctaacttgcgcagaaaacaagatgagattggcatggctttatttgtttttttttgttttgttttggttttttttttttttttggcttgactcaggatttaaaaactggaacggtgaaggtgacagcagtcggttggagcgagcatcccccaaagttcacaatgtggccgaggactttgattgcacattgttgtttttttaatagtcattccaaatatgagatgcattgttacaggaagtcccttgccatcctaaaagccaccccacttctctctaaggagaatggcccagtcctctcccaagtccacacaggggaggtgatagcattgctttcgtgtaaattatgtaatgcaaaatttttttaatcttcgccttaatacttttttattttgttttattttgaatgatgagccttcgtgcccccccttcccccttttttgttccccaacttgagatgtatgaaggcttttggtctccctgggagtgggtggaggcagccagggcttacctgtacactgacttgagaccagttgaataaaagtgcacaccttaaaaaaaaaaaaaaaaaaaaaaaaa

SEQ ID NO: 98 - DNA, 701 bp, Homo sapiens
  misc_feature (670)..(670): n equals a,t,g, or c
ccacgcgtccggttgcttctcagtatcatgttgcttctcagtattgtgttgcttctgattctatgaatgttcattttaagaccccttgttgaaatgggacagttggcagcggctctgatgagcccgagaagaggcctgcccttgggtgcggagtctccctccgcacgatgctcccacgcgtccaacttgcacccaaggggcttttccctcttccaagtggactccttcaaggaagctgcagctcggtcagcagagaaggggcctgccgccagcgccctggaggaagaggaagaggaacccaagaggatggcttgtctcccagcagccacaccggctttgtgctcagccagttcatttgagtttgcatgtttctctgcactatggattttgagcatttagatttctttaatcaaaagcgttttagtgactccagcagacccactgtcccagaaaagcctgatcctgtagtttatgtagaatgccacatctgcgtcctcaagacctgtttcatccatttgggaaaagatgttgggaaaggccactttgctcgcaggggtgaggggaaggatagagaatctatttttaataaataacattctagaaagaaaaaaaaaaaaaaaaaaaaaaaaaaaaaaaaaaaaaaaaaaaaaaaaaaaaaaaaaaaaaaaanaaaaaaaaaaaaraaaaaaaaaaaaaaaaaa

SEQ ID NO: 99 - DNA, 552 bp, Homo sapiens
  misc_feature (3)..(3): n equals a,t,g, or c
  misc_feature (69)..(69): n equals a,t,g, or c
  misc_feature (128)..(128): n equals a,t,g, or c
  misc_feature (164)..(164): n equals a,t,g, or c
  misc_feature (198)..(198): n equals a,t,g, or c
cancttccgccccattgacgcaaatgggcggtaggcgtgtacggtggaaggtctatataagcagagctngtttagtgaaccgtcagatcgcctggagacgccatccacgctgttttgacctccatagnagacaccgggaccgatccagcctccggactctagcntaggccgcgggacgggataacaatttcacacagnaaacagctatgaccactaggcttttgcaaaaagctatttaggtgacactatagaaggtacscctgcmggtaccggtccggaattcccgggtcgactgcgcccccggcgccgwttcccacgattgccacgatgctgtccacgctgatgaacctcgccctgccgctgacccggctgcacatgcccgcgggagccggcgatgctgatggcctcggcgctgagccgctgcgcgggggcggccgtgctggtgctgctgctgtggctggcggtggactgggcgctgatgtgagcgctccggtgccggcgggcggcgtgctgctgaggctggatcggctgacgctcgcgcgaggcggccgc

SEQ ID NO: 100 - DNA, 1756 bp, Homo sapiens
  misc_feature (907)..(907): n equals a,t,g, or c
tcgacccacgcgtccgaaaaaagtccctagtttattgggtgttctcacacaacctgtaagatgaagctgtttttctgcctgtgtgcagggctgattctggaattccagaaggccttgtgggagcgtaaaaggcttttgaataaagtgtggaacagagcgcctcattctgataacatgcaatcataaaaaccatagggcaacttggagttaaggagtttctagaatttgctttagtctccaactgcaattctttattgatcatgaaattgttgaagagaaacacaaatgtcagttttacctttcctgtgggcatgaaagcacatcgaagtttcaggcaactgttaacatctctaccatctgtctgagttgagatttcaggttgtgacacttgccgtgacttatttgtaaatgacatttgtgtgtcttagatactaatggaattcatattctggctagttctttcagtgcatttgtagacatgttcttttcctttgtagcagtcctccctcaccctgaaatgttggtgttctaaccgatttctaatgctaatttcaactggaagcactttttcaagcccagctatcaaaccacaccagacatgtatggattcgggttgcccaataaagcgttgctattatgtaagcatccctcacgcatacagcatcaccagttttgaaagcttgaactattctgcttacttcaaggtacagaaaaaaaaatgtacttaaactgtgcagaaaagatgaaatcactggataatatgtattataaaataagcttcatgtgagtgacactggtttaagttgaaataaaatggtgaaagcattgatatcaatcattgtgactttatctcaaaacaatattgacacacatagatgtttttcttgctttatggtaagattacagnctttattgtcttaaatctgttatactcttcaatattttcaaagaaaacattctagtctcagaaatagtccatctctttgcaaaacagggctggccaattatcaaggacccataaaaatcaaaacactttcaaaaattttaaaaataaaaataattttcacatgattgctttaggaattttgaagtatccattcttttcactatggagtgttgaatatagaagattttttaatgaacaggcttgccctttgatgccaaaggcaaaaaataataataataacatttgcacgtgtgatcacagagcagctgtgaggcatcccgggggagcgcacgcagtggggatgtgattgctccactcaactattttatcacaaagtgttgtaaacatgggagatgaaagcttaactctctctacacccagctacagacccgcaatggccctaaaaatctggggtattcattgggtgggctgccatggaggaatttttggttttgtttttatttttatttgttgttctgtttacaaatcaggagagcccctgtttttatatgctaggaaggtccttgggataggccgaagaggtgtgcaaacgagcagtggaaggcccgggccctgtctctcaggaccacggcggcctgccccacacacagttctgcttctccctatctagaacgaggttttcctggcagattcctgccagactctgagtggagcccccccatgaccctataaaaggggctgtttgtcctcctcccaccctcctgtgctcttcctccctccccttgagggcacatggccgctggtaccacatgttggagcggccgctctagaggatccctcgaggggccc

SEQ ID NO: 101 - DNA, 377 bp, Homo sapiens
aattcccgggattttaataatcaacaccctcctagccttactactaataattattacattttgactaccacaactcaacggctacatagaaaaatccaccccttacgagtgcggcttcgaccctatatcccccgcccgcgtccctttctccataaaattcttcttagtagctattaccttcttattatttgatctagaaattgccctccttttacccctaccatgagccctacaaacaactaacctgccactaatagttatgtcatccctcttattaatcatcatcctagccctaagtctggcctatgagtgactacaaaaaggattagactgaaccgaataaaaaaaaaaaaaaaaaaaaaaaaaaaaaaaaaaaa

SEQ ID NO: 102 - DNA, 660 bp, Homo sapiens
ccacgcgtccgtgaagacatcaccgagccgcagagcatcctggcggctgcagagaaggctggtatgtctgcagaacaagcccagggacttctggaaaagatcgcaacgccaaaggtgaagaaccagctcaaggagaccactgaggcagcctgcagatacggagcctttgggctgcccatcaccgtggcccatgtggatggccaaacccacatgttatttggctctgaccggatggagctgctggcgcacctgctgggagagaagtggatgggccctatacctccagccgtgaatgccagactttaagattgcccggaggaagcaaactcttcgtataaaaaaagcaggccatctgcttaacccttggctccaccataaggcactgggactcggatttctctatctgatagaggtattttctgtggccctgggagctgtctgtctttcccctacccccaaggatgccaggaagacgtccaccattagccatgtggcaacctttacttctatgcctcacaagtgcctttcagagagccccaattctgctttcccacaaaataaacctaatgccatcaggcaaaaaaaaaaaaaaaaaaaaaaaaaaaaaaaaaaaaaaaaaaaaaaaaaaaaaaaaaaaaaaaaaaaaaaaaaaaaaaaaaa

SEQ ID NO: 103 - DNA, 2261 bp, Homo sapiens
ccacgcgtccggtgcaatgctcttacaaacgcttgactccatgttaaagctttagccttaactacttcattttctttcaaaaactgtactggaatatttgtgaaaagaatgaaaaatatggaataaattcataaatacacaaagagagagagctctaggtatatgtcaagtctggattaaagacagatctgtgtttatttttatgaagcatcttctgactttgatccaaagcaaaacttcttccatggccccatttaatccttgttgcacccctgggaagggaaatgctgctgtcccactttgcagatgaggggctgcatgttccaggccacccctctcatgggctgagcagcctggttgcaggtctcatggtggcgccactttgccattgtccctactttggcttctgtaaacaccctctgaggttggtgagctctctggggaaacaggctagcaccagttaatacacagagggagaacaatcagtaactttgttcttgtgcccagattggtggaagtcaccctatgtggagaggaggactttgaactcagacctggacttccctctgggacctttccctacactgtctgacctggggctggtcgtcacctcttccaacctttgcatcctgctctgtaaaatgagaataagaacaccatcctctccacattattagaaggattaaaattaatgtatctgaaggttcttaacagtgtcacacactcatcgttagtgattgtcatctcagtcatgtctcctgtttatcgatgccccttttgtagccaaaccctctgcccccgtggtattgggccctgcggcgaggaccacacctgagcatacagtgagtttcacctgtgagtcccatggcttctctcccagagacatcaccctgaaatggttcaaaaatgggaatgagctctcagacttccagaccaacgtggaccccacaggacagagtgtggcctacagcatccgcagcacagccagggtggtactggacccctgggacgttcgctctcaggtcatctgcgaggtggcccatgtcaccttgcagggggaccctcttcgtgggactgccaacttgtctgaggccatccgaggtagaggaccctcacacccagcccaagcccacacctggctgtcaagcccactcccctctccccaggctgttgctccaaggttgaatggcctgtaatctaatccctgactatactgcccgccgccatgcacctaggtgtgctggtcacttactatcattttattggcagcggtcaggggaccagcaatcacgtgccaagctctgcgctagagagtttcatttatctcaccaagaacaactactattattccacccaccttggaggttactcaacagcccatgagggcggggaaccaggtaaacgtcacctgccaggtgaggaagttctacccccagagcctacagctgacctggttggagaatggaaacgtgtgccagagagaaacagcctcgacccttacagagaacaaggatggtacctacaactggacaagctggttcctggtgaacatatctgaccaaagggatgatgtggtcctcacctgccaggtgaagcatgatgggcagctggcggtcagcaaacgccttgccctggaggtcacagtccaccagaaggccagagctcagatgctacccctggcccggcatcatctcttactgcgctgctcctcatagctgtctcctgggccccatctacgtcccctgaagcagaagacctgactctccttccttcctcccctgccacgtgggaccctcatctctgctgcctccttcctttcctgagaggctcagcttgagagaatgagccagtgagaagcttctctagacttggctccaaacatctcccctcccaagacatctgcctgcccacaggctcctgttgctccttcacacagacctggatgccccagagcaaggtcttcattcatggtcctgagcaggggccatgggattgggctctgggcactgacttaacggcacctccctagaaggcgagaaacatgccaaatctaaacacaccaggactcccatccatcgccttgagactgaccgtaaaccacagacgctctccaggttctcaagagttatcctgccttccagattcctgcctatcccaactccccagccttgttgaggttctctattgcctcttgaatacaaatgcactcccaaagtggttttaagaaaataaaaagattatccttcaaaaaaaaaaaaaaa

SEQ ID NO: 104 - DNA, 525 bp, Homo sapiens
aattcccgggtcgacccacgcgtccgcagtataatgcttgccagaaaaaaataggttaggagatcttgataatagtttaatatgatctgtatttttaaaatactagaaggttacttaatataccacatttccaagtccaaacggtgatcagagaaccccaaaataaaattttggcactgaattcataggaatacaattattttaaagcattagaaggaaagagaactcatagtctgtgttactgtgctgggtgggcttaggtttggggcttgtttgtattttgttttaccaatttagattcctttccacacttgcctgctaccacaagtaaggattgaggttaaatgggttttcatcttttattgggattggtgaaccttttaggattggtaaactgctttctcttgggcaagccaaactatctctcactaattgtttcaatagtggcccctttgaccttcctcttttcctttatctcaaacattaaaaaaaaaaaaaaaaagggcggccgctctagaggatccc

SEQ ID NO: 105 - DNA, 809 bp, Homo sapiens
  misc_feature (372)..(372): n equals a,t,g, or c
ggctgcaggaattcggcacgagtgttagggtaaaaagtgaattaaagcaacaggactatttataaaataattagatttagaaagcagtcgtagaaatataagcctggagttgcctctgaattacatatttaacaaacctagaagctaaatcagtttgtcttttatcaaaactgcaactcctctaagttgaaagcacagtgacaagagaaagcattacaaattcttgagaaataatagaaattaaagctcttttcaaacctgtgaacaagtatagtaccagaagtataagattcagataggcccaagttgtagttcttgttatgagtcttacaaccctatggactttggacaaattacttctctgcgtctgtntcctcatctgtaaaatgaaaataatttctgtttcatacaggtatagtctaaatagggataattacacctacttcaaagttgtaaaatacacaattacaactagataggaggtataagttctagtgttctgtagcactgtaggatgactatagttaacaatattgtatagtttcaaatagctagaagaaggatattgcatgttcccaaaacaaagacataagtttttgagatgatagatatgctaattaccctaatcactatatgttatatgtattgcaacatcactatgtacccccataaatatgtacagttattgtgtattaaaatttttttaaactaaaattataagacattaaaaaaaggtatcacatgtaaaaaaaaaaaaaaaaaaaaaaaaaaaaaaaaaaaaaaaaaaaaaaaaaaaaaactcgaggggg

SEQ ID NO: 106 - DNA, 1323 bp, Homo sapiens
agtctgtctcaaaaatgaatgaatgaatgaatgaacgaatgaatgtactatgagctgatactgggatttcaggtaccgcagtttgtgctgaatgatatgtttggggtaaatcagtttttttcttayagaatttcggcgtttttgctgcaactgccactaattttgcatttaaaagaacaaaagaggaatgtatttttcaaaggagtgaatgaggttaaaatcaagattttgaatggtataaatatgcaactaattcagttgtaggatattattaaattttttattgctaaatatgtttctttcatacgttgcagtgcttacagttccaacagctttccaagaaaacatttccatatttgtgttatttgtaaagtatacataaataatgtaaaataatttgggattatttcaactttacattgtatgtctgaatttcatcgatgttgtacctggctcagtcaatagttgtcacaggtattaagccattttggaatttgccacttttttctgggtaacctgttttagtttagtttacagcatttagaaacagaaggtaactttatagaagtaacaccmatatcctagtctgcttgccccgaatataactaatagtrttaggrtgtaagcaatattaagatggkttttattattttttatacactgtgtgcttttactttttatttaaactacagcaaaaaactgattttttaactaaaattgaatggcgtttatcttaatgaccagttattgaccaaagtgtactcagaagatgttattatgtcccaatctaaggaatcctttaatttggggattaattttacttacacatgccatttcagtttcagttgcctcattctattacatcattcttgtcaagtctaagctttatcatgtctgaattcttttaacactgaatctgtgatgtaaaaatgtatgatgtgccataaattttattcataataaactaagttatagcctattgtaatctgtaaaacatttcttgtaaattacctaatttattttttcatttatgtacagtatcttatgtaaatttgaaaaatgtttgccatggcgcattctgtaaacattcccgtattcttttccttaatgcttatttgcatgaaggtaacttgggttttgcttgtttgtattggataaccattaagccaacttcagtttctctgcctttttttctgtagtttaaccatttctaattttgttcatattctaaatagatgttagaatcatactttttattttctactttctaaataaattatctaagttgtttactaaaaaaaaaaaaaaaaaaaaaaactcgag

SEQ ID NO: 107 - DNA, 845 bp, Homo sapiens
ggcacgagctggtcctttgtaaactcctgttgaacccctcatgccctttccttggtcttttaggctcttaatgctactttcaacagcccaaagcccccaaccccagaaaagattcccccttcacagcactcccctccaatccaacttcccactgagcaaatgctgaaatccaggcactcttgcagattattagatcaaaataaaccatcctaaggtgtgagtgagattgagggggtaaaactcagggaagccattgatgttttaagtaaggaacttcctaatccaatcaattcccctaacacatgaaatttgtggggaggggaaagccccaaatgagatgatggtcttttattcatgccttttataaatatacattaagtgtttcctgggtgccatgtactaggccaaacattaagatgtaaaaaagaaaaacgtacaattaattgccactctcaagatgctcacagtaagtctagtaagtagacaagtattacaaaacaaaaatacaagtgagctcacctacagcaggatgctccctcctccatccctctcgtacccatccctcttgtacccagcctgctttatttaaatagagactgagcatggcaagtcagtaccatcccgtctctccctatccccttcctcatctttgacagcagcccagtactccacataagccattaaaacagtacgcctacctagttagtagatgaacctatgtttgtgaaatgaggaataacaagaggcattgagcctccagcttaacacaaagcacccaacttacacttaggagatttcaacttaacttaaccgctctgaccaaaaaaaaaaaaaaaaaaaaaaaa

SEQ ID NO: 108 - DNA, 1526 bp, Homo sapiens
aattcggcacgagcgaaagcccacagttatggaaagaattactgtctagatggtctgcagaacgtgtttggggtgagtgggagtgaggggcaatgttactttttctccctgtagtttggagtccattatgagctgctgctttttcttctcatcttgtcatcttctggggatgtttgaaggctgagttccaacagaattcacaaagggaataaaacaggattgagattttgaggtgtgcacaaggtggtaagataaagggcatatgagcttcaaaactaatgctgttgcatacatgaagccttttgttttttgaggagctatttttgttattcttgtaacgctccaccttacatgccacatctgtgtgagtcaacagggatcaggtttggtcaccacacatgtctgaagctgggcagcgtctgctctgtgttctgtgtggaatggagaaaaaaacgcctgccctgctgccttccatgttcataggcccagcccaagagagtgacacacagtgctggccctgagacatttccacaaagtggtcaactctgccttgcatcctaaaactttttgggcatctattttgaaaactataggagcctttggaaggcctcttatgtttggaggggaagggtgttgagattgtcaccatccttcaagctgagactcctggtgagcctttgccaccatgaaaaccacatagctgaccagggctgtgcttgaggtacagaggacacacatcgtagacaggcctgtgtcatgtttccttacagtcgttttttacagagaaaaggggcattggtttttcactgctttctcaacagttcctgtgaataaatgaaacatttcggagctccctgagagcaagagccttcacttcttcttgcggtgccgggaccatgtgttggtgaagctggtgctgtgggggccactcactcgaatgacacctggaggcctgttcctcccttaccactcccttccccagcccgacttcttggcctcctgcccaaccagacacctcaaactctgtcagtgccctggcattctggcagagaatcctcaccagttctcaccaaccttccccccaggcaagggcagctgccagcatggtgctctgccaggacaggtttccctgaaggaagctgctcacactgagatgagcctctcagggcaggacctcttcccaagccctgcacacccacccctgcagcccttttggctccccttttccctgtgcctcagcactcctttcctggttgcagataacgaactaaggttgcctaaagggcagatctgccttctccatgtcttcgtcctggcaaacagggtcgtcttaaaattatgcgctaattctgtatgggagcactcaaaaggcattacttagagattgaaatttcaaactatctctagtttttcaatggaaatatatcagctagggaaaaaccatcaagctcattattattttttgatcttcagttgtatttttgtgaatattttaatacatctttttcaatttcttaaaaaaaaaa

SEQ ID NO: 109 - DNA, 941 bp, Homo sapiens
cctctggagagtragcgcactgctccattttwagtttatgtccccttctctacttctracctgtataattggaaggctcataatccccccttctctgaaaagccccagdtcttgacttcactgatggagtccgtgctctggactcactggcccaccaggaatgactgtcagcaaytccttttaacgcttttcacctctgaagagagggaccgtatccgaagagaggccagaaagtattttctcacatcagccggtagaccagaggaggaagcccaggacctccttgaggaggcttttccctctacccggcctgattgggatccaaattcctcaggtgggaagacagctttggatgattttcaccagtatctccttgcgggtatcaagggagccactggaaaacccatgaatctgtccaagacaactgaagttgtccaggggcctgatgagtcaccaggagcgtttctagaatgcctcccagaggcccatcggacttacaccccttttgaccccgcggctcccgagaatagctgtgctattgatttggcatttatgactcaggcagcccctgatattaaaagaaaattacaaaagctggaaggatttgctggaatgaacaccagccaacttcttagaaatagcccagaaagtttatgacaatcgagagtttgaaaagcaagaacaggcagcccaggtagctgaaagaactgctgacaaagcatcaaaaagacaggcaaaaatcttagtagccaccatccaggggggcaagaagaaagggcccccatcacaaaacactggccaggggaccccgggtccccaccagaaaggccaaaaaggtgagtgggctcccctacaaagaaaccagtgcatgtattgcaaacagattggacactggaaaaagaaatgcccattaaaaccagaagaaaaaaaaaaaaaaaaaa

SEQ ID NO: 110 - DNA, 867 bp, Homo sapiens
ggcacgagccacagtccggcctggtacgcctcctgacttcatcctcaaggtggtaatagacaaacatcctgtccgtttttttgtacataagaggccccatgtggatttcttcctggaagtggtgagccagtggtacgagctggtggtgtttacagcaagcatggagatctatggctctgctgtggcagataaactggacaatagcagaagcattcttaagaggagatattacagacagcactgcactttggagttgggcagctacatcaaggacctctctgtggtccacagtgacctctccagcattgtgatcctggataactccccaggggcttacaggagccatccagacaatgccatccccatcaaatcctggttcagtgaccccagcgacacagcccttctcaacctgctcccaatgctggatgccctcaggttcaccgctgatgttcgttccgtgctgagccgaaaccttcaccaacatcggctctgactgggacacaggcggaagcctaggagagccgaatcagtgtttgtgaagaggcaggactggccagagtgacagacatacggtgatccaggaggctcaaagagaagccaagtcagctttgttgtgatttgattttttttaaaaaactcttgtacaaaactgatctaattcttcactcctgctccaagggctgggctgtgggtgggatactgggattttgggccactggattttccctaaatttgtcccccctttactctccctctatttttctctccttagactccctcagacctgtaaccagctttgtgtcttttttccttttctctcttttaaaccatgcattataactttgaaaccaaaaaaaaaaaaaaaaa

SEQ ID NO: 111 - DNA, 1875 bp, Homo sapiens
  misc_feature (334)..(334): n equals a,t,g, or c
  misc_feature (966)..(966): n equals a,t,g, or c
  misc_feature (1304)..(1304): n equals a,t,g, or c
  misc_feature (1319)..(1319): n equals a,t,g, or c
  misc_feature (1329)..(1329): n equals a,t,g, or c
aattcggcacagtcagacgtggtagaaagacagtaagagaggaacaactagaagtggagcccgaagatgtgactgaactgctgcaatctcatgataagacttgaatggatgaagagttacttaagtggtttcatgagatggaatctactgctggtgaagttgctgtgaatattgttgaaatgacagcaaaggatttagratattacataaacttggttgggcagagtttgagaggattgactccaattttgaaagaagttctgctgcgggtaaaatgctgtcacacagcatcacatgctacagagaaatctttcatgaagagtcaatcaatgangacammcttcattgttgtcttatttcaataaattggcacagccactctagccttcagcaaccactgatcactcagttcagcagccatcaacatcaagacaagaccctctaccagcaaaatgattacaacttgctgaagggctcaggtgatcattagcgttttttagcaataaagtatttttagatataatgctattacatgcataatagactagagtacagtatagtgtaaacctaccttttatgtacactggggaaccaaaaaattgtgtaacttgctttattgtgatacttgctttattgtggtagtctggaacagatcctgcagtatccccaaggtatgcctgtatctcagtatagtcgtgatcataggtcttgcttttctttagattcactgttggtgttatcatccatgaatttcaccttcctgtgtacaaacatctcttattacagtaggagaatatgggagtcagaaaaggaagacatttattgtcattatgaactcagaaaatatgtttwctastgacattgaaacaactgagattgatattttccagccacggcagttttggtgattgaaagcaagatctgttttttaaaaattaaatataagtttgcacattcttccagggnaagggcacgggataatttcccttgccattttattttgaaaccagctttgttgtggtggcacgctccatgagatttgctccatgagatttgctccatgttgcaccacacacagtctttgctcctgtgtccttccatagaaaaaaacagtgtggggaargatttggtttgtcttaccctttaatcttctgctcctacagctctctggtctgatagttcactattttggtaataaagtcagatatagttcaaatcctgtctggtctattatttcgtgaaatttttgaacttttccatgctttggcatcctccaagaactttttcctttcwaagtttactgntttaataaatggacncctatgtgancacttttagactggagtctaaaagcscctaataggcttgctatttttagagaaggagaaagttgccttttgttctctctgtgcttttcacctcccacatgttctttagagttttttttcctgttctggtcttagtagtgacagctttctaatyccagaggctttttcctgggtctgtttctggctcattttgtctcatactcaaaatttttaatgtcagaattgggctgggctcttctctttctattatctgtaaacattttgggtttcttttcctctaatttatgaaaattatgaaatgtacacataaaggagtggaaaatatattcacccagtttaaagaagagtaataaaatggacattcgtatatacccaccatccaggttgagaaatagaacattgcttgtgtctcagaagctctctgtgttcctctcagtcacgttcccccaccccaactcctacccaaggtaacctctcatcctgaagcttacatggaagatttgggcatttttattaaaaaaaaaaaaaaaaaaaaaaaaactcgtag

SEQ ID NO: 112 - DNA, 2036 bp, Homo sapiens
aattcggcacgaggaagagtggtgtctccttcagcagggcgtgcagtggtggctctttttcttctgtgaccctttatacccattttcacttttccccattgtggacactctgagtccatgttgttcttcccacttgtcctcctgccatgtgttttcctttcttatagtaaaaggaggagagcgcagggttaaaaagacggtaactgtgtgcttctcctcccatgcagacaagcagccagcagcagctcctgagccccacgctgtcggatcgaggaggaagtcggcaagatgcagccgacgcagggaaaccccagaggaaatttgggcagtggcgtctgccctcaggtaggtccatccaggcatttctccagcgatcgaggcattttaaaggtatttactctgtttgtgtgttttgggtcttgcctttcaaaatgcaagtctgcatctacagttgtttacagacagcaacataatgaaaaatgtagtcttgtcaaaaacattgtcccccaaaataacttctctaaatatgacttacattagcccccattttccgggtacatttcaggctatcatggttgagaagccagcacctatgaaaaagacaagattcagaaagagggagaaatttccaagggctttctgtgtgcctcaaggcatgctcaaacatgggcaaaagtattcaactgaagagggagtgggcagatgcaatcattcagaaaatgccacgaagttctcaaaaaagggacaggcccccgatttctctcagcacactttgcagctgagccggtcactggctttaggcaagctgctttacctccatacaataacaaacaacaacaacaaacacttacgtagtactcactgtatgccagtcactcttctaagtgcattacttgtgttctctcattcaatcctttaataaacaatcccattattttccatattttactgattcagtaagagaattttcttctatgagcttcttctctatagggttttggaaagccaggataatcccattaagagcactcaggaatcgagggagagcaatgctccccacagcccagtgtccttgtacatgtttttttctatagataactaagttcatgctaaagcaggagctttataatgctctttaactgtgccccaacttcagcccaattgaaaggagaagatgtgtagcatatgtgttccacaaagcagatgacagcacagcttacattttgaggctgacgatgttcagtgggtcttcactgggactaccaccaaggaaagtatcccctttcatatccaggaacttatttttcagagatcagagaagatctaggttcctcctgattcaaaacacagcagagaatgacagcatcaagacaacgtagatggtggtgccaggtcataaattacaagctgagtcggttcaattttatcctgtaggcaattaggagctagcaaagatttctgagcagtatgtgacttttggaatctgtgctttaggaagttgacttggcagcaaaggagggaattgtctatgacagagcctggaggcaggttacaagctggaggaagttaccgtggtgtgagcacaaggcaacaaaggcatggacagagctgggggccagatactgcagggacagataggagaggtgacctggggagaatgcacagtccttggtattcatttaaatggacaaaagaaatgatgctgtcaaaagtacttccattgggccaggcgcagtggctcacccctgtaatcccagcactttgggaggccgaggcaggtggatcatttgaggcctggagttcaagaccagcctggtcaacatggtgaaaccctgtctctactaaaaatacaaaaattagctgaccggtagtggtgtgcacctgtaatcccagctgcttgggaggctgaggcaggagaatcacttgagcctgggaagcagaggttgtggtgaaccaagattatgccgctgcactcctgtctgggtgagagagtgagaacctgtctcccaaaaaaaaaaaaaaaaaaaaaaaaaaaa

SEQ ID NO: 113 - DNA, 1047 bp, Homo sapiens
  misc_feature (34)..(34): n equals a,t,g, or c
caggaactaggaggttctcactgcccgagcaganggccctacacccaccgaggcatggggctccctgggctgttctgcttggccgtgctggctgccagcagcttctccaaggcacgggaggaagaaattacccctgtggtctccattgcctacaaagtcctggaagttttccccaaaggccgctgggtgctcataacctgctgtgcaccccagccaccaccgcccatcacctattccctctgtggaaccaagaacatcaaggtggccaagaaggtggtgaagacccacgagccggcctccttcaacctcaacgtcacactcaagtccagtccagacctgctcacctacttctgccgggcgtcctccacctcaggtgcccatgtggacagtgccaggctacagatgcactgggagctgtggtccagacagaggggcaggccccagggtggagatgatctgccaggcgtcctcgggcagcccacctatcaccaacagcctgatcgggaaggatgggcaggtccacctgcagcagagaccatgccacaggcagcctgccaacttctccttcctgccgagccagacatcggactggttctggtgccaggctgcaaacaacgccaatgtccagcacagcgccctcacagtggtgcccccaggagggttscccagggcacccaccatcgtgctggttggcagccttgcctccactgcggccatcacctccaggatgctgggctggacccacgtgggcccaggtggtgaccagaagatggaggactggcagggtcccctggagagccccatccttgccttgccgctctacaggagcacccgccgtctgagtgaagaggagtttggggggttcaggatagggaatggggaggtcagaggacgcaaagcagcagccatgtagaatgaacygtccagagagccaagcacggcagaggactgcaggccatcagcgtgcactgttcgtatttggagttcatgcaaaatgagtgtgttttagctgctcttgccacaaaaaaaaaaaaaaaaaaaactcga

SEQ ID NO: 114 - DNA, 676 bp, Homo sapiens
  misc_feature (638)..(638): n equals a,t,g, or c
  misc_feature (656)..(656): n equals a,t,g, or c
  misc_feature (675)..(675): n equals a,t,g, or c
ttcggcagagtggcccctcctcgacactaagccccccacagactcagcctccaaggaaccgctgagcacccttgaagcatgtcattgtcagtgatacctttttattctatggaactctaacctattcgtgtcatattgaccttttgctgcatgagtcataaattatgaaatcagtcttacagtttttgaaatktagccagcatttgtaaggctaaacctttttcatgaactgaatttaagtgaataaccaagccacagttcctcctcaaatggagagtgatgatcgacatttgaatctctttgccctttccaacggctatggcatcaggttctaaaataagctcgtaatttttcctgttattttaataatatggaaatattagcatagtgtttcttttgatagtgatagactataatccatatttaaattttatagagaagaaattttattgtactgtgatgtagatatttattatccaggtaaggatttgcccggtgtgtattttttacaattgagacattttactttaatctttaaaaaaaatgcattaaaaacacactcaaaaaaaaaaaaaaaaaactcgagggggggcccggtamccaattcgscctatagtgagtsgtataaaatcactggngtcgtttacaagtcgganggggaaacccgggttaccna

SEQ ID NO: 115 - DNA, 924 bp, Homo sapiens
ggcacgaggtcaggttgggtaggagagaggagagtcttggaggggctgctccatgggggtcacacctctctcctgtgggttttcgctggtgattgagttctgaggcatttgctgcattgactgttgtagctttaactcgtgtgcacgtgtgacacataaagccccaagagaagggctgcctggctcagatgcacttccatgctgattatatgcatgggtgttgaaagcagtgctggctgagcagcgatcccagtgcagtttgactttattctttgctcaaataggtgaaggcccacggtcccggcctcgaaggtggtctcgtgggcaagcctgccgagttcaccatcgataccaaaggagctggtactggaggtctgggcttaacggtggaaggtccgtgcgaggccaaaatcgagtgctccgacaatggtgatgggacctgctccgtctcttaccttcccacaaaacccggggagtacttcgtcaacatcctctttgaagaagtccacatacctgggtctcccttcaaagctgacattgaaatgccctttgacccctctaaagtcgtggcatcggggccaggtctcgagcacgggaaggtgggtgaagctggcctccttagcgtcgactgctcggaagcgggaccgggggccctgggcctggaagctgtctcggactcgggaacaaaagccgaagtcagtattcagaacaacaaagatggcacctacgcggtgacctacgtgcccctgacggccggcatgtacacgttgaccatgaagtatggtggcgaactcgtgccacacttccccgcccgggtcaaggtggagcccgccgtggacaccagcaggatcaaagtctttggaccaggaatagaagggaaaggtgggtttcatttaaaaaaaaaaaaaaaaaaaaaaaaaaaaa

SEQ ID NO: 116 - DNA, 1121 bp, Homo sapiens
  misc_feature (286)..(286): n equals a,t,g, or c
  misc_feature (1102)..(1102): n equals a,t,g, or c
  misc_feature (1105)..(1106): n equals a,t,g, or c
gtttctttattcctaatgcagttagaaagacctttctccttgagctctttgactcccagaaggtaccccagtccccagtgtacttagaaaggatctcgaacattgctggacgtcctcatagtactcacaaagggctagccttgaatgtcactcgcccagtcttcagtctcctgacttagagatacaatcacgtcacaggtctcttggcctcaatctgaaaactgctgccgccgcgccgaggagactcgcatgccgccaccacctcactgggagggcgccgagccanccgtcgccccctagaccctgacagctgcagctgccttgccttgccgccgcctccctgcagggcccctgttccaatgaaaaacagaacacaaaagagcagagcacctaagcctgtctctgcctccctgtctaccggactggccagggccaagacccccgctgctccactgcggggctgggcgggctgactccctgcttcctccargctgctgcctcccctgcagccagggtctgggcagggtgcagccggtcctcgggcgcacgcagcttccttcaagtacactgtgtgtgcttcccggacctgcggcgatgccacgggcctgccttttctatgcgcctcactagcttaccaccctgtgcaggtaatgcaactgactttgtctcatcagtctttttctttccctgccaccctttatttatcaagcgtaatgttacactttaaaggacagcaaataagaactttgtagaatcccaccaggactttgctaacaataatgtttggaaataaagaagtgctctgaaaaaatatcagccaccaaaatagttatgttggcactgtgttcacacgcatggtccccacacccccaggttgggtgggtttttttgttttttgggtttttttggggggggggctttttcatgttacatccatatctgtatttatatcttatttgtttcactttcaagtgtatcatggcaaatgtacagatttttttgttaataatgtgctaggatttgctaaaaaagaaaaaaaaaaaacccttttgagtttgccctagaataaatgagacttaattcaaaaaaaaagggaaaatgnagnnggaaaaaaaaaaggg

SEQ ID NO: 117 - DNA, 1820 bp, Homo sapiens
ggcacgaggtcaatggcttggacagacagacgggctcagtggcatttggaaccctctttggtgccctcccattctctctggaattgtttcaagtctgctggttttcaaacaagaaaagacctttctggccatagggagaatagcagggagtctatgttttggtggttacattggaaacatcttaagcaagagagggaaagttgattttaggcacacatgtaccctccttgacagcaggaactcagacttcaatcttgggggtctaagaccagaatattttccttctgccagaaaagaatcttgcacatatactcctgaggcatgagtgtgtggtccatggcaagaaatagctaaaggctgctttccaggacccaaagccccatttaatgcaagaaccagagaagtgttctaggccattagtggacaatgtcatgtttggagaaagataacaacacaaataatgtaacctttccttaaaaggcagaactcaatccattttatttgatgcttattctaaccctaaccctgggtcacctggaatgaagaactctatgaataatatttgattttacaacgtgttatggttatgtgaaaactaaacatttgccttttataaagactgacaaaatataaatctttattctaaccctatccccaaaactagccaggccacaccccagatgttcttattgactattgggaagatagaaaaggcgttgtgttttttgtttttttgttgttgttgtcattgttgtttttttcagaagaccagtgtctcagttctgtcttagtagtaccacacccgtaaccgtgttttaaaagtttgttttagcctagagacagatcatacgagttcaacaatgtacagtgtgattgaaaagacaggttggtgtctatttttctttttaaaatatctgaatgtgtatttgtaatacgtaaaggtaaaaaaaaatagtgccaaaaatgtgcaaggcatctcattacagctcatgtacgtctgtttttataagatcaatattaaaacccattgggattaaatatttttgaataggatacactcttgrgaaactcgrgaatggactgagccttcctacaagccactctttgtttttaaaacagtggggaaatacgtttacagagattgtgagcttcagagaatgcatgtgatggtgtgtattacatgctaattcatataagctgtatctgtcagctaccaccctgtgctttaaaaatgcacacactcaaccctctttagcttggagctcagctttttgcttttttttttttttttgtagaattatttagctaacataagtattctgawtgctacctgatggccattcttacttagtttcatagatgtgctttaactatgatcctttgaagctcaccccttggagascctacagaacctcaggctgatagctttgaagactgccaaacagcccagaaggaagcaaagcatctgcataatcaggagggttgtataacaagtagtgatttggcaaatatgtgggtagctttaggctgaggcacgggcctcaggcaaaaatgcccttcgagtgaatccgaagggcatgatcttcctatgtccttgactaggcatgacgagtcatttgaggtcagatattatttgagttgttcagcacccccaaaggtaggcattctcctgggaaattttcatttccattttatcgccaaacaaaataaaaagcaaaacaaactttctaagctagaataatgaaattaagtcattttccactttgtatatattgatgctaataaaacagatgaaaaaraaaaaaaaaaaaaaaactcga

SEQ ID NO: 118 - DNA, 1573 bp, Homo sapiens
  misc_feature (1549)..(1550): n equals a,t,g, or c
gacaattcctgcccctaaagcctaggagatccctctcccttgctagagagccacccccaaatcaaaatgtgaaaatccctagaaagcaatagccttcgaggtaccttgcactgaatttcccaccccagcccttccacccgatgggaggctgtaacttgggcactggggtgactttttccatgcccttgtcatctccagggtgggaggcaggccccacttcccctcccctatcccccacttcccattgttgttgccccacccctaatctccagactgaacccagatggagatctgagtgccaaaacaattcttgatgtaactttgtacatatcttctactaccgttgggggctcttggggttagaggtgggggcggctctgtgggccattgctcccctccacctctcaaaagaccttacagtatttcacagtatctctacccgcacgcgagtattacagtatctagctggaatatccccctacagccccccaggaccctatgaggaagggaaggagccagggagagtgaagtaaggtctgggactggggaggtgggatctgaatgaactcatttgcatatcatttgcatcctccgcttggcagccgctttctacaaactcattcactggagtctgggtcccaatcagccgggtccaggactcctctcacacagacacatctccggaggctgggcctcctgaaaagtgtttgcttggggtgtctgtgtaacaacccctccctattcatatttcttggggaccccctacccagccagccagggtgatctgaaaggtatactttgctagctcagtgagctagttcactcaccatgttggtgagcagagagccacacctttccccattttaccytgggaaactcactccaccatctttgccatctcttgaaagtcccttctgcaatctgacctcaatcttttgtgctgcagtttgtccagaggggacacagatgtggggtcagggatgaggattattgraaaacccatcatctctttttttttccccgtctccctattagccaatccgatctcagagtctctgagtggcctccttgcacccttctcttcagcacccagtaggtgcttaataagtgtttgctgcattgaattatctccctattccttctcatttgccctctagcttcccataccttctccaagtgtcttcctccctttctttgtctggctccctatgactttctatttttttttcctccgtgtggttcccattgttttctgtcctgtctctatcttagtctttgtctgtcttcctcctttcctcaaatgtctcaactctctctccccaatttccccatttaaaaaaaaaaaaaagtgccaaacttccttggaactgagccgctctggggggagaggaccttggatagaggggaggaaatgggaccatttctctttgaggaggtccctaagaggcattgcaaaagtgtggacatggagctaaattgggtcccccttccacagccctcccaccctgagtttttcttagaatctttgtaaaaaaaaaaaaaaaaaacnngaggggggggccggtaaccaatt

SEQ ID NO: 119 - DNA, 1304 bp, Homo sapiens
  misc_feature (41)..(41): n equals a,t,g, or c
ggcacgaggttgggccaagggcagagggggctgcacctgcnggcctgggaagcattgctcagggtggggggctgggaccatggcccgcagaggcactgccacagctgtgagggccaagatgctgtccccccatccaaaacccgtgcgccactgcagtgagtgttgagggcacctctcctcccctcttacacctactcagatgaggcagcagcagacccatctcgcggcgggggttttgttctgttgccgcctaactttctcatcctcggtctctggaaagtcaggctgagaaatcctttcccaggccaggccgctgcggtacactggatggttctgaagctggcccattgaaagagcctcttaaggcagctgggacagaggcctggtggccctgctgggcagcccaactgctgggggagacgtttctgccaccctgggtgatgagcagcttttcccccctggctttctgggggaggagtgggcctccttagggagacaggtgaccctgggtgccacccctgccccgtgtgtgccccgggtgttctcagtggttgctgaaggcaggtagagggtgctgtccagtatcccccatgtgaaggtcacttcccttctcatggagtcagctgagcatcagctcagccctgccatgtccccactcaccctcctcgcctcctgtccggccctgggtttctagcggtgcctgaggcatcactctggcccattgacagatgagaggtctgaagccttcctggccacaggcatcactttctcctcctcctcatgccctgccttgtccttgtcgtgttgccatggggttctgagaggctgggagttcacagacctcagacacagctgagtccgacaaccattggggtggggctgcatcagtctccggagtggcccgccacctcctgaagcagggcctggcccacccaaggtgcctggggcaggcgggcaccgtcattcgctgccattggcttctcagatgtatttcaaggactaaagtgggctctaagatctaagatggcccggcgcggtggctcccgcctgtaatcccagcactttgggaggccgaggcgggcggatgagttgaggtcgggagtttgagtccccgtctctactaaaaatacaaaattagccggacaaggtggcgcatgcctataatcccaggtactcaggaggctgaggcaggagaatcacttgaacctgggaggcagaggttgcagtgagccaagattgtgccactgcactccagcctgagcaacaaaagcaaaactctatctttaaaaaaaaaaaaaaaaaaa

SEQ ID NO: 120 - DNA, 1867 bp, Homo sapiens
ggcacgagctaaccacaccatccatctgcagatagaacatcatcagcaacattgaaataccccatgtgctctctgcttcctaatctcagcgccctcctgtcctccatgatgaatgtttctcttgaaatttactttgttgtctttctttcacttttctgtgtcgttttaccattacatgcattattcctaaagtcgttcttttttttggattttgcttgctttcaaattttatgaaaatggcagcaaaatgtttatattcttctgccacttgctttttttcatttaatattgttttgaagatctatgcatactgatgcacactgatcatattttcagtgttgtactaattacagtttatgactattccacaatttgttcatccatttattccctcatttttgtgtatttggtttgttggaagatttcctggctttttttttctattatcaactgggctgccacatatgtctttatgcctgtttcatgataaatacgtgcaagaggccaggctatgcaaagtgccagctttacaagatcatgagcagctgttttgctacgtggtattgccaatttagactcacacaagtggtaaagaagcatccccagtgtcctaaatccttgccaacacttagtgtcaccaggcttcttaatttttaccaatctggccagtggataatagcattgaaaagttatttttattgtgatttggagtccaatattttttctgtaagaaatgcatgtacaatgttataagaacatgcaaaaatcaaaatactttataaatgttcactttataaaaaatgaatgagaaaaacataacgcattttacataaagaaaatctgtaatgcttttgttattggctgggtattttcacaccttccaagtggtggctgttgataaattcagcaataatacctttatgtttattaatattaaatgataatgtcgaattaattaaatgaagttcaatttattgatagttattcattatatcctgctgttctaactcatcctggaagagaatagagtgaaagagaaattgcctttatatataaatgactcatagaatttcatatactgacctaaatagatttcattgcaaaggtattatagaggtaataacacagtaactcttaggactgttttgagattttcacaatttgaaaaatccttttagatccttggttgacaaatgccctggctgtgctaattatatgacatttcctgacactagtgacgtggcatggcctctcccggcttacattatagattgttttctgcccccatgggatctgatttgttaaggctcattttctattttaatgtggtggaagaattttagaaaccctagaaccccactttcaccctccactgaaacaaatagaagcagtgtattagtcagttttctcactgttatgaagaaatacctgagactgggtaatttatgaagaaaagaggttgaattggctcatggttccacagctgtacaggaagcatggcaacatctgcctctggagaggcctcaggaaacttttactcatggtgggaggcaaagtgggagcaggtgtcttatgtgacagaagcaggaccaagagagagacgggggaggtgctacacactttttttaaaacagagtctcactctgtccctcaggctggaatgcagtgatgtgatctcggttcgctgcaaccttcgcctcccaggttcaagcatttctcatgcctgtagtcccagctactcgtgaggctgagacaggagaatcgcttcaacccgagaggtggagtttgtggtgagccgagatcgcgccattgcactccagcctgagcaatcagaacgaaactctgtctcaaaaaaaaaaaaaaaaaa

SEQ ID NO: 121 - DNA, 2168 bp, Homo sapiens
  misc_feature (676)..(676): n equals a,t,g, or c
  misc_feature (735)..(735): n equals a,t,g, or c
  misc_feature (1551)..(1551): n equals a,t,g, or c
ggcacgagccaggtagccccatcccacacactttccactagtgcctatattgggatgaatcttctggcaatcttccttaaaacttcaagagacctctttaagattctgtagttgggtgagcctgtctgtgcccagggtagcctgaagttaaggtgagggcttaacagtggtaccaggcagtttggatcccaactagctagctgtccttgggcaaatgactactttcctactactgttacttcttgtttctattttctcctctgtaaactgtgggtaatgaaaagttgcgcaaagtagggtgggtgagtgacagctacaggctcactgttcctgaaaactgcaattcgaaattccacagccccctgaaaataaaaagtctttcagtgaatgttcagcaaactcccttggtgggcaaaactgacttgaattaacatgaggctatttatgatattttgtaaatctcagttagtgagactagttgtacattttactgtagaaatatccatgtgtttgatttcagagtactaccctgaaaatacccaggtatttggaagcatagaatatatgaattaaatgacttttttaaaaaattgtggtaaaatacatataacacaacatttactatcttgaccacttttaagggtacagttcaatagtgtttgtatattcacattgntgtgcaaccaatctccagaattctttttacttattaaactgaaactctgtacctatcanacaactccccgttttcccctttccccagcccctggcaaccaccatttgactttccaaatttcttttagaattgcaaaaattccaaattccaaaacacatctggcctcacaagcatttcagataagggattgggaaacttaattagggaaggggaatgcctamcatttgatagagtcaccacctttcgagatgatcctggaagagggagttcttccaatcttacaggggcctgtcaaccacagcacactgcttcccaaywtcgatgcccttttgtaaaagatggcacagkrgcaagaacaagggccattagattctgaccagagcaaacagaacgcaggtacttgcatgggatgtttgataccttccccttcttttctgtcattcccttgatctcagtttttytcagtaagtagaagtgcacatgttggcagctggttctggcatctactttttatttccattccagggaccatgatggaggatgcttttacagtgaaaaggcatgaaaacctttatgcagactgaactcatggggaagatgctgacagtctgtttagaacttgctggaagccattgaaggccagatttatccattttgcagaactctctaggaatcttcagaaaagcagtagggcttactctgctgttccccagcagatcacagtatggagaccggttctgagtcatgctccctataactggaataacacagggaattcttcacatgtttcataatgtgtgtgagtgaaaggacaacccagacttgktattgaaaaacccgmcagtggtcaggcatcattattggaatgtcttctnccacactgcccattctgtaaacatcctggggaaatgtcgaggttactttctgtgtgaggsttgtgckttcttwtcctgkttgtaaataccagggatgaaagtggatgccttyaraattggagccctgaacmcaaaattctgcagaatacaaaaccctctgatggaccactcctgataaatataaaataaccttagtaccagaacttctacttttgggttatggaaaatatgccaagaattttatgttttaaaaacaaactacaggctgggcgtggtggctcacgcctgtaatctcagcattttgggaggccaagccaggtggatcaactgaggtcaggagttcgagaccagcctggccaatatggtgaaaccccatcactactaaaaatacaaaaattagccaggcatggtggtatatgcatgtgttcccagctacttgggaggctgaggcaggagaattgcttgaacccgggaggcagagtttgcagtgagccgagatcgcaccgttgcaccacagcctgggtgacaagagtgagactctgtgtcaaaaaaaaaaaaaaaaaaaaaactcgtagggggggaccsgtacccaatccgaccctgtgagtgtattcgta

SEQ ID NO: 122 - DNA, 1260 bp, Homo sapiens
gtcgggttggatttttcttttgggaatcagtcaaaacccactgtgggttattaagagtagaagatgacttataaagggataatgaggatagcctccttttgctgggaagacagaatttttcattccaaattctaatctccagtgtcaccttgcatgtccatttctggatttatattttgtattttagtatttatatcccatgtttcatttgactctgggatacaagcaattgtcagatgcaccattattttccagaccactaagaaaggaaaaaaaaaacctaccgattaaactgtgacacaccattgattgtaagacacaccctgattggtgaggtgtaaaaatgggggaaagtggctctcttagaatgaaatatcttagaatgaatttgtgtgagtcaggggcaggtgaaagtcattttgcaggattctaatggcttctccatacacctctctccgaagaaagaaaggacttggggtgttttgctgactcctggcagcattcttggcccaatgtattctgggtttgctcttccccgttggagagccctttgccagagaacagccactggcttgttgagccaggaagcttaccatgtgagtgcagcttgtgtctgaagaggctgggccagtacagataatacgaatcacatttcactggctttttgatcggctgtttagctcctggcagcttgttcccagcattcatgtttgctgtgagtaggaaacacaaagaacctcgtcttcagaacgagaaagacttggggctggattctagctgtgcccgtggctggcttagtgctcatgattgtggccctgtgcagaccactttgcctccctcagtctcagtttccccatctatcaaaacggatattcattcctgccttgaatgtgttatgtaataatgattaaggaaaataaaatgcaagtgttgaagttgatacaggatctttatttcattccagaaaactctgtaaagtttcctcatttaaaaattccttccttctgtggccgggtgtggtggctcacactgtgatcccagcagtttgggaggccgaggcaggcagatcacttaaggtcaggagttcgagaccagcctggccaacatagtaaaaccctgtctctacaaaaaatacaaaaattagtcggacatactgtcttgaacccaggaggcagaggtttcagtgagctgagattgtgccgctgcactccagcctaggcaacagagcgagactctgtctcaaaaaaaaaaaaaaaaaaa

SEQ ID NO: 123 - DNA, 1614 bp, Homo sapiens
  misc_feature (28)..(28): n equals a,t,g, or c
ggaaggatcgatcttatttaactatgtntggaacaacccagtgaatatcagactcggaattactatttcattctatttcaaatgcttataaagctactattgtagattatagtgttaatgcaaagtttacagacttttgatatggaaaaccagataaaacaatgttacaaaaggcaaatataaagagtawgttttctttttagtgctttggaaaaatttcacttaaactcttattactgtatagattaagccctataatgctatttatattccaggggaacgaaaatctgaatttgttttatgatttaaagcatctggtttgcatattgtattgtaatactgatacagtttggctgtgtccccaccaaattgaattgtgttaatagttcccataatccctacgtgttgtgggagggacccagtgggcagtaatttaatcatggtggtggttaccctcatgctgttcttgtgatggtgagttctcatgagatctgatgggtgtttttttttgttttgttttttgttttttgagatggagttttgctcttgttgcccagactggagtgcaatggcacacgatctcggctcaccgcaacctctgcctcctgggttcaagcgattctcctgcctcagcatctcgagtagctgggattacaggcatgcaccaccacgcccagctaattttgtatttttagtagagacggggtttctccatgttggttargctggcctcaaactcccgacctcaggtgatccgcccgcctgggcctcccaaagtgctgggattacaggcgtgrccactgctcctggcccaagatctgatggttttgtaagggaattttccccctttgcttggcacttcttcctgctgccatgtgaagaaggatgtgtttgcttcccttccaycatgattgtaagttycatgaggcctccycagcctgtgggactgtgagtcaattaaacgtgtttactttataaattacccagtctcaggcaattctttatagcagtgtgagaacagactaatatgaataccaatactgaaaaattgtttcttgcctcaccttgtcctatgaacaggaattaaattttaaagtattgccttaagatggctgtgctaaataataatcattgcaagagcaatacttttacctgtttctagatgacaatattactaaaatttctcaaatgaagactttgttttagcttcaattacttcagaaaatataaattttaaagatgactatgagataaatcatgaactcagtggaattttcagatgagatggggcgcgttcagggtggtatgactgtagacggaattttcagatctttgtyatttagaagcaagtataggtataacgtggactatcaactgatatctgcaaataatttggttaaaaagaaatttgattgtagtatttgttgctgtaggattataaatgtcaaatatcattgtaaacatttctatatttttagaaatatcttgggtggcctgaaacagaagtgaggaaatcaattttttaaggtgagccatttggcttttttaaaaaattgagattcaacttacataccataaagttcactcttctaaaaaaaaaaaaaaaaaactcga

SEQ ID NO: 124 - DNA, 939 bp, Homo sapiens
ccacgcgtccgaaacgaagctgaattccccttcacggacctgaagcctaaggatgctgggaggtacttttgtgcctacaagacaacagcctcccatgagtggtcagaaagcagtgaacacttgcagctggtggtcacagataaacacgatgaacttgaagctccctcaatgaaaacagacaccagaaccatctttgtcgccatcttcagctgcatctccatccttctcctcttcctctcagtcttcatcatctacagatgcagccagcacggtgagctcagagaacgcaaagggagagagggggagtgaaggattttctcggtaggtaaattcctcctgcattttttgtaggttcatcatctgaggaatccaccaagaggtagatgcttggcatagctcatgctccacttagttcccatgtcattctcaagggaacccattggcacatccgggattggcaccctgagcccccaccccagcccattctgtgaccttcctcctctcccttcttctcccttcctctccctacattgccctcaccctctccccgaaatcttcacatcccatcctttcacgtgtgtctctctctttcagaaccagccattccaaacttccagagcaggaggctgccgaggcagatttatccaatatggaaagggtatctctctcgacggcagacccccaaggagtgacctatgctgagctaagcaccagcgccctgtctgaggcagcttcagacaccacccaggagcccccaggatctcatgaatatgcggcactgaaagtgtagcaagaagacagccctggccactaaaagaggggggatcgtgctggccaaggttatcggaaatctggagatgcagatactgtgtttccttgctcttcgtccatatcaataaaattaagtttctcgtcttaaaaagaaaaaaaaaaaaaaaa

SEQ ID NO: 125 - DNA, 746 bp, Homo sapiens
gcgccaggagccctgtaacatcagccatcgtcaaccccaccgtgttcttcaacatcaccgttgacggcaagcctttagacctgcgtctccttcaagctgtttgcagacaaggttccaaagccagcagaaaacttttgtgctctgagcactggagagaaaggatttggttataagagttcctgctttcacagaattattccagggtttatgtgtcagggtggtgacttcatacgccataatggcactggtggcaagtccatctatggggagaaatttgatgatgagaacttcatcctaaagcatacaggtcctggcatgttgtccatggcaaatgctggacccaatacaaatggttcccagtttttaatctgcactgccaagactgagtggttggatggcaagcttgtggtctttggcaaggtgaaggcatgaatattgtggaggccatggagtgctttgtgtccaggaatggcaagaccggccagaagatcaccattgctgactgtggacagctcttataagtttgacttgtgttttatcttaaccaccagaccattccttctgtagctcaggggagcaccctccaccccatttgctcccagtatcctagaatctttgtgctctcgctgcggttccctttgggttccatgttttccttgttcccttccatgcctagctggatgcagagttaagtttatgattatgaaataaaaactaaataacaaaataaaaaaaaaaaaaaaaaa

SEQ ID NO: 126 - DNA, 1647 bp, Homo sapiens
cccacgcgtccgaggtgaaaaccatcctttattgttgctggcacaacttgatatatagtctgactcagaactgaagctcacatctcaaattcatttcatgccagtaaatgtggcaaagagaagaaaggcccaagagcgagacaagaagaatggagaagggggcagccaagaagaacttctgggttcagggtactgtttatttgctccttctcttcatgcctgtggctggatgtcccacaacactataagaaatataagtcaagccctttgtgttaagcaagaactacagactccatcttttcacccaaatcatgaatgaccaataaaaagcaagttattccagaggaagaagcagcccttgaaatgttaaggcttaggcttgaaaggtgaagagcaggaattctctctttcaaatcctagagcataaacccatgtgtggccaagtgagatcagccctcaagggcacatgccaagggcagagcagcccatgtagacagcttcggagggcatgggggtgtagggagttcggggtagctcctcattaactatttgttgggtgagtaaaggggtgaggctcagtggcaggtacctctgcaatgacaagctgcctcccctctatgtgtttagcatatgttattagaacatgtccgacacccctaccgctgccatttgggccctttaataaagccaagtagagaaatctggcaataaaaggcaaatgtaagcatgctttctttaagacgcatcataaatggttttctttaagtgaatggaagagtttgacagagatacacctttgtaagaaaacattaagaatgctggctggctgtggtggctcacacctgtattcccagcactttgggaggcctaggcaggaggattgcttgagcctgggacttcgagaccagactgggaaacatggcaaaatcccatctctacaacaaaaatacaaaaattagccaagtgcggtggtgtgcctgtagtcctagttacttgggaggctgaggtgggagaatcacctgagcccaggaggtggaggctgcagtgagccatgccaatgcactccagtctgggcaacagagtgagaccctgtctcaaaaataaataaataaataaatgaataaagagaatgctaatcatttctgggttcactgcgactcactgtagtgctggggatcccccttgtaacactggaactgaaagacagtgatgaaagctatgtcaagcattcattattctgaagaggaggagaaatgccacatacctttcccatgggacctgtggtggaatgaatccatacttctgcctcacttcgagcagacttttgttctcggcgctcctcacgatggagtttcatgcttcattttcacatctctctgcacaattagattgggagctccttgagggcagagtacgtgccttaatctttatctttgtaatgccacaatgaacagagtgcctcctggtacactgaggagcttaagaaatactcactgaatgcatgaatgaatgaatgaacaaatgaaggaatgactaaggatgtttgtagtgctataatatagaatgggatttactctgctttaccagttagtttcataataaacaaatagtctgtaaaaaaaaaaaaaaaaaaaaaaaaaaaaaaaa

SEQ ID NO: 127 - DNA, 1533 bp, Homo sapiens
cctgtctggatgacttcttgcggctgttctacccctccccctccccgcgtcgcctgctgctgtcgtcgggaggtgggtgaggtgacgcaaacagccccgttgttgccctccgcgtatcccctcaccacctttgcggccatccacgactttcgcaccttccgccattttcctgcctgtgagggtggacagatcgcgctcgggtctcggcctcctgagtgccggtgactgcgggaggcgacggatgcttctgggggtgtgagctggggaagttcgtggtcacggatgcgtgtggggttgctgctcagtctgtaacggsaggaaagatgaatgggagggctgattttcgagagccgaatgcagaggttccaagaccaattccccacatagggcctgattacattccaacagaggaagaaaggagagtcttcgcagaatgcaatgatgaaagcttctggttcagatctgtgcctttggctgcaacaagtatgttgattactcaaggattaattagtaaaggaatactttcaagtcatcccaaatatggttccatccctaaacttatacttgcttgtatcatgggatactttgctggaaaactttcttatgtgaaaacttgccaagagaaattcaagaaacttgaaaattccccccttggagaagctttacgatcaggacaagcacgacgatcttcaccacctgggcactattatcaaaagtcaaaatatgactcaagtgtgagtggtcaatcatcttttgtgacatccccagcagcagacaacatagaaatgcttcctcattatgagccaattccattcagttcttctatgaatgaatctgctcccactggtattactgatcatattgtccaaggacctgatcccaaccttgaagaaagtcctaaaagaaaaaatattacatatgaggaattaaggaataagaacagagagtcatatgaagtatctttaacacaaaagactgacccctcagtcaggcctatgcatgaaagagtgccaaaaaaagaagtcaaagtaaacaagtatggagatacttgggatgagtgaaaaattacatcattggacatgaaggagtttcaacatccagcttcatctaggtggtcatgattacctgcatgctttgagctcagcagcagtcttcataaacacatttaaaacaagatcctgggtttttgtggtttgacttctatggtgttttaaaaaaacacagatttttagtgttaatattgtgtaaatgtactcaccttagggattcatttgaatgatggtattataccatgattgtatacagtttgtgaaattgttgcaagggcaaagataactcttaaaaaaccgtcgagattacaatgctctagaatcagcatataagaaaataaatgatatctgcatgttgaattggggtggatggggggagcaagcataatttttaagtgtgaagctttgcatcaagaaattattaaaaagctttttttctccaaaaaaaaaaaaaaaaaaaaaaaaaaaaaaaaaaaaaaaaaaa

SEQ ID NO: 128 - DNA, 1778 bp, Homo sapiens
cggcacgaggcaggatgagaatcgtggagtgcggaggcaggtagcccgtggggtgcctcctgtgctcggtggagctggaagccgcttaggtgccagagctttttctgtgaccaaattctggcttttgaaataacccagtaacagttctctatcttttcattctgcccgctcctcccacagcctggtccctcagaggaaaggaaggacaaggagtgctttgcagcacgtgcccctggcggcgtcatggtactttcctggccctgctgcccctgcccgtccgtcttttatgatttttatttactcgtattggtttttttaaattctatttttgcagaactgagcctttttctgccctgcctttctcctgtttgtctttcctttgtggttgatattgtgttgtcttctccaaagtatttgtcattagaaacttacagcaagcgtatactttttagcatgtcagtatttttattatgttgccctccttgtctttgataactgcctgtggacgctgtgtaaactttctggtaaaaatccttttttttccccctgtagtctctccatttcaaggactaaaacagtcttgcgttaagtaaaaacctgtgaccagagctgaaggaagactctaggactgaaaactgcaacagaaattagcacaatttgaaaacaaaacaaaattgcaaaagccttagttgctttttccacctaagaagttgatcaatggagaaaatgtccactggagtttgaataatgaactttgagtttgggtgcaagcaaatgactcagagaagggtccagctctcaagctgaatgacaaacatgctgttgtaaatttagtctcaggtgtaaatacccaagccctctggtacccagggagctggctggtctgtggtgcatgtgtgtccctgtgatggcaatcattgtagttgctggccttcagaagaattgaggatctgatggaggttttttatgtatttattttctgttcaccttgtgaccctgtgtcaaaatttataaagatacaaaaggcattactgaaatggtactttctgtaatttgatactatttggcttaatcatcttcacttgactatttgtaatactgttgtaatgttaactctgttaagtacccaagctgcttgtcttccaccaaagagtgctttattaacaagaatctgtgaaaatcacatttaaacactgttgcatgttgtaagaccaggtggtaccttagtaacctaaaacttgcaagagaatattaatggtagctttagaagactcaggaggagaaactgacttcagagttggaagatgttgcaagtcgttcctttttctgtccttcagggactgaagaactgggaggctgcccattgtttggttgccagtcatacaaattaaaatcatatttccttccatgaatggaagaaacacactattggtttttccccttggaaacagcaatcccaaataatgtcggcttacaaaaaaaaaaagttaccacttttttagagtccttccctgtaacattggattttttttttcccttatgagatccacctaaggccattgacgtggcctgcgatctcagtgacaatgatctgcttctggatctcactgttgcctttggttagggaacacaactagtaactctgcagagtgccttctcccgcagccctactggaacacagcagagtctgtgccatgaagcagttacagaaacagaattgatgtgctgctaaaaaaaaaaaaaaaaaaaaaactcgagggggggcccggtacccaatt

SEQ ID NO: 129 - DNA, 871 bp, Homo sapiens
gtttttccttgtagcatttggaaatgatttactggaattacaaaacctatttttcctttaaatttcagctttggctctggctgctttttagaataatgcaagataaaaatcacacctgagggctgaaaacggagagggaatgggagacttgatatttaagcagcttgaatggtttttcttttctttatttttaaagaaatgcacttgcctatgatactgtctctccagtgaaatgattactcctccattactctattgatacaatattgtgcatgctagtgttgtatttctatacagtagcttgaaattgattaacttatactgtaggtgttatgtattcctatgacaaaaaaaattaagtcttcaaattttttaaaggttttttttttttaatttaattttcccttttgggggtaaagtttgctctaccaaatagtgattgtaacaaattgatctgttttggatgttgctatagtgacatgcagttatatattttgtttttaaaagggggggagcaaaagaaacaccagtgttagcttaatcttaatgtctggtgtttgtcatggtgaaattataactattacagtgtttggaaaacaacaaatatgttctctgaatgagcctttgtgctttttgtcatgttatgcagtgaactatttttaaggtctaatcagtgattatttttccagctccgtgtttctctaaggaattatttcacacacggaccatctttagcagtttcctcagtgatggaatatcatgaatgtgagtcattatgtagctgtcgtacattgagcaaataaacttacagatctgaaaaaaaaaaaaaaaaaaaaaaaaaaaaaaaaaaaaaaaaaaaaaaaaaaaaaaa

SEQ ID NO: 130 - DNA, 1437 bp, Homo sapiens
ggcagagcagctccaccgttaccgctaatataagtaaagtttgtaaaattcatacttaataaacaatttaggacagtcatgtctgcttacaggtgttatttgtctgttaaaactagtctgcagatgtttcttgaatgctttgtcaaattaagaaagttaaagtgcaataatgtttgaagacaataagtggtggtgtatcttgtttctaataagataaacttttttgtctttgctttatcttattagggagttgtatgtcagtgtataaaacatactgtgtggtataacaggcttaataaattctttaaaaggagagaactgaaactagccctgtagatttgtctggtgcatgtgatgaaacctgcagctttatcggagtgatggcaatgctctgctggtttattttaagtggctgcgttttttttagtttggcaggtgtagactttttaagttgggctttagaaaatctgggttagcctgaagaaaattgcctcagcctccacagtaccattttaaattcacataaaaggtgaaagctcctggttcagtgccatggcttcatggcattcagtgattagtggtaatggtaaacactggtgtgttttgaagttgaatgtgcgataaaattattagccttaagattggtaagctagcaatgaatgctagggtgggaagctggtgagccagtggccattagataaatacctttcaagtgtgagcttagacgtcaaccctaaaatacttaaccgtaatgctaattgtgatcattatgaatcccttcagtcacattagggggaaagtagttggctataagtaccgtcattcttagtccagtcagtcttaaaaacatcttgggttacccactctgtccactcccataggctacagaaaaagtcacaagcgcatggtttccaaccatatgtgttttctgcagttatttctcttgttctggccaaacaaccctaaaaatccttaccattccacaaagttggaccatcacttgtgcacccactttgactatgagtataccaccacattgcatttctgtttgcaccatgtcttccaggagactagactactgttgtccagggtcaatttgagtgtaaagaaaatgtagacaaggaattgcccaattttaaattctgactttgctgacttaatttaaatgctcgttctgaaccaattttctcctatcttctctaggggtttcaaaagactcagttaattgatttccaggaagtactcatagcaagttcataaaagttcttgagacctaaatttcttcacaaaaaaagaaaagatcttaagtcatacattttaattgtgtagaggttgttcaactgaaggaataaatgtctattaaactaaaaaaaaaaaaaaaaaaaaaaaaaaaaaaaaaaaaaaaaaaaaaaaaaaaaaaaaaaaaaaaaaaaaaaa

SEQ ID NO: 131 - DNA, 1153 bp, Homo sapiens
ggcacgaggagcatcaccgcagaaacaaaggctccagcctccggacaccatgtctgtgcgcttttcttctacctccaggagacttggctcttgcgggggcactggctctgtgaggctctctagtgggggagcaggctttggggctggaaacacatgcggtgtgccaggcattggaagtggcttctcttgtgcttttgggggcagctcatctgcaggaggctatggcggaggtctgggcgggggaagtgcttcctgtgctgccttcacagggaatgagcacggcctcctctctggcaatgagaaggtgaccatgcagaacctcaacgaccgcttggcctcctctctggagaatgttcgagccctagaggaggccaacgctgacttggagcagaagatcaagggtggtatgagaaatttggacctggttcttgccgtggccttgatcatgattacagcaaatatttcccaattattgacgaacttaaaaaccaagtataatttctgcaactaccagtaatgcccatgttgtcctgcaaatgataatgcaaaactaacagctgatgacttcagactaaagtttgaaaacgagctagcgcttcaccagagcgtggaggcggacatcaatagtttgcgaagagtcctggatgagctgaccttgtgcagaacggacctggagatccagctggaaactctcagtgaggagctcgcttacctcaagaagaatcatgaggaggaaatgaaagctcttcagtgcgcggctggaggcaacgtgaacgtggagatgaacgcggcccccggggtagacctcacggttctgctgaacaatatgcgagctgagtacgaagccctcgcagagcagaaccgcagggacgcggaggcctggttcaacgaaaagagcgcctcgctgcagcagcagatctctgacgacgctggcgccaccacctcagcccggaatgagcttaccgagatgaaacgcactcttcaaacccttgagattgaacttcagtccctcttagcaacgaaacactccctggagtgctccttgacagagaccgagagtaactactgtgcacagctggcacagatccaggctcagatcggggccctggaggagcagctgcaccaggtcagaaccgagaccgagggccagaag

SEQ ID NO: 132 - DNA, 990 bp, Homo sapiens
ttaagacacgcgtcccaggtgtggatgtgtgggtgcttaagacagcagactgctgctttgctgggccaggcctgggtttatttattacaagcagttcaggaagcacagacatcacgttgttcacttgcttcactgatgaatgtaataattgttctcgttcatgccctttgcccctggtgtcggggctgtccacactggggaccattggtgcccccatgattattagctccctgaagcctggtgggtcgtcagggcttctgtccggtgtttaaagacccatcccagacaagcccaaaccacctcagtttgaagagacatagagggacaggcagacggggcctcagagggatccagcctcatccagcctcccggcaacctcaggagagcaggccagatggggcctcagagggatccagcctcatccagcctcccggcaacctcaggctggttcccttccagtgccgactccacagccctgctggttcccttccagtgccgactcccaggctgagtcgctttgcagcgtttgggacgtacgcagggcctgtgctgtgggccagccacttagtgcacttcctgagctcagaaacacgcagtggttcagcactgagtcatgcttgcttctctacgcactgatttgttctattccagttttcacgtacatcgttttggtgacatctctgcgttatcatttatttatatggagtgtattttctccaaaacttctctacgagggaatgcacctgctcattacagctgctgtctgtgtattcttcacggcaatggatcaaaccagactcacacagtcttagactaagctgaacactggaaaaataatacatgcttaaagtctgctgttattctaaaatgaaagatatgaattcaacaaagttgatggataactttctttgactgctctacctgaatttagactaagcagtaaatagtttaataaaagatcactttaatataaaaaaaaaaaaaaaaaaa

SEQ ID NO: 133 - DNA, 866 bp, Homo sapiens
ggcacgagtagagttcctctccattaaagggactgggggatggcctctgtgtttcttttgctttatcttgagcttttttgtcagccctttccctctactttgggggcctgcaaaagcagaggggctttattttgagaagtagcctcctgtataacctcgtttgagatagatttgggccagtttctggtgtctgtagcagtcgggttttttccccctaattcctgtcttttcgtttctgttttcttggtcatttacatcatttcaagaactagagaaagctgaaaaccaggttctggccatgcggaagcagtctgagggcctcaccaaggagtacgaccgcttgctggaggagcacgcaaagctgcaggctgcagtagatggtcccatggacaagaaggaagagtaagggcctccttcctcccctgcctgcagctggcttccacctggcacgtgcctgctgcttcctgagagcccggcctctccctccagtacttctgtttgtgcccttctgcttcccccattcccttccacagctcatagctcgtcatctcggcccttgtccacactctccaagcacattacaggggacctgattgctacacgttcagaatgcgtttgctgtcatcctgcttggcctggccaggcctggcacagccttggcttccacgcctgagcgtggagagcacgagttagttgtagtccggcttgcggtggggctgacttcctgttggtttgagcccctttttgttttgccctctgggtgttttctttggtcccgcaggagggtgggtggagcaggtggactggagtttctcttgagggcaataaaagttgtcatggtgaaaaaaaaaaaaaaaaaaaaaaaa

SEQ ID NO: 134 - DNA, 1280 bp, Homo sapiens
  misc_feature (1137)..(1137): n equals a,t,g, or c
gctcgtgccgctcgtgccgctcgtgccgctcgtgccgctcgtgccgctgttctatcctctgcctcccatcaggccctgtttctttgttcctttgttaatatcttgaatttagtccctccatccttaatccccccatccctccccatcatgcaaccagtggtttaatccatgtaccaataggggctagtaccacagaggcctcctgtggtgccctcgtatcataccacctgttcctgtggagagggaatgaccggcactgaaggtaccttacaactggctcatattatcagaggaccttggtcctttctaaatctctagtctctcttcatatccttcatcaggtgttttaagatgtctctgagaagccatcaaggcaaaagagaactttaagttccttgttccagcccggagttttgggaaagaaagaaaggaaaggtcacagtgacctaggattggaaccttcctgcccttttggcttgcagactgccttctatcccagaacagctgagaaatctatgaagctgagattctgaaggacccagcttaggttcttccacttaggcctcaattcccttccttttccaggggcagccttagttcccatggccctgaaacacacacatttcccccttcctttcccagaagccactggccccccatagcacccagtgcatcctttttacaagtggaagaactaggatggctttccaaagtcttctagaaatgaagttctttctctgtgcagctttcccccttggagcaggagtgaagatgtttcattatcttgggcctgggaaaccacttccccaggcttctccctccccccacccccataggaacaggatttggccttagcttctgggcctatcggctgccttccctctacttcctaccacctcttctgccttcctttgagctctgttgggcttggggatcttagttttcttttgtttatttcccagctcatttttttcttctggtcagtttttttaagggggggtgttgtggttttttgtttttgttttgcttctgagaaagcatttgcctttcttcctctcccaacataacaatcgtggtaacagaatgcgactgctgatttaccgatgtatttaatgtaagtaaaaaaaggaaaaaaanaaaaggaattcctgcagcccgggggatccactagttctagagcggccgccaccgcggtggagctccagcttttgttccctttagtgagggttaatttcgagcttggcgtaatcatggtcatagctgtttcctgtgtgaaattg

SEQ ID NO: 135 - DNA, 1275 bp, Homo sapiens
gcaactagtgacaagagctggtcgcaacacttagtaggaagcacagtggcataaggaaacctggactagtggggcctttatatctaaaattatgtattattccttatakgcagaatctgtaagtacgttatgactgctaatgacttttaaagcaaacatgttaacgatctttctatggtaaaaactgttatttggggacatcaccagatgatgtggacattcttgcaggtattttggcatacccaggcaagctgtcattggtgtatattccagttaacctctggagatgatcgtaacagtttacagggcctttccatttgggatggatatatcaagagggagacaaactggtccaaatcaccagaaagaaaatctcacagcaccgacttggcatctgtgttaaaaaatagcaactatatttaaaataaactgtacaacataaaaaatttaaattaaaaaatgcattaagcaagttgcctttagaaatgtgaagacattttaaaacactacaagataatgagcaagtctcacctacataatcatggctccacagacggtgccagtccatgcatccaccatttctcaacacctacaaagttttaagatctgcttggttcagatactgtccagccacagcagctccctctgctgtagagagcagcatattcagctttgcctttttatttcagatactgaatatcctttggcaatttcagatatcacagcaaaaaaaaaaaaagttccaagtgtttttggcaatcatattggtgatagtgtttttgttactcttaagaatgttatggtggaggtgggaggatggcttgagcctaagagttcaagaacagcctgggcaacagttgagtgactttgtctctacaaaaattaaaaaaaattagctgggtgtgttggtgtgcacccgtagtcctggctagctactccagaggctgaggtggatcacttgagcccaggagtttgagactgcagcaaaccatgattgtgccactgcactccagcctgggcaacagagaccgtgtctcaaaaaaaattgcacatataacagataaagtaatgataaagtaaatacgtaaagtaaatgagtaattatgggacattctaattcctcatcccctatgtctttaagaattaaaaattctcagtgtagaaggaagagtgtaatacagaattggttaaataaaaccctataagctttgaatttgaattggatatacaattggtaaaataaaaaccctatgagctttgaaaaaaaaaaaaaaa

SEQ ID NO: 136 - DNA, 1157 bp, Homo sapiens
ccacgcgtccgcttggcattggtttacctgccaggtgtgatagcagcaattgtccaacttcataatggaaccaagtataagaagtttccacattggttggataagtggatgttaacaagaaagcagtttgggcttctcagtttcttttttgctgtactgcatgcaatttatagtctgtcttacccaatgaggcgatcctacagatacaagttgctaaactgggcatatcaacaggtccaacaaaataaagaagatgcctggattgagcatgatgtttggagaatggagatttatgtgtctctgggaattgtgggattggcaatactggctctgttggctgtgacatctattccatctgtgagtgactctttgacatggagagaatttcactatattcaggtaaataatatataaaataaccctaagaggtaaatcttctttttgtgtttatgatatagaatatgttgactttaccccataaaaaataacaaatgtttttcaacagcaaagatcttatacttgttccaattaataatgtgctctcctgttgttttccctattgcttctaattaggacaagtgtttcctagacataaataaaaggcattaaaatattctttgttttttttttttgtttgtttgttttttgtttgtttgtttgtttttttgagatgaagtctcgctctgttgcccatgctggagtacagtggcacgatctcggctcactgcaacctgcgcctcctgggttcaggcgattctcttgcctcagcctggccaatatggtgaaaccccgtctcaactaaaaaaatacaaagagtagccgggcgtggtggcatatgcctgtagtcccagctgcttgggaggctgaggcaggagaatcgcttgaacccgggatgcagaggtggccatgagccaggatcacaccattgcactcttgcctgggcgacagaaggagactccatctaaagaaaaaaaaaaattagccgggcatggtggcgggcacctataatctcagctgtgtgggaggctgaggcaggactattgcttgaatccgggaggcagaggttgcagtgaaccaagatcacaccactgcactccagcctgggcgacagagtgagacttcatctcaggaaaaaaaaaaaaaaaaaaaaaaaaagg

SEQ ID NO: 137 - DNA, 1885 bp, Homo sapiens
ggcacgagtacaaggtggcggcgctgggcctggccaccggcatcgtcttggtgctgctgctgctctgcctctaccgcgtgctatgcccgcgcaactacgggcagctgggtggtgggcccgggcggcggaggcgcggggagctgccctgcgacgactacggctatgcgccacccgagacggagatcgtgccgcttgtgctgcgcggccacctcatggacatcgagtgcctggccagcgacggcatgctgctggtgagctgctgcctggcaggccacatctgcgtgtgggacgcgcagaccggggattgcctaacgcgcattccgcgcccaggcaggcagcgccggggacagtggcgtgggcagcgggcttgaggctcaggagagctgggaacgactttcagatggtgggaaggctggtccagaggagcctggggacagccctcccctgagacaccgcccccggggccctccgccgccttccctcttcggggaccagcctgacctcacctgcttaattgacaccaacttttcagcgcagcctcggtcctcacagcccactcagcccgagccccggcaccgggcggtctgtggccgctctcgggactccccaggctatgacttcagctgcctggtgcagcgggtgtaccaggaggaggggctggcggccgtctgcacaccagccctgcgcccaccctcgcctgggccggtgctgtcccaggcccctgaggacgagggtggctcccccgagaaaggctccccttccctcgcctgggcccccagtgccgagggttccatctggagcttggagctgcagggcaacctcatcgtggtggggcggagcagcggccggctggaggtgtgggacgccattgaaggggtgctgtgctgcagcagcgaggaggtctcctcaggcattaccgctctggtgttcttggacaaaaggattgtggctgcacggctcaacggttcccttgatttcttctccttggagacccacactgccctcagccccctgcagtttagagggaccccagggcggggcagttcccctgcctctccagtgtacagcagcagcgacacagtggcctgtcacctgacccacacagtgccctgtgcacaccaaaaacccatcacagccctgaaagccgctgctgggcgcttggtgactgggagccaagaccacacactgagagtgttccgtctggaggactcgtgctgcctcttcacccttcagggccactcaggggccatcacgaccgtgtacattgaccagaccatggtgctggccagtggaggacaagatggggccatctgcctgtgggatgtactgactggcagccgggtcagccatgtgtttgctcaccgtggggatgtcacctcccttacctgtaccacctcctgtgtcatcagcagtggcctggatgacctcatcagcatctgggaccgcagcacaggcatcaagttctactccattcagcaggacctgggctgtggtgcaagcttgggtgtcatctcagacaacctgctggtgactggcggccagggctgtgtctccttttgggacctaaactacggggacctgttacagacagtctacctggggaagaacagtgaggcccagcctgcccgccagatcctggtgctggacaacgctgccattgtctgcaactttggcagtgagctcagcctggtgtatgtgccctctgtgctggagaagctggactgagcgcagggcctccttgcccaggcaggaggctggggtgctgtgtgggggccaatgcactgaacctggacttgggggaaagagccgagtatcttccagccgctgcctcctgactgtaataatattaaacttttttaaaaaaccaaaaaaaaaaaaaaaaaaa

SEQ ID NO: 138 - DNA, 1031 bp, Homo sapiens
  misc_feature (1024)..(1024): n equals a,t,g, or c
acagcatgagcatgagctgtccctggttgggcacctgggcagtggtctgtgcttcacctagacaaagaaatgacagtcaaggaacagatgctaggggaggaaacagagctgaccagaggttacctgggcacaagaggaatctggaagagcgcacacctgctgagcaaacctaaggcagtgacatcagggtggaaaaaagaatacatatgcttattgttagtgttcaccaaaaaaggttcacagtgcgttgctctaaaagytcagttagcttctctaacacaaggtagatacagtgtgaagtgccaaactcagtttccataaaactttttacaagcatgtaagttccttattgactttttcaaaagaaattcatgtaggaaatgcatcctaactcattctatgatgccagcattmccctgatactaaagccagccaaagacactaaaagtaaagaaaactgtagagcaatatcccttatgaaggttgatgccaaaatcatcaacwaaatactagcaaatcaaattcagtagcaggctgaaaggattatacaccctgaccaagtacagtttgttcctggaatgcaaggatggttcgacacatgaaaactgatcagtgtaaacagaatgaagggggaaaaacacatgatcatctcaattgatgccaaaawaaaagcatttgacaaaattcaacatctttcatgatgaaagcactcaatatactagaaatagaaggaaactacctcaacataataaaagttatatgaaaaatctacagcaaatatcatactcaatggcaaaaaaactgaaatcttctcatctaaaatcaggaacaaggcaataatgcccacttctattcaacatattactggaagttctagctagagcaattggacaagaaaaagtggggggtgggggagaagaggcatccaaactggaaaggaagaagtaaaattatctctattcccagatgatgtgatcttatatgcagaaaaccctaacagttccacaaaaaaaaaaaaaaaaanactcgag

SEQ ID NO: 139 - DNA, 779 bp, Homo sapiens
ggcacgagatagaataatgcagtggatttctatcatgctaatttattttgctttggagcaggtacctttcctctatggcattattttcttgcatttctcataaaggggaggatgcatcccaactgaatggctcactggcatgtcttttatgtgttcagttgccattcctagctttggaaagtttctatctgtccatgtgtatacaagtcaatgccccatttttgtttttcttttaaccgaggtgtagataaggaaaagggacatttttaattacttaataaccggaaatgcagatgtgtaaggagaatgagaggaatgagttaaagtggttatgcatttttctatagatgagccattacagcaaggaattttacagttgacttctctgaacctagctttaccacagtgattaaatcctatttagaaaggggaatctgatttaaatgtgtgattccttgtatttgctcctatcacaaagatatattaaaggaggtatgccattaatgaaatccactgtcctgagtattatctttcctcctgttgtactttctcagagactatggcagaatatctggatcttccttggattttgtacacatattgtagtgaaatgtgtcctacatctgaaattgcatgggactcatgcccagcaatctggttctaggcctttgacacctgataatatgagagcaattggccagccaatagccataagcccagaggattttagagcttcatgtgtggcttttaagagcaggtttgaaaaaaaaaaaaaaaaa

SEQ ID NO: 140 - DNA, 3115 bp, Homo sapiens
  misc_feature (519)..(519): n equals a,t,g, or c
  misc_feature (558)..(558): n equals a,t,g, or c
  misc_feature (2101)..(2101): n equals a,t,g, or c
ggttatgggtatgatgtgctggtctcctcctctggataagatgggcaacagtgttaagggaattcacttttgtcacgatcttgtttctctgtgtaatttccataactatgataatttgagacactttgcaaaaaaacttgatcctcgaagagaaggtggtgatcaaagggtaaagtcagtgataaatcttttgtttgctgcatatactggagatgtgtctgcacttcgaagatttgctttgtcagctatggacatggaacagcgggactatgattctagaacagcactccatgtagctgctgcagagggtcatgttgaagttgttaaatttttgctggaacctgcaaagtaaaccctttccccaaggacaggtggaataacactcccatggatgaagcactgcactttggacaccatggatgtatttaaaattctcccaagaataccaagtcccagtacacacctcaaggagattctgacaacgggaaggaaaatcaaaccgtccataagaatcttganggattgttgtaatggkctccaaatcccaagatttaaatncacttacctatttaattgtggaaaatgattatgaagaacatgtgtatttctatctggtagtgatgtatattttacatttgtcatttcagtgttactggagttttcttcattgtgcacacaggacaaatctgatctctttgggaaaaaatagaaataaaacaatctccctccataatgtgagcaatattacctcgtgcattgtataatttgatgtaaaagaaatagttaccaatgctagcttgtgtggtcttccatgatttatttgtgttttgtgaattttcaatttatggtgatgatctgctgatatgcatttataaagtaagctctgttgtacagtctgtccaaatgggtcaaggttgcctttagaagcaaatagtgtgattttcaagacttcaaatacaaatttagtttaagtgtttgaacaactatatgcacttacggttgtgtgtttaaaatgtctctctcwcmccctagcttcatgatgtgactcttaaaaaactataatagttaacaactgttagtaagatagaccaattctgattagactttatcagggaatctgtttaagatatgtttggtgaccaaaacgtatgtgtgaatgtagttataatgcttttgaaaaattttcctttttctatatccccttagtccagcctctcttctcagacatttagctatctgcctctttcctttagctgggaaagtgagagctggcatactatgcagtttttatgttttccatagtaagtcagaaaakgcctcctatttctggcatcagaactttgccatttgtctacagaagacgaaccagagacaaaattactaagtataaattagtcaagtttatcagtctaaaaagcgaagggatgtgcaactgcagctctttaagaagtttttttttttagcttctagggtaaagataaattcagaaatgctctaagctaccaragttattctgaaagtatgggaactgctacaactaacaaacatttgtttccaagcctgtcattaagagtctgcatcaagagatttgtcctccttgggggaccactggatcattccagatttcttgtgatttttctattgtgtaattcttggtgggctctgtagtttaataataagaaaaaggccatttcattttaaattgtgacctataattctttgtcttgggttggtaattcaggattcatttggaaagtgggtaaaaggggcttcaaaaaacggatagaacaggattttctaggagttacacatacattttatcctgtcatacctcgagataaagtggcatgttagtgaggagttctgatattaagcacacacacacatgcacacaaatggacttctctgaagctgtgtttagtgaaatgagctcaagtacatgaatgttagttgttatcacatacagcaaattcctttttttttctttttctatgagcacactctgctgcttctaaactttacatgcctgatggcaccttactccagcagcctccaggtgctttcattttcacttccagtctaagccagtggctcctgccantgccctcccattacctagatggcacctcctttggtgaaaccacgggccaatgttccttagctgcaccaggcccgaagctgttcccatgcttgagcttccatggggaggatgctgagtgagcagtttcctacsccgtgggatctagcaagccatggagacaggtagcatttgtaagatgctgcacaggagcagcattatccccaaagatattacagggtagacacgttttaactgaaatcaatcaagataactttattcaaagagcagcccgctttgtgtgactaaaatgaaacaagacagttgaattgtgtgacttgaagattaccaatgattttgaggcttttctataataaaaagaggttctaaccattatttgggaacaaagagagttttcatcttttttcagatcaaaaccattctgtaaaatctttgttgtttaattaaatgtgccgttatttacccctgatgttatttatgactatgtgccgattcctgcttgggctgtttgctgttggctggtaataatatatttgatttaaatgctgttgactgtgctattaactgctgccgtcagtaaactccaaagatctttttgttttggctttagtatcatatgtgctttttctgtatcctgagcgctctatatgatcatgttaatttaaagctttatacacattgttgtttttgctggtctcatctttggtaatatgctataccccactgctgcccgacactgccctttagctgcagagctggattagctgttgaccatttgatgctgttgtctgtctggcagggactgaatgacctgatgtcagatttagattcttcctggggattacacagctatgaatgtatttgcttctaaaacctcccaaagtgaatctaatcttaaaactacaagttgtaagtattctgaaattgggaaacatttattttaaatgcaatcaggtagtgttgctttttacagcataataaatatatgtatcaaaaaaaaaaaaaaaaaaaaaaaat

SEQ ID NO: 141 - DNA, 1419 bp, Homo sapiens
ggcacgagggaaactataaagcagagcagtggtgtctttagaggaaactcattcaagtcagggcactgattttcctctcagtttattatttggggggatagggtcaggtgggtatagtagtactttaccagggtgcttttaagttactttaaaaaaagcctacaaaatattttttttcttttatttgctcgagttcacattaatgatggtcacaaggctgccttgttgggcaggcgtattgcccccagttcctcttctgctggcctgtatgacctccacagccaggccctgggcccaagccccttgtcccttctccactgcccctctttccagacagtaaaggccatggtcagtgtgtttttctcttgtaaacaaaccccagcttgtttaacagaaatgctaataaacctactggggaaagatggaggtctaaattacctccagggtttttctgggggtttatcaccagtgtgggtcccttctgataccaccaggttcactccaggcagagtggggcggaaggctgctgaggatatgggtcagttacagcagccctcacctcaaagggctggcctgcttctcagcctacattcatttgcaagcttcaatctctggaccatctggtgttcacaggtgttagagggttaggggttaggggccagttttggatttgattcataggtaggagggcttagattttaaggcacttctgaaagtcaatccctggacaaggcagtcatcacataagaacagctaccttctccacttggtggcacaagaggtagggaggggagtatgggttcatttggcttcgcattatgcaaggtgaaaccgtttgttttccctctccattttccctaactaaatgaaaaggacacattctgaaatcccttttgttggagaataagtcagtctgaggggaaatgggaggccagagatgagaaccctttgaaaagattgtaaaatactgattttcattctttcaagcttatttgtaaatacctatttgaatgctgtgtatttgtacaggaatttgagcaaaaaatgtatagagtgtgatgtccaattggtattcagcactataaatgtgtttttaacctcccgcattctgtgcttatttaaaacaaggaaacttctaaccatttcttttgtgtattcatgtttaaagaaaaaaagtgatttaaaaatgatcttacctgtaccagaaaagcaaagttaaaggaaacaaaatttgtaccattgtcccaagaggtattttactgtatatattgtggtagcatgttcaaaatccaacaagtaatgtgaattttagatgtaaatatctgccacttgattttttttccccctttccccacttccttgactgctgtgatgtgaattaaagataaatacgtgatactgaaaaaaaaaaaaaaaaaa

SEQ ID NO: 142 - DNA, 1941 bp, Homo sapiens
  misc_feature (499)..(499): n equals a,t,g, or c
  misc_feature (558)..(558): n equals a,t,g, or c
  misc_feature (1890)..(1890): n equals a,t,g, or c
  misc_feature (1938)..(1938): n equals a,t,g, or c
cagtatccaaccatcctctccattctcctctggacctcaccactctcagagctgcttgtcctggcagaatctacarttcaccccaactctatgccttacccctcccaacccaacagcatttgcagtttgcaaaatatacagacccaagtcctgaggggactgaggacatgatgctgggcccaagtctcctgctcagggcttctctccaatgccagccctgccactccttcctcaccctccttggagcctcctctgctgcttgtctatcccaacggccctgctcccctcccttcctgcccttcaccagctttctggacaccakgcmswgrgraagggacctttggttttytctaaacatctttraagggctgaggcagtcagggctggctgccttgtmactctttatttggaagccactcaaaccattcccaagaagagggaacctcasctggcaatctgggaaacctggcccaggtctgggcmgatgtyttcacttctncctaccttcccagttcttgtgaatcctgtgaatgagcaccaggatgggccctgtgggtnccctagaagcaccccttcatggctgtagggtcctgcagccccatcctttctctactgggccctggtatcctggctcctctctcagctctgccactgatctctgtgccttagtttacttctctgcacgggggactcaccccaagaccatttccagcagcttcccaggtgatgtggtgccccaaggctgggctttgccagctgtggcccagctccttagtgctgcccaggagacaccaggctgctcagaatgaggtgactgcgggcaccattctcagccagtggttcttgtattgcattccagcagcaggaatatcacctgggaacttgatagaagtgcagattagcagccccacccaagacccactgaattagagcttgtggagtggggccctacaagctggggttttaaggagccctccaaatgattctgacgcataagaatatgccaactgctgatctgggctagccattagtagagcctggggagggactgggactggctaggccaagaacaggtggaaaacaccagccttatctggactcctgagattgggaaccaccaccaacaaaaaccaaccctatagtcgctcctcttggaagaggaagagaagttgaagggcctggagaaagcacacattgtttgtttccctgctcctgctcacctctctcacttgtcttggttttacaaaaggctgtgtggatggtgccagccagggagggggtgggagtcctggggaggcaggaggcagaagaccctgactgtttctcccttgggaacctcaccataggccagatagcgcctcttcaaactgaaagaaatcttaactccacaaagaaagcatcctaaatccccagttcctcctcctcccaaccccagggataccttgtagacagtgccaaaaaacagctccaacccccagcagctgggaagagagccagaagctgcccttcctcctcatcctggcccctccccagcccccgccaatactgtgaacccccttcccactcagcctggtttcctggtgagggtcctgcagtcatgggccctgggggacccccaggcaaggcccatgggagggaagggaccaagggcatccttgggccaactgtccacctctcttgtccactattctctcctttccacttctgtcttcaaaaggctccttcctaggatggatcgggtgctaggacaactgcagtccaatccaccagctctccctgcccctgtgtcttatttcagacatgagaataactgtacagtgtaaacttataaagcgtttttaatggttgtagattggaaataaagtatgtcatatgaacagctgctgtggnaaaaaaaaaaaaaaaaaaaaaaaaaaaaaaaaaaaaaaaaaaaaaaangga

SEQ ID NO: 143 - DNA, 1236 bp, Homo sapiens
ggcacgagaatgaaacaacagatatgtgtgactccactgttagaggactctggaagcttatacctggtttcccccagactttgcctctgtaccttttctctttgctgttttgcttcatatgcttttgctgtaataaatcatagctgtgtgatgatatgctgagtcttgtgaattctcctagcaaatcatggaacctggaggtagtcttggagaccctggcatacaaagcagttcctaagtgtttactggtagctgtaggaataggcaaagaagaaacagcaaagaaaaaggcacactgtggtataactttggaggtttaccttgcaaaatgctcagatatttaacctatcagaggttattgtgcatataaaagagagtgatatactaacaactgcctcaggatatactctttttaatcagtattgtaactaaccttggcttatttcacttttagacttggggttctattttgctttaaaacatgtacatcagttttgttttttgttttgttcttttcttttcttttttttttttttttttttaaagacaggatctcactctgtcacccaggttgctgagagtgtggtgtggcccgatcttgacctcactgcagccttgacctctcaggctcaagtgatcctcccacctcagcctcccaagtagctgggactataggcacgcgccaccacgcctggctaatttttgtattttctgtagagacagagttttgccatgttgttgaggctggtcttgaactcctgggttcagacgaccctcccgcctcagcctccgaaagtgctgggagtacaggtgttagccactgcgcctggcctcattgtactccttaacacaagaagacttcaacaatgataagtagttgtttataaggaagcaggatcattaccaaaataaatcctgctaaaacaacaggaatcatgttttaaagcctagtttgctaatttttgctagtaggataagagtgatcgtaatatctcgaacattacatagacacttaaaacctttagttgtatttcatcaaaaatctgttcataccccacgttggtttcaaaacatactatgctttttcttcgtgttatttcctatattcatttttgtgtgtatgtgtatgtcacaaatattgatatgcctggttgtttatttttgttttctattatgcctttttcaaaatataaaaataaacttgtaatttctaactaaaaaaaaaaaaaaaaaaaa

SEQ ID NO: 144 - DNA, 1379 bp, Homo sapiens
ggcacgaggcaccactgaaattccctgtcaagtcccctggttagtgtctaattagtgtgtggctttaggaagtgggacaacacatttacatttttgcaggctgttacctgaacgtgatcgctgaatagcgtcagctgttcaaatagtaatgctgcatacaatgagaaatgtgagagggtgtgtgtgtgtatgtgtgtgtgtgtgtgtgtgtgtgagtgaaggccatttgttaaatggaacacctaaaaataccattgtttttgtttttgcggttgtcaggggcctcaataaatgcaagctggctcaggagatgcttgacctgagaggtctggaaagaccagattagaagtctcagcagaggaccaaacccagaccccacttctgcagaagttctgtacccaggtttccccactgcaggcataaccagcagcccctcaaaggccccagaccagccaactgtctttagaaatgcagacccaggatcagctttgctaccagccatggaatcttgggtcagtggcccatactctgagctgtgtttccacagtgcaaggctggccggacagtgttttatttcagagttctcctgtctgtggcatcttcagaagttaaagatttgcttgaccactataaggtgccctgggagtgtagacctcccacatcccagctgcctggctggcagtgggtggggagtaagcagtagagagaggacaggtggcccggaatctaacagcttgcctctggattctccctagtaagcttggaatgatgctggagcagctctgggccgaggggaccagtctaaggctggacgcaaaagactgggcgccacctagtctgttcatcaggtattaaatgccctgagttttcaaagctctggtgattcagtagtggacgggtaaggttcctgcctctcctggggcttaccgtccaggggtggggaggacgtcactatatgaaattatcttatttatagcttaatgtcattatttaaaaagggggagggaatcacttgacgggtgggcaaggtggggacggggttggatggaatggtcaaaaaaggtctttcagagttcttccaatcctgaactaactcacctgcacccttggcccaatcattttcactcccgagggtctgcactcctcgtttctacattctaggaagaaaaggggttggaccctcccctctttaagctgggttgggtccgaatcccgtgcttctttcacttcctgagccgggctggctgggtgggaacaggctccttgccgcctccccagcgctggccactaccacactgccgcccgcctgggcctcctttcaacctcgtggtggagccctgcggtttcccagcggagccgggcccggggctgctcgtgcc

SEQ ID NO: 145 - DNA, 1001 bp, Homo sapiens
ggcacgagcatggtgtctgatagtggctcaatttcagttttttttaaattgtttctgaggcgtgtttcaaatatttgactttttcccactggtctgaatagtgcttctcagatacggcaagtctctaggtttgcatgagtcagcctctgtgccctctgttcttttcccctgatgttctttttgcttcttcttatgctattaccacactgtcttaattactatattttattaacaaatctcactttctggtagaccatttccttcacctacttcttcactttccttcaggaatgtcttggatattgtaactcttttccttatgatttagcatcagcttgacaagtttaataaaccttgttaggactgagataaaattagaaagattggacatctttaaggtactgagttctcctagccaggaatgtggcacgtttccctatttctttagggaattgtaaaatgtctttttataaagttttataattttccccatagagatctttaaaatattttgttagatttattcctagcaccttatatattttgttactcttgtaaaaagtatcctttttttttttttttttttagaaacggagtctcgctctgtcgcccaggctggagtgcagtggcacgatctcggctcactgcaagctccgcctcccgggttcacgccattctcctgcctcagcctcccgagtagctgggactgcaggcacctgccaccacgcccggctaatttttgtatttttagtagtagagacggggtttcaccgcgttagccaggatgttctcgatctcctgacctcgtgatccgcccgcctcggcctcccaaagtgctgggattacaggtgtgacccaccgcgcccggccagtatccatttttaaaaactacattttctctttgttgcttgggtagagaaataaaatcaatttttaatttatcttatatctgatcattttctcgtgccgaattcgatatcaagcttatcgataccgtcgac

SEQ ID NO: 146 - DNA, 1378 bp, Homo sapiens
ggcacgaggtgggtgtgtgtgttcctaatcatatttttttgtgaaccaaagcaaataaaaaaatgctggtgttaagtccttatttatccagaaaaaaaatagcataatactaaaaccaagataacactaatgtgatgtgatgttcttgtaaaaagctaacctatttccaaaggcttgtgtgaaaaatcagtcttaaaattatactacaggttttcacatttttaaaaaaatcttcatttggggtgaggaggtgaaatatgctcttacctcttttatgaattaaatggaatatgaaaaatgctctaagtatatttcttcacatcttcctttcagtgctgtttttccgttgtgtgtatgcttgcaacttttcttgctctgcagtttcaaatggagtagttaaaaaatgacccttttatccagtgggtaaaggacaacttttacctatgaaacatttatttgcctaaattataagaatgcaagatttatatctgacagagatttaatcattgtctagcccttcattgtttagaaacacacaaaaattaagggtataggcagttctacaaaatgtcttctttaggtaaaatatgtagaacatctttatctttgtatatagcatctctgttgatatattttagcattaattgtttgatcattgtcaggaaatctaattagataagcctgtttctactctcatgaaggtattcaaatcttcgtatataatgaaatttttcactcatttattagctgttgactgatctgagaataaaataataaaaataaaactctatcacttatgtgggatgatgtcaaatcctgacacatcatccaccactcacagataactatagacataactcttataaaggcctcattatactatattagggcataaaaagaagccatttacctctcaatgccctaaagtataaaacttggacattcagaaaaaaataaataagagaaacacaatcccattctagcccagaattcctaaattgcaaatttgttttcagaaattacttttcattatacagttatttaatctttgatgactatgaagtcatgccatggataaaaaattagagaaaaaacagaaaaaagtttgtattcttataaataagtaaaaatgtaattcagcttgaccaagaatatctggattattttcatttttaatacagtaaactcaaagtaagtcatgtaaatgaaagtctgtttttattacctcctcaatcaactatctttttcaaggtgttaaccttgcagtccacttcaataagaaaatacatcaaccaaactactctttcacctgtggtaaatatcagccacatttctaggcaagctcgtgccgaattcgatatcaagcttatcgataccg

SEQ ID NO: 147 - DNA, 1316 bp, Homo sapiens
aggaattcggcacgagctttgactcccctcctttctaacagaatgttgccaccactgcttgagtgggctgtgtttgttcctctgtcccagcttctgttgtagaaaataacattgttaggggaactcaggctagtgtcagcgtcttggtttggggagaaaaaattaaatgtttcggtttttgtttcttttgctgttttgtttttaccttgttactttatcatattgactttagggtcaaaggcaacatcagaagaagtcagatatgtatagtgacattccaggggtggggaaggtgtagggatccagggttctcccggtcttggccacaggcacaatcatcaccttcatcgttccagattcctggggagaaaactgagaagatcgttacctgccagcctcatacagagcaaaagctctgtcctcagggccaagttctaaccactgctctgtagaccttctctgcaatcaagtggcctctaaggagcatgcctgaggacaaataactgtgcctcagtttcctcacctgcagatggggttatcaaataacacgaagtgtgcagcctgacctgtaggaggtgtgagtgtgttcccaaactaaagccccaggctgccatcatttacaggcttggcttgccccgggcccctcacccccgtttctgaccatcccaagtctctctgggacaggcaagtcactctggttctttaataagcttggaggtgttgggaagcttcagtggtactggccaggccaggaggaatcaggccaccagggctccatctctatcctgggatagcattcaccccactcctcctcagggctgaccccgactcatggcccctttaaaccctgaaggccgattctgccccttcctctgttatatgcacaactgaggaaggaggtaaaagtgggctcctaggtgagcccaaagtctcctgagagataagggaaaagaattggactgtaggtttaaaaaagttgctcttggccgggcacagtggctcacgcctataatcccagcactttgggaggctgaggcaggaggcagatcacctgaagtcaccctgaccaacatggagaaaccctatctctactaaaaatagaaaaattagctgggcgtggtggtgagtgcctgtaatcgcagctactcaggaggctgaggcaggagaatcgcttgaacccaggaggtggaggttgcaatgagccaaaatcgcgccattgcactccagcctgagtgacagagcgagactccgtctcaaaaaaaaaaaaaaaaaaaaaaactcgagggggggcccggtacccaattcgccctatagtg

SEQ ID NO: 148 - DNA, 1738 bp, Homo sapiens
ggcacgaggggagagaaaggagacctgggtctcccaggaagcaaaggggacaggggcattagtatcagtgacaccagcaatgtaggttcccagccccttcccagtggcagcttgtgtgtccaggagataggacatcatttaacgcatcagcaaagtagcagcagatgccacatacagagtagagcgaaggcatttggtggatcggtcactagagatctatcttgcagaaagtatgtttttcctcataaaagtgcctcttaattggccattgtaccagccacttgtcctagccaaatgtccaaaacacgcccttgggccccgccacgttacaatccacagattgtctgtctgagtcgtttaaggcatttcctggtgcttgtgttccatgaataaaaggacaaagtcagaagatcactgatgtcttactgtcaacagagatattttaaaagagagaagcaggaaaagatcttcctttttttgatctacaacttatatagttttctgattatgcacataatagatatgccttccagatgcataaggcaaacatctggaaagaaatatacccaaatcttagcaggggttatctttgggagtggagtacatgggattttgctttcttcatttttataattttatattactgtcttggaagatgtgtttatgtgtgtgtgttacttttacaatcaggaaaacatatttaataacatatagtcaagaaaacagacttaaaaataaatactatgtgtccattgagaaaattcacaatataaacagaaatacaaataaatacatacacaattttaaagtcacctgtagccctacccttagaggtacccagggttaacattttggtggtattgtcttatcaatttttccgttgatacattcagcaaatttggagcacattgaccatggagttttgtgtccaaatccaatctgaatttacctggaagaggccttgacacctgcatggaaatgagctaagaaaaccactggagccttgggagctctttggcctcctggctggcccagtaatatctgagctcctttggttaatttataactgatataaaactacatcttctttataatataaattgtacctgtgagtctagaagctttaaatgtgtttaaattaaaatattcaagctaaatgttactgctctctcccaaattctgtaagtttgactcccgttaccccaattagaagtaacttctttgtttcatgccacttttatagcatttggtaattctgctataacacatcttgcccctattattaactgtgcacagtacacaaaggtgtgcctttacgtgggaacatggattgtgaatgactctgtaatgaggcctgagtattagttatctttccactcactccccgttcccctttccaaccccaaaggctcacgataggggctcactaaatgtcagtgtttcaccaaagtattttttccattgtattaagagtccagtcactgtatatggaagtattttattttttatttttttatatcacttgagtccactagtagtacttccttgctctgtttgacttgtcagatacaaagacacgggattagattttgggtggtaaaattgtgatacgcatggctgttgatggagtggaacatcttagtgatgtgagaaaggtcattttagttataaatgtaaaccaattactttagcacaacaataaagatgttctggaaattacaaaaaaaaaaaaaaaaaa

SEQ ID NO: 149 - DNA, 528 bp, Homo sapiens
  misc_feature (106)..(106): n equals a,t,g, or c
gaattcggcacgagctcgtgccgagagtgcagagctccaggaaagggtatcagagctgcagccagctctgccctctaccctagggaggccagaaagacacaaacancctccgggcctttacgctggactctggcttggcaggctccaggcagggtcctctgggaagttactctagaaaacgaagggaggaggagcacaagatcctcagcaacgaacacctgcacttagaaaaagtggacagcttctgccaaccacaccctacccatggtactgtatgctattaactcctggaaacgccccgtaaatgcgagttgtttttgtatttgtgtgttgagatgggccttgtggtttctctgtactcagagcacatttcttgtaattactattgttatttttattgtcatgactgcccctgagctctggtgagaaaagctgaatttacaaggaaagggatgaagttaatatttgcatcacataattatatcattactgtgtaaaaaaaaaaaaaaaaaactcgaggggggggcc

SEQ ID NO: 150 - DNA, 778 bp, Homo sapiens
ggcacgagatttcttgaatgaatttcacatttgtaactatgattttggcagaatagaagattggctcatcagtgaagcgcagtatcttagctctagattctattttcatgcatcacagaagtgctatacggttaggtctgtttgtgcctcagtcaagaactaagaaatagtatgaattgtaagtcaagatgggcaactcagatggagcagcttagtctcacagtttgcttgtctatttattttatttagtgccaaatgtattccattttaaaagtaagccagagtgagtcaaggcatatacacactttctcacaaaacttcctaaacagatttgggggtttaatatgtccaactcctcatgaaatatattcaatccacttaaatatattccatctttttaacataaaatgtaaagcttagcacccatcattaatttatgtctctgttttatccagtggttaaaaaaggattctgcctctttagtcctcactgttaaataaaacccaatcatagtaagtgattaactagcaaaaagtaaagctatttatagcaaatttctagatcattagaaaagcactggtagttgtacaatatcagtgttgactttgaacttctttaacgagatcatgaattcttttcccttagccaaaacatgaaatatttaacctagttgtctctaaaagttttgtaatcatgagttagatatatgtcatctcctattcattgcttttatgtgatcaataaatcttttacaaacccaaaaaaaaaaaaaaaaaaa

SEQ ID NO: 151 - DNA, 594 bp, Homo sapiens
  misc_feature (587)..(587): n equals a,t,g, or c
ttgaataaatagggaaaggggaaaaactggaagggggaatcattaggacccagctgcacagacatttgcagctaaaggagtggagatccagacgatctccgtgggactgggagcagctgtgtttaggattgacactgggggaacaggcagagggaagcatggtcttggcattggcagttttcacattgttggcttctgtctgttgccagcttcattctcattctttctatccttgtatgtcctgtttttactcttcattgtcattttagtgggtttccaggaggcagcagtgataaactgcatgcgtttagtatgccatgttttcctggagatcccactgactttactttcagtaacagtggttttcatttgccaactctggtgtttccccaccatgcaggtaagatagttaggctctaaacctattgaaatctggggttttcattttcatagggcacttatttatccttattcatatatgggaagkttatctctctgtgccaataggcagagtttttggctcatttttatggagtttttagctctgtgagagaacttgctttatacaggggtttcacttcaaaatntcttcct

SEQ ID NO: 152 - DNA, 1589 bp, Homo sapiens
acgcgtccggcggggcgaggaggagggtgggtatgaggcggtacggaccgcggagtcgagacctacccgaacgacgcgggcgagcggggctttggacgccggtggagacgcaggcgagcaggaagaagatgagccttaggtctgaacgccgaggaattcatgtggatcctgtgcaagaaaggatgtggttactgtggcaaccctacctggcagggtttctgctccaagtgctggagggaagagtagcacaaagccaggcagaagcagattcaggagtactgggagctggtggaacgactccagcgggaggaagaagaggcctttgccagcagtcagagcagccaaggggcccaatccctcatattctccaagtttgaaggaaagaaaaccaacaagaagacccgcaaggttaccacagtgaagaaatcttcagtacgtcttccagggtcggatcaaagaaggatattgaaatggattccaggcgtgtgcctcgagacaagctggcctgcatcaccaagtgcagcaagcacatcttcgatgccatcaagatcacctagaacgagctggcgtcagcagatgacttcctccccaccctcatctacattgttttgaagggcaacccccatgccttcagtctaatatccagtatatcacgcgcttctgcaatccaagccgactgatgactggagaggatggctactatttcaccaatctggtgagtaagtgagttcttggcgttgtggagaaggactaggaaggtggtggttttggggatgtgataggtcactcaggcccatgacaggtgaatgcttctgtgtgagaaggcagcacggctgaggaagctcactttgcatcagggagcacaaggaccaggccgtacagacactccgcctcccagcacttgatcagagattgtgtttatcctacagaaacagatgacatgtgttgggcatcactccccacggtcctgggtagaagagtccttcacttggcagggctttttcaaccaatgaataaggcaaattatatataagttaataatgccatttcgaaccgagacagatggcagctaaatgaagtttaattaaagaatgagtgctggggccctttttattgggtactgcatctacttcgaccacaaaagacgaagtgaccccaacttcaagaacaggctttgagatggaagaaagaaacagaagcttgccaaggagagagctgggctttccaagttacctgaccttaaagatgctgaagctgttcagaagttcttccttgaagaaatacagcttggtgaagagttactagctcaaggtgaatatgagaagggcgtagaccatctgacaaatggaattgctgtgtgtggacagccacagcagttactgcaggccttacagcaaactcttccaccactagtgttccagatgcttttgactaagctcccaacaattagagaattctaagtgctcagagcttggctgaagatgatgtggaatgagaaacaaatgttaacataataaaatctcagttaaaaataaaaaaaaaaaaaaaaaaaaaaaaaaaaaaaaaaaaaaaaaaaaaaaaaaaaaaaa

SEQ ID NO: 153 - DNA, 1302 bp, Homo sapiens
ggcacgaggtctgtttgatttttaaaaggaaaggatttgtttcagattatacaagaataaaagtattatagacccaagggacttcttatgaggtcaaattcagatatttatatgaatatgaaataccatggtccctagtagtcagttgaagtggcaatgtctaaacagaaatgaacaaaactaatgctagcaggttaaaatcaatcaaaatgtttaaaaattgattctgtcctcagcatgttacttcctcagctctgataatttactggtcttgagtattttgagaatttgatgttgaacgttataaagtcaaagaactgcttgtttagatgaggtttatttttatttttgatattattcattcttgtcacacatcaagaagaaaacactagagtgctgctggaattccaaatctgaagaattctaacgactgcattctttgttattaaaaagggcacaatccttcctttttatttggcagtttaatttcagtaggaagcatgtcacatgtgcactgttggttagaattatgcatctgtcatgcctgactgctgaaccctacctaagccttttggcgcagtttaaaacttatactggtggactgtgaacctcaaaacaaatgggtatttttgggttttgaggatagatgttactccttaaagtttgtatttggggcatgaaaaactactgaaagaagaaaagtgctacagatactacatttcaaagagttggcattttccctttggccactcaagcagcatttgatgtatctaaagaaacaaagtcattgtttattttaaaaaattatatgcagttgtacaagatactacattccattgaaatgttggctatgtcctaaccaggcaaccagataacaaaaacattttgagtcttttatctaggtagttctaattattcagctacttagtttaacaaaggaaaatatcctgacttctctcatttcatttgtagacttttcattgtataggcacaaccaaagagtcagactggtttaaaactccagaaggaaaaaaagtatcccacacagtggatgttgtttctaagaatgctacaaaatcctgacatctcagacatctcaatgttaaaggaagaaaaaaaataccttttcatttcaaagaactaatatactttgatattgtgtaaaccttactcaagtttattgtcaagctttaactgcctttttagaactttttaaaatttcgagcccacaaatctattgtattagttgccttctataacaataaatcttcactgagcaaaaaaaaaaaaaaaaaaaaaaaa

SEQ ID NO: 154 - DNA, 1547 bp, Homo sapiens
aggaattcggcacgagtagagagtgatccccagcaggtggtacaccggagtggcattaaggggtgaagatgtcccccttacggagcagaccgtgtctcaggtgctgcagtcagccaaagaacagatcaagtggtcactccttcggtgaagacctcactgttcctggctcttcatcctcttcaaaaaatttgcatgtctgctgtgaattttcatctagttccccaatcgatgctctcagggtcatctcggggatcacagggatccttaaatctccatgtctgtttgtggttgccccctcaacctcccctacacccttcctattctttttcattcttcttgcagttctgggagtaaagctcccagcatatttagataatagggcaggggaagcaccctctttctttctagactggattatgctcacatgctcccttgccctgacatttttgtaaattctgtgccttttgctgtagctacacttcagattaaagtaggagaaagaatgtgctgagtgttttcctccctttgcctctacctggccctcatcccaacagcccagcaaggggagagagaaagagaattcttttctatagaacgagtgggggcggggatgggtagggatttatccaatctaagccctaaccccacttagtgacctcagtgttttcttccattccttcttactgccctgtcctctgccttggaagaggctttgggaatagttcatagggaagggacaacatggaagaaacagcgatttaaattgtattgaacagggcatataaaatgcattctgtaccctgatctggcatatagcttcaaaactgcagtggcgagtgtccatctcttagttagctaccttaactgtccacccttactacctgtgggatcgttgcctggtttgtcttctctgtgtcctggagcaaagccagttcctaaaactaaaactccattctagtcttgggaagaaaagtttctactcagaactggggaaggagtggaacttatgacttgggcctctaggctgtctctgtcccctcagctccccgacatgcatttactctctgccgtgggtctgcagtcgctgcaacctaccctctctctgcctcagccttacacccaagcagtaggtctgtgctctccctgtctctaggtcgctgagagaggtgcttttcttcataaaacctttggggtttggatttccccaggaagatggagaatggaatactcactcttgggtctaatctttccccttgacccagaacttcctccccacaaaaatgcctttaaaaaccttcctgagacttaagcattctgccccacttactaactgccagttctccagcactgaggtggggcagataacggggcatatttaagggggcatctttgtgtaaaagatgcatggagtcaggagaaaaccaccttcataaactgctctgtgcaaagaggaataaaacattttttccaaaaaaaaaaaaaaaaaaaaaaaaaaaaaaaaaaaaaaaaaaaaaaaaaaaaaaaaaaaaactcgagggggggcccgg

SEQ ID NO: 155 - DNA, 2632 bp, Homo sapiens
ggcacgagctgctggccaccgtcaccgagttgtcttttgacatgtggggactcgtcagcgccctcgccgccacgctgtgcttctcgcttcagaacattttctccaaaaaggtcttgcgagattcacggatccaccatctccggctgctcaacatcctgggctgccacgccgtcttctttatgatccccacctgggttctggtggacctctcggctttcctggtcagcagcgacttgacctacgtctaccagtggccctggacgctcctgctcctggctgtcagcggcttctgtaactttgcccagaatgttatcgccttcagcatcctcaacctcgttagccccctgagctactcggtcgccaatgccaccaaaagaatcatggtcatcacggtgtccctgatcatgctgcgcaacccagtcaccagcaccaacgtcctgggcatgatgaccgccatcctgggggtcttcctctataacaagaccaagtacgatgcaaaccagcaagccaggaagcacctcctccccgtcaccacagcagacctgagcagcaaggagcgtcaccggagcccactggagaagccccacaacggcctcctcttcccccagcacggggactatcagtacggccgcaacaacatcttaacagaccacttccaatacagccggcagagctacccaaactcgtacagtttgaaccgctatgatgtgtagagtccaaaggacaggaccagactgttggtgactccttccccggcccccacagcagtatcagaaacttctgacaatcagtgaatgtacaacccagccgaggggacggtgcataactctccatcagaagccctggggttcctggccccccgtgagccgcaggaggatgcgttgcctgcagtgcagacggccgtgagctctgggcaaacctaaacagagaccagtgtctcatgctctttcttcctggagtctgtcatctgagggccgtgtccctgcggagatcttggcacgttgtacctttcatgtggaattattccccaagcagtgttagctcagagcacttgtgtctgcattccagataacattcaggacctgtgtgaaaagctggggtcactgtggctgtagaccatgaactggcagtgggggtgtccagggcggtgcttgagaacgtcagactggctagtttaattccctggcgcagatacgcataggaccaacagggtcaccaagcagacagggagcccgcgagaatcattcaaaacatccccagccacagagatggatccagtttcctggtcatccccttagcagttcacaagttcctggcaaatgttccaaagcaaaaagcgattgcaattagcatccagttcctgcagcctggtgctctgccctgcacgtcagggttggcatccacccagatccagatggaagggaaacttctctcttctcctttgcctcctcttccctcaccagagcagggcgcttctcttggggtggtgagaaggatcttcgagaaatcgtgttcagtatttcaagctctatttctgtggcacatgtcttttgagaggcatcttcacctcttctgtgatgacttggtatgttgtttggtagatcttgattttcggaggatcttgcatttttctagggaatattttgtagttgtgtgtgtgtgtttttgccttggtccccattatgggatgcattaggactggcctatgcatcgaaaatctttttgtttgtaaacgtttaaaaacaaagttccccggccaggcacagtggctcacacctgtagtcccagcactttgggagccaagatgggcggatcacgaggtcaggagttcgagaccagcctggccaacatggtgaaaccccatctctactaaaaatacagaaattagccgggcatggtgtcgcgtgcctgtagtcccagctcctcaggctgctggggcaggcgaattgcttgaacctgggaggcagaagttgtggtgagccgagattgtgcactccagcctgggtaacagagcgagactccatctcaaaaaaaaaaacaaaacaaaaccaagttcccactggtgatgcctgtctgacacgttttggtatttagtaggaaatgaagtgtttcgaagcttcgagagaagcttcaaaattgtcacaattgctgaaaacagaatgaatcgtgaacattatctcaatattttgtataatagacaagaccacagtgttttggttccctgacctgtttttgtgtttatgttaggatctgaatcatgttctgggtaaggggacgaggagcgaacactgcactaagatttggtttgccaaatcagattctttggtcaagagtcagtttggggccaggcgtggtggctcatgcctgtaatctcagcactttgggaggctgaggtgggtggatcactggagtttgagaccaccctggccaacatggtgaaaccccatctctactaaaacaaaaattagccaggcatggtggcacctgcctgtaatcccagctacttgggaggctgaggcaggagaatcacttgagcccaggaggtggaggtttcagcgagctgagatcacaccactgcactccagccttggtgacagagtgagactctgtctcaaaaaaaaaaaaaaaaaaa

SEQ ID NO: 156 - DNA, 1816 bp, Homo sapiens
agaaagtacaggaagccgttcttgacaaatgggtgaatgaccctcaccgcatggacaggcgcttgctggccctcatttacctggctcatgcctcggacgtcctggagaatgcttttgctcctcttctggacgagcagtatgatttggctaccaagagagtgcggcagcttctcgacttagaccctgaagtggaatgtctgaaggccaacaccaatgaggttctgtgggcggtggtggcggcgttcaccaagtaactctgctcggggtgaaccattctcctttctctcaagtaaaccagtagtttttcttctgttgacttctggttttctgtaatttgtactttcccacactataattggcttctgttttacaaaatggtgggtggctttttcttttttgtacgtgtacaggattctgctggtacgagaggccttcctctttctgtttttaaaaaaagttttactgccatattggcattccattccctgttgccatcctcactgttacctgttttgggtttctggtctactttgactttcaaagtacctccagcctcctcatacgcacagcttttggatgactcagcttgagtttctccatatgtgcatgtacatctagcatctgcctacagttcagacagaagtcacaaaaaggccttcaactcaccaaaggtaaatatctgtatctattaggacatttttttacatagacttcagttgagatgtataattagcaaaattatttttaaattgaaacagcacagtaaatacttaatataaaatgtcccttggattttgcttcccatgtaaatctattgtattattacacttgttataattttaactataaaggtccaattgtttcacagagccagtttgggatgggctgcattccatttatgctgtatatagtttgaattatatataaattaccccttcttctggccacccctgctcccatcttagtattttgcaagatctaatcagttgtacacctggtgcccctcgcttgcttcaatcatggttatttgatggcaaaatcgacctcttgtcgctgaaggagagagaaaagatgtgtgtctgattggtcctgggattttttgagctgtgccatttatggtactctttgcctatgcatcccctttttagattttttttaaattttatcttactgtttttataatttctattgggaagaggcttgtgaccagtaccaatcttgagtttctttttctgtccacaagtaaattaatatctgctctgaaatgtcatttatctactcacacattcttggggaaaaaaatcaaatgtcagtcctagcagatgttgcatgtaaattggtagcaagtaatgattacaacccagaggattaagaattttgtaacagaaagctctatgttttaattttttatatacaattaggataattagcattgtcagactataaacctttgctttttaaagtttatttttactatttctttatcactttattgtatcatcaccattggtttcataatgtaaatactatatgttgaacaaattaaatgtcaaaattttttattaccatagtccatgttaatagtggggctttcaggtgtttagagattttttttgttgttgttaacattcattgcaaaagtactagatggtgtataactctagagttgaattttaagggattccctaatatgtatactatctttttatctgaagtaataaataaacaatgatcttgaaagtgcctgaaaaaaaaaaaaaaaaaaaaaaaaaaaaaaaaaaaaaaaaaaaaaaaaaaaaaaaaaaaaaaaaaaaaa

SEQ ID NO: 157 - DNA, 575 bp, Homo sapiens
ggcagaggcttttgaagttaatccttttgtgtgatacaggatgaacttgggatgtttgaaccctggacattccaaataaagaataggcccctgcctggctcctgggagataacctctaagccattagaatatcttgcctgataagagtgtttttgtttacctgtgggccttgggccatgcagtatcagcttgaccttgcaaggtcaagctgaggagactaagttagccatgtgggcagtgaagcatgccaatgtgatcaatccctagtaaaagccctggacacctaggcatgggtgagctactctggttggtaatactctgtgcacacatcattgtagccacacatcattgctgggagaattaagcattatcctgaagactctgccaggagaggataattggaagttctcttggaccttaccttatgtgcctttcttcattgctgattttaatctgtatcctttcactgtaataaactgtaactatgagtgcaacacttaaaaaaaaaaaaaaaaaaaaaaaaaaaaaaaaaaaaaaaaaaaaaaaaaaaaaaaaaaaaaaaaaaaaaactcgag

SEQ ID NO: 158 - DNA, 1584 bp, Homo sapiens
ggcacgagaaaattttataattatgataggactcctagctcttataagaagtggcctttataatgccacctttagtacttttcagcattctacaggtggacaattcaagaactatatttgtaaaataatgttttaaagagagccaacggtaaaggcaggaaatcactcaaaacattttgtatgttccagagactactcaaatattaatcctgttttcaggagtaacttcgtaggcgtggaaaagatttttgtttatttagaccaattcattatttattaacttcattcaataaatagttacattgtacctactacatgccaggcactatgttagtgagtttgttcactcagtcagccagctctgtaacatggaaagaaatgggaacaatttcacctatctcatagccacctgaaatagctcagcatagatagttttctgttcatttgcttctcaggctgttccctcactcactcattcactcattcatttgcttattcatcaagtacccattgagggcattctgggtgctgaaccctgtgctgggtaggcactgtgcgggtgtgagttgtgttctgaagggtgaaggctgaggatcttgagagcccagaggagggatccagcccgacccgagggaccaggaagagtggtctggaaccagcaccctttggacctaggctagaggccgagcaggaaccattgaggagagaggcaggaggtcagtggcccaggcgggaaccctcacacccaagccccaacatttttattttgttttgggaaatgtataggattaaagtaataactggaaaggaaataaatggaaacatggaatggaaacatttcctattttccctattgttatctgaagacaaacttaatttttatgttgctactttctctcttaaatatcctcttactaaatagtctgttgtattaattagactgggtagtcctaactcaagaaagcatttggcaattaaaagatggaggactcagggtctgaccgttttccttggccttcatttggctttctctctcttttctcccctccttcttcccaggcctggctggctggtgcctggacaccatttggggctctgagagggttgtggctgccacccccagtcccaatgcctggtcaggcactcgtatcccctgtcctgttcaccatttctcctttctcattgttctcataatttgtcctgcttaaaactcctaggttctaagggacacccctgcattgcttgcctttcctttgctagacaccagagagaggctaaaaagtgaaatgtggcctggtgcagtggctcatgcctgtaatcccaacactttgggaggccgaggcgggcagatcacttgaggtcaggagttcgaggccagcttggacaacacgacggaatcctgtctctactaaagatacagaaattagtcaggcatggtgacccatgcctgtagtcccaactacttgggaggtaggaggatggcttgggcccgggaggtcaaggctgcagtgagctgagattgtaccactgtactccagtctgggtgacaaagcaagaccctgtctcaaaaaaaaaaaaaaaaaa

SEQ ID NO: 159 - DNA, 1838 bp, Homo sapiens
aattcggcacgaggtcagaaatgattcagggttatttgaggggaaaaaaccccatagtgccttgattttaattcaggtgataactcaccatcttgaagtcattgtccggtttccgtagcagttttgaaaccttagtacctttttaacagcatgtgggtgtcagtgtcattattagtctcctaataagttcctctgaagactgctatcagtctcttggactggaggtacaaataatttagaaataaaagatgataacctaacactatcatagttattaatgtgatcctaaaattgtttcctaaatcagcatttttctttagtcatttaagaatttaccagaaatatttgctcaatatgatcttgatattcctacaaagaaaaaagaaggggtagggatttggctatgccttcactacaacattagaatattgtaactcacatgccttctaaacgtgaactaagatttcctttggcaatatcatattctaaaagtaataaattccaatacaagttacatacatttaaaaaacattttacagattttatggtactaatgaaatttacagtgatagaacaaaagaggattagtagaaaatacattattagaatataaaaaatgttattactgaggaaagggaggagaggacaagtgtaataaatcaaaattgacctcaaaagaaaatgtgtaacagagttgaggttgttaaaacagaaaaggttctgaataatgaagattaacctaatgcagaattgctaggtaaagaggtcaggggaatgctaagccagttcttaagacttctctgtcctctgctttgctgttatccttaaggcatatactttgtctttctgcagaaaattctacctggctacaattactttgaacattaatgttgaaaaagaaaacaaccaaagaaaattggtacttacccttctacaaaagaagtgtgactagatatcaatcagtaattaacatatcaaggagctcttctagctaaatgaccatccagtagagatttcccacattcccatgaatatcaagaatagttgtcagaatatgtatgtacctgagcatatgtacacagacaagggggatgttgtggaatatggcaatagcattgttcttctcccctttcaaattgcctttcttgaccttatgccattccatatatatctgagttgtgcctcatttatttattggcaatacctagtgatacggatttagctaacaaaagatatgaagaactattatattgaggcctgtcctctacataccacacttaaaagatggtgaactgtgagtactacttaggttgacagcaacaaagcataagacaagccccaggtaaacgtctaaactgtttactcacattgtcctactccagccccttcaattatttcccatctccacaaatagtcgggggaaaaaattaaaattttcctttatgattcttactgttcttcgcagctcatcttttcctgcttagaattaaccattgctaatttaaaggagcagctagctgcttttctgtcagtctgaagcgtagtagtggaagaggtagtaagcaccagctgcctctttgctgctttgttttcctcctgattctcttaaatttgggttgcaaagctatcccgccccccaccctgccccatgaaacttgagcattcaaatgaagattcagcagtgtctgttcttcatttctatagccaaagctgttagttaaaatcccaaatctatagcatttaaagataccaaatagaaacaccttccagctttaaaaaaaaaaaaaaaaaaaaactcgagggggggtcccgtacccaatcgcctgacatgcatcgta

SEQ ID NO: 160 - DNA, 1444 bp, Homo sapiens
actgttcagtactctaggaagtgggtcaggcaccttgggggcccaacgctgctccgtggggatgtctgcctgcctgcctggttctcttttcctgctgtttcctccagcagggaggtatcagaggcggggacacccaagtaggcctggcatgggcagaaaggaggtcacagctaaggcggtagagtggggttggcaccagccacttgtctgtttcccttgtggatcttagcctgtcgtctcccaaccccagctgcccctctgtctccccgcagctggtaggtgagtgctgtcctcggctcactttcctcaagctctccggctgccacggtgtgactgctgacgctctggtcatgctagccaaagcctgctgccagctccatagcctggacctacagcactccatggtgagccctgtgtcccaaggggccctgaaaaaacccaggccggggtgacgggtgctcttgtattggggccccaggtggagtccacagctgtggtgagcttcttggaggaggcagggtcccgaatgcgcaagttgtggctgacctacagctcccagacgacagccatcctgggcgcactgctgggcagctgctgcccccagctccaggtcctggaggtgagcaccggcatcaaccgtaatagcattccccttcagctgcctgtcgaggctctgcagaaaggctgccctcagctccaggtgctgcggctgttgaacctgatgtggctgcccaagcctccgggacgaggggtggctcccggaccaggcttccctagcctagaggagctctgcctggcgagctcaacctgcaactttgtgagcaacgaggtcctgggccgcctactccacggctctcccaacctgcgcttactggatcttcgtggctgtgcgcgcatcacgccggctggccttcaggatctgccatgtcgggagctggagcagcttcatctgggcctgtatggcacgtcagaccggctgactctagccaaggagggcagcccctttttgacccagaagtggtgccatacactgcgagaactggacttgagtggccaggggttcagtgagaaggacctggagcaggccctggctgccttcttaagcacccctgggggctcacacccagccctgtgctctcttaacctcaggggcacccgggtcacaccaagcactgtcagctctgtgatcagcagctgcccgggcctgctctacctcaacctggagtcctgccgctgccttccccggggtctgaagcgggcctaccggggcctggaggaagtccagtggtgtctgtagcagctgctcaccagcccctcacccagctaggcagccacagacctgggacacctcagccagcttgcccaccctccacctttgcccaatttcagatatttgagcattttgttaaaataaaacatttttaggaaaaaaaaaaaaaaaaaa

SEQ ID NO: 161 - DNA, 1277 bp, Homo sapiens
ggcacgagctttaattcaaaaatgtttgtagttaacattattttgatttcttcagttgttgcttggaatgtttttatactgaccaagttggtatgtgacgtttatttttctctgactataaaagtaaaaaagaactgaaaatacccaaaaagtaatgttttatagaaagtctcccattgatttaagaagttatctattagattgatatcagaagtttcatatgagtatttggcttatgcatttctgtcttttggttttaggcaaaaggatgtcaattcttgatgttaaactttaggattcttaaagtataatgaagactggaatgggctgtggggaacataatagtggatgacagtgacttaggattcaattcagaaaatagttgtgaatctgttttattttggttacagcctactcatacgatttatttcatattttctaagtgtatttttgttcttcctgtatgtttcttggcccttgagtcttctctgtctttaatctttctctcctctcctactatttatagccagtctcatattaatttcctttctctagggcctttaaccacttggtgctcatttcagaccagtagtagtagcaacaaagttctgcaaatcaaatgtatcttcactcctgctgtatttaagacacagctatctcagtatcttaaaataacaatgtaattattttttggcatacccttgcctgacttctgaggacctcactaagtctagttctagcctttgtagaatggtcaacttctttcatcaaggctttggtttcattactggtgtctgaattagttccactcctagcttgacccagattttagtttttattatggattttttcttcaaacttgtttatttaatattaagttttcatttttggcagcatatggatgattttatttttaataatcatatctcttagtaaactaatggttaaataatattaaagtataagaagctaaaattggccaggtgtggtggctcacgcctgtaatcccagcactttgggaggctgaggcaggcagatcacctgaggtcaggagttcaagatcagcctggccaacgtggtgaaaccctgtctttactaaaaatacaaaaattagctgggcgtggtggcgcacgcctgtagtcccagctacttgggaggctgaggcagtagaatcacttcaacccaggaggtggaggttgcagtgagcaaagatcatgctactgccctccagcttggatgacagagcgagactccatcttaaaaaaaaaaaaaaaaaa

SEQ ID NO: 162 - DNA, 531 bp, Homo sapiens
tggctggctgcttggccaggacagtgatgccaccagggagagcttccgcttggtgaccagggacatgtcccagatggacatagaagcccctctctgcctccctgggattttttagacttttacttttgatttccctaggatggaagagtataggtgggagataagggaagtggggtgagaggagaaaggaaatgttggcatgggcctgtgtgatgtccctgaggcagaagagccggggactgatgggttcaggtgggagctgctgggtgaggcagggaacccttttcactcccattccttagctttagtctaatggagccaaggactgctgggaccttcaaccctgatcttttgtcttccagtcttctcttagtgtcctgctcctaggtttccctctcttctggttcttctcccaggtattctcttcccaggcctctctggccactgctttgtatcagggtttttcacgcttttgtagaactgaggtttcaataaacagtttcagttgcaaaaaaaaaaaaaaaaaaaaaa

SEQ ID NO: 163 - DNA, 1093 bp, Homo sapiens
aagctaccagtaagacaatgaataattcagaagagaacactattcttttactgactgagtgcccaagatgccaatttccatgaagtcttgatttatatatatgtacacatgttatgcacatacatgtttgttttctaacagttattttttaagcttttgagataattttagacttacagaagagttgtaaaagtagtagagttcttgtatactctgcacccaccttgcccttatgttaacatcttacgtaacaatagaacatttgtcaaaattaagaaattaaccttgatataatactaactaaagtagaaagtttaaaaagtagagattttagtcttttcactaatgtccttttactgttccaagacccagccttgcatttagctatcatgcctacgtcctgtcttccagtctgtgacagtgtatcataacaggggatacctgatgttgtaatgtatttctggtgttgttaaccttgatcactatgctaaggtggtgtctgctaggattcgctactgtaaacttactgtgttttccttgtaattattgaatatttgctggagatacccggagactatgcaaatgtcccgtttctgcttaaacttttgctcattttactatccattggcagatcttgcttgtggcagttactactgtggtgttctaatggtgattttctatttctctcaatccttctacatttattattggaattcttctgtaaggaagagttgtcagttctggatttatatttttaactataataagatattcaggataagtatagatttagaacttaaagatgttaaatcatgttaaaattattccaaataccaatatcaaagaaaactaagttggtaatctatctcagaaaatatatgaacttaagaaggaaaatagtatttatgatttgtagaattggttcaacttttgacttaatactgactttggactgaattcaaagttttcttgaaatttcacatctggactttttaaagtgtctacatttatattactttggggatcattttgtcaaagtcttgaataaagttacccagtcctggcatgataaaaaaaaaaaaaaaaaaaaaaa

SEQ ID NO: 164 - DNA, 1058 bp, Homo sapiens
gactttttttcatctgcttattttcagcctatgtgtgtctttataagtgaaatgtgtttcttgtagacaacagataattgggtcttgtttttttatccattcagagccactctgtgtcttttgatttgagagtttagtgcgtttccattgttattaagaagtaaggatatgttctgccattgtattgtttgtcttttgcttgttttgtggtcttctcttcctttcttcattccttcatttcttttattgaaggtgattttgtcttgtggtatgatttaatttcttcctttttattttttaggtatatgtyatatggtttttgatttgaggttatgatgagtcttgcaaatattatcttacaacctattattttaagctgataaccacttaacattgcataggcaaaaacacacagaggcaaaaagaaaaccaataaaagctctacactttagcctcttgctttttaactttttgttgtctctgtttatatctcattataatttctatgtcttgaaaagttgtcattattagttttggttggttcatcttttagtctttctccttaagatcagagtattttatatatcacatttacagtgttataatatgctgcatttttttgtgtacttactattaccagtgagttttggaccttcagttgatttcttattactcatcaacttccttttctttctgattgaaaaactcccaggctggacacggtggcccatgcctgtaatcccagcactytgggaggctgaggtgggctgatcccttgaggtcaggagttcgagaccatcctggaaaatgtggcaaagctccatctgtwctaaaaatataaaaaattagttgggtgttgtggcgagcacctgtaatcccagctacctgtgaggctgaggcaggagatcgcttgaacccgggagacgaaggttgcagtgagccgagatcgcaccgctgtactccagtcctgggtgacagagcgagacgccatctcaaaaaaaaaaaaaaaaaaaaaaaaaaaaaaaaaaaaaaaaaaaaaaaaaaaaaaaagggcggcc

SEQ ID NO: 165 - DNA, 665 bp, Homo sapiens
cccacgcgtccgcacaggaagagtgtgtagaagtggaaatacgtatgcctcctttcccaaatgtcactgccttaggtatcttccaagagcttagatgagagcatatcatcaggaaagtttcaacaatgtccattactcccccaaacctcctggctctcaaggatgaccacattctgatacagcctacttcaagccttttgttttactgctccccagcatttactgtaactctgccatcttccctcccacaattagagttgtatgccagcccctaatattcaccactggcttttctctcccctggcctttgctgaagctcttccctctttttcaaatgtctattgatattctcccattttcactgcccaactaaaatactattaatatttctttcttttcttttcttttttttgagacaaggtctcactatgttgcccaggctggtctcaaactccagagctcaagagatcctcctgcctcagcctcctaagtacctgggattacaggcatgtgccaccacacctggcttaaaatactatttcttattgaggtttaacctctatttcccctagccctgtccttccactaagcttggtagatgtaataataaagtgaaaatattaacattaaaaaaaaaaaaaaaaaaaaaaaaaaaaaaaaaaaaa

SEQ ID NO: 166 - DNA, 1017 bp, Homo sapiens
ccacgcgtccgctcagcccatagtggagagcctcggcttccaggggggccgtctgcagcgcgtggaggtgacctggcgaggctcccaccctgaagccctggaggtgcacgtggaccctgtaggccccctggacaaggtgaggaaggccaagatccgagtcaagaccagcagcaaggccaaggtggagtctgaagagccacaggacaatgacttcctcagttgcatgtcccggcgctcgggtctgcctcgctggatcctggcctgctgcctcttcctctccgtgctggtgatgctgtggctgagctgctccaccctggtgaccgcgcctggccagcacctcaagttccagcctctgaccctggagcagcacaagggcttcatgatggagcccgattggcccctgtacccgccgccgtcccacgcctgtgaggacagcctaccaccctacaagctgaagctggacctgaccaagctgtaggcctccactggccccatcactgccaactgcagggggcccctcgggcctcacttgccctgagcccaggagtccaagggcagggtgggtccagccttgagcccctccacccccaaatccttcctctcctcccagtcccaccccttgccccacggagtcctggggacgcagtgccccagctgggaagagggcgggatcgggcactggttcctccttgtccccgctttcttgggggcttgctactttttgtcttctattgtgtggctttctgagtatttgaaccccagtcctgtgtcaccttcctttttccttctctgtcccctctctgcgggggggcgctgaggctgagggggagctgcgtcttgctagggcttcccccttctccccatcccggtctccagagacccagcttctgagagacagggtgtgggcatctccatgcccctataaagcgtgcctggggcttgtctggggctggggaggaataaaccatgtatataaaagaaaaaaaaaaaaaaaaaaaaaaaaaaaaaaaaaaaagg

SEQ ID NO: 167 - DNA, 2886 bp, Homo sapiens
  misc_feature (391)..(391): n equals a,t,g, or c
ggggcgtggcggccggaggaggcgttggcagcgggctcggacccacgcggcgccgcggcccgcctggcctgcagcgctcccacccccggcggcggcacgatgccctttgacttcaggaggtttgacatctacaggaaggtgcccaaggaccttacgcagccaacgtacaccggggccattatctccatctgctgctgcctcttcatcctcttcctcttcctctcggagctcaccggatttataacgacagaagttgtgaacgagctctatgtcgatgacccagacaaggacagcggtggcaagatcgacgtcatctgaacatcagtttacccaatctgcactgcgagttggttgggcttgacattcaggatgagatgggcaggcacgaagngggccacatcgacaactccatgaagatcccgctgaacaatggggcaggctgccgcttcgaggggcagttcagcatcaacaaggtccccggcaacttccacgtgtccacacacagtgccacagcccagccacagaacccagacatgacgcatgtcatccacaagctctcctttggggacacgctacaggtccagaacatccacggagctttcaatgctctcgggggagcagacagactcacctccaaccccctggcctcccacgactacatcctgaagattgtgcccacggtttatgaggacaagagtggcaagcagcggtactcctaccagtacacggtggccaacaaggaatacgtcgcctacagccacacgggccgcatcatccctgcaatctggttccgctacgacctcagccccatcacggtcaagtacacagagagacggcagccgctgtacagattcatcaccacgatctgtgccatcattggcgggaccttcaccgtcgccggcatcctggactcatgcatcttcacagcctctgaggcctggaagaagatccagctgggcaagatgcattgacgccacacccagcctaatggccgaggaccctgggcatcgccagccttgcctccagtgccctgtctcctttggccctcaatctggtcccaaatctggctgtgtcccaaagggtgtgtgggaagtggggggaaagtagaggatggctcgatgttttgcagctacctcttttccccgtgtttctttttagacaaattacactgcctgaagttgcagttcccctttccctggggagccccaagaacagagtcaggcaaggggtggggagtccagggatcttggggacccctcctaggagagctgcagtctcttccctcaggggaacatcccagaatgcatatcgatcagctctcagccaggcttcgacaatctcgcagcccccactaggtggacacattaatgatttggtttctcccctgggcagccaacctgccccagaggcaccagacctgggctttcagctttgggaccaggctgcccaaaggtactcctttatacacccggcaccttccacgaaagatggtacttcccaagcaagcccctatgatttgtcactatagatggaaccctgacttctgccccatcccttcctgcccaacctagaacccaggcctcaagtctttaccccacccctttcttgttcttccaagaagcagatgcccagttgctcagcagcagcggtagagacttgaatctgcccaccagtcacaaggcgggtcacagattcctcttcctctcttctcctcgttcctctgaaccctccaccaatgtgcctcagcctgtgtgctgtgtggcaacagcattctggttcccactgccaagatctcccaccactctgctgggatctgcagtggcagggagtgggggttgtgtaaaggggaagtcatcttttgagatccagatagacatggtttgtgcacttacgtccagatgggaagcatccttcctgcaaccctaaaataatcatgcagcctctcagacggacgccatcggtcccaaggccttaggtggaggaagcaaagcaggccaggcctgtcctgtccgtggacctctaccttctggactccctacgggtgcagagcayttgggtttctctacagccatcgtggcccacttgacactgtgctcctccatcagctggtcacatgccaacacgttcccagcccctgaggcagctccagggtgccccacctgctcctgaggtgggtccctaccctgctgctcctcttcatcctttcccttttgtcctgaaagggaggagcaatggtccaggcattaattccacccagggaattttagctatgccctcatgtcccagggagagagccacacgcctgttttccatttatagcaagattgtttgcatacttttgtaatgaaggggagtgtccagtggaaggatttttaaaattatcttatggatagctcaagtctctgccatttgtaatttttggctctaagctccgattggagacgcttctccttgtgcatgtgagttgactgatgttgtgagtgtaaatgcatttggttatttctggtatcggtggccacttggatggatttttttacattctgttccccagttacaggaaggagtccctttggtgtgtgaatatgtgtgcctgtagagggtggggcagggtggggtggggatggaaatgtgtggcatgcacatgagttgaaattcttttatgcatttttttgaagaaaaaaaaaaaaaacaactctgaggacataggggatgtcagtttcctatggaagagacacctctgacccgttattcttataatcaaaatctgaagggaaaaaaatgttttagttctttccccactcgttgggttcaactagattaaaaggctgattttcagaaaaaaaaaaaaaaaaaaaaaaaaaaaaaaaaaaaaaaaaaaaaaaaaaa

SEQ ID NO: 168 - DNA, 1298 bp, Homo sapiens
ctcttgcttgctgtgactggtggagctgccgcgctgtccgcgttatctcctcccggtgagaacgaaccgcagtgtccaccggcgaggagccagccctgtcccggtcagagaaagacgacgaggatacctgggagcgggcggcggccgggctgggccgcgccggtgcgggctggcgactctgctcctccgcttgctgctgtctctgggaactgggtgccagcgctgaggggcttccagcggacagggacccccttccccggctcccctgcccaccctgccggggagggcggaagatgccggtgaagaagaagagaaaatcccctggggtggcagcagcagtagcggaagacggaggcctcaaaaagtgtaaaatctccagctattgcagatcccaaccccctgctagactaataagtggagaggaacatttttcaagcaagaagtgcctggcttggttttatgaatatgcaggtcctgatgaagttgtagggccagaaggaatggaaaaattttgtgaagacattggtgttggaacctgaaaatattattatgttagttttagcgtggaaattggaggctgaaacatggggattttttaccaaggaagaatggtttaaagggaatgacttcattacagtgtgactgcacagaaaagttacaaaacaaatttgactttttgcgctcaacagttgaatgatatttcgtcatttaagaatatctacagatatgcctttgattttgcaagggataaagatcagagaagccttgatattgatactgctaaatctatgttagctcttctgcttgggaggacatggccactgttttcagtattttaccagtacctggagcaatcaaagtatcgtgttatgaacaaagatcaatggtacaatgtattagaattcagcagaacagtccatgctgatcttagtaactatgatgaagatggtgcttggcctgttcttcttgatgaatttgttgagtggcaaaaagtccgtcagacatcatagcaagaactatgtgaagaaaatgcaaacctttcaattcccacgtgtatacaagctaatgtgatgagggggaaaaaaatccaacgggtgcattttcattcatatgaaagacttctcatagtacttttttttcctttttttaaaggaggtttttcttgttacatgtgatgggcattgagccacacctcttcttagactgaatattgaagtttttgttttgagttatgtttataacatttatttcagaacaataaagattcagatttgtgacaaaaaaaaaaaaaaaaaaaa

SEQ ID NO: 169 - DNA, 989 bp, Homo sapiens
  misc_feature (338)..(338): n equals a,t,g, or c
  misc_feature (352)..(352): n equals a,t,g, or c
ggcacgagtgaaggaggggggcattaagcaccctggggccccacgatgggcagcaagagtttgccgagggaggaaagcccaccggtggagtgggcagaggggttggtgtgtggacttctggagcctcaggaggaagggtgcgggttcccctggctgcagacgtccctgaggctgccctgcctcccccaggagagaccttcctgccctactacacgggccgcgccattgatggcatcgtcatccagaaaagcatgggatcagttcagcacggctgttcgtcatcgtgtgcctgctggccattggcaggtagctggctcaacccccacgccctgccccgnaaaccccgacctgnaaccagggaaggaaagggaggggcctgtttcctaaggaagacaaggggccagggaggccctggaaatgcccctggtgggcctgtccctcagctggtcaccctgggaaccggcttccacactgtcttagagcaccctagaaccacaccctctggtccctgaaaagggcttcagtcctcagggttccctgctcaccctccctggctgttttccaagtaggaatctggtcccaaacagaaccggctttgtctgagttgttctggaaggaagagggtctggctggcacatttgggtctcttgtcccacaactgtcccctttgccctcaccttgaggggggctcccactgggaatgagggggaccccgcagggatgccagccctggagtggggctgcggtggggctcccaggcctgcagctgcaggcattctgaggggcaacgtggaggaagggccagggatgcatgggattttaattgtttcatcacaccttccccgtggcaaagaaacagtcagtcctcttcaggtgtcttctggatttctggtgatggacagagaaatctttttacagtttcaaattatgttcaacaaataaaaattgcattttttattttgaaaaaaaaaaaaaaaaaaaaaaaaaaa

SEQ ID NO: 170 - DNA, 879 bp, Homo sapiens
ggcacgagaaattacagcagtgcaaagcagagctaaactctaccactgaagagttgcataagtatcagaaaatgttagaaccaccaccctcagccaagcccttcaccattgatgtggacaagaagttagaagagggccagaagaatataaggctgttgcggacagagcttcagaaacttggtgagtctctccaatcagcagagagagcttgttgccacagcactggggcaggaaaacttcgtcaagccttgaccacttgtgatgacatcttaatcaaacaggaccagactctggctgaactgcagaacaacatggtgctagtgaaactggaccttcggaagaaggcagcatgtattgctgagcagtatcatactgtgttgaaactccaaggccaggtttctgccaaaaagcgccttggtaccaaccaggaaaatcagcaaccaaaccaacaaccaccagggaagaaaccattccttcgaaatttacttccccgaacaccaacctgccaaagctcaacagactgcagcccttatgcccggatcctacgctcacggcgttcccctttactcaaatctgggccttttggcaaaaagtactaaggctgtggggaaagagaagagcagtcatggccctgaggtgggtcagctactctcctgaagaaataggtctcttttatgctttaccatatatcaggaattatatccaggatgcaatactcagacactagcttttttctcacttttgtattataaccacctatgtaatctcatgttgttgtttttttttatttacttatatgatttctatgcacacaaaaacagttatattaaagatattattgttcacaaaaaaaaaaaataaaaaaaaaaaaaaaaaaaa

SEQ ID NO: 171 - DNA, 1919 bp, Homo sapiens
  misc_feature (1903)..(1903): n equals a,t,g, or c
agacagggwggcggtggcagaggacacttgtcatggccgcctctaaacctgtggaggcagcggacaccctgaaggtcccggtgctcacttggacatgaactctcttgatagagcccaagcagccaagaataaaggcaataaatattttaaagcaggaaaatatgaacaagctattcagtgctatactgaggctattagcttgtgccctacagagaagaatgttgacctttctacattttatcaaaacagagctgctgcctttgaacagttgcaaaaatggaaagaagtggcacaagactgtacaaaagctgttgaacttaatcccaaatatgtgaaagctctctttagacgtgcaaaagcccatgagaagctagacaataagaaggaatgtttagaagatgtcactgctgtgtgtatattagaagggttccaaaatcaacaaagcatgctgttagccgataaagttcttaaactccttggaaaagagaaagccaaagaaaaatataagaatcgtgaacctctgatgccatctccacagtttatcaaatcttacttcagttctttcacggatgatatcatttcccagcccatgcttaaaggagagaaatctgatgaagataaagacaaggaaggggaggctttagaagtgaaagaaaattctggatacttaaaggccaaacagtatatggaagaagaaaactacgataaaatcataagtgaatgctcaaaagaaatagatgctgaaggcaaatacatggcagaagcattgctactacgagctaccttctacctgcttattggcaatgccaatgcagccaaaccagatttagataaagtcatcagtttgaaagaagctaatgtgaagcttcgagcaaatgctctcatcaaaagaggcagcatgtacatgcaacagcagcagcctttgctgtccactcaagattttaacatggctgctgacatcgatcctcagaatgcagatgtttatcaccaccgaggacagctgaaaatactccttgatcaagttgaagaagcagtggcagattttgatgaatgtattaggttaagacctgagtctgctctggcacaagcacagaaatgttttgcattgtaccgccaggcatatacgggaaacaactcttcacaaatccaagcagctatgaaaggttttgaagaggtcataaagaaatttccaaggtgtgccgaaggctatgcactatacgcccaggcattaacagatcaacaacagtttggtaaagctgatgaaatgtatgataaatgtattgatttggaaccagataatgctacaacatatgttcataaaggtttacttcaacttcagtggaagcaagatctggatagaggtttggaacttatcagcaaggctattgaaattgacaataaatgtgattttgcctatgaaaccatgggaactattgaagtacaaagaggaaacatggagaaagccattgacatgttcaacaaagctattaacctggccaaatcggaaatggagatggcccatctgtattcactttgcgatgccgcccatgcccagacagaagttgcaaagaaatayggattaaaaccaccaacattataaaacagggggaaagcagactgaccctctttttaaaagtttaccccctcttcaactgaaccctaaagacactgtcatgaactgtgttgaatggtggaaatcagtatttctgtttgtggtgttgttatttgttacatctgtttcatgtctaggtgttgtgggtgtggctgttgaaggaagtttgcagtcttgcagcttttattccctgtgcaacaaaagattagaacatgttaaagggatttttaaataaagttgcaaagagtacaaatgataattggccatgcaaataaaaaaaaaaaaaaaaanaaaaaagggcggccgc

SEQ ID NO: 172 - DNA, 1181 bp, Homo sapiens
ccacgcgtccggcagtggcaggaccaaggtcaaatgagttatagccaagtctacagtaagatgtggcagtattctgttttgaagccgggaccatgattggcaagcttgccacttggtcaagtgctcaccctctgaaaatgtcttccttggtctttgcctccagctgggtgccacaaactctgaactggattccaaggctttcatgaatgcacttatgtttgctgtggcagctgcattatgtcgtgggggatgtggatgcagaacctcacattctgtcatcttgcttatgttactctcctttatgtttcactttctcaaatgaatgtcaagcaggtgattttcagattcaaaagttctaaaataaattgctcaaatttatacattatgtaagctgttaataaaatttcttgtaggtgctacatatttgttaaaatttttggttgtaattttaagctcactgtaggcagaaaggaatcattaagatttctattcttttttagtctgtatctaaatgaccatatattttaattccaaatacttactttatacttcagtaatgctcattgtattttgcaaaatttatattgttcttttatttgaaaatataaggctttttttagctcctgaaagctatattatagtcatatagttttattatagtatttgataagaagagcagcaacatattgagaacagataaaattctgctgtctttttaatgattatttattaaattcttctcattagagcctattattaatgattgtaatgtatttactgtataatttttctgcaatttattaaatgccaatgacttccaatgtctgcttttcatgactgcacacagtttaaagctgtagatatctaaagggttatttttcagcccggcatggtgctcacgcctgtaatcccagcactttgggaggccaaggtgggtggatcacgaggtcaggagatcaagaccatcctggctaccacggtgaaaccccgtctctactaaatatagaaaaaattagccgggcatagtggtgggtgcctgtattcccagctactcgagaggctgaggcaggagaatggcgtgaacccagtgggcggagcttgcagtgagccgagatggcaccactgcactatagcctgggcgacagggtgagactctgtctcaaaaaaaaaaaaaaaaaaaa

SEQ ID NO: 173 - DNA, 1801 bp, Homo sapiens
acgcgtccgcgcccttttttttttttttttttttttcagacagcatctcactaagccgcccaggctacagtgcagtggcacaatctcagttcactgcagcctcaacctcctgggcataagtgatcctcccacctcagcctcccaagtagctgggattacaggcatgcaccactatgttcggctacttttaaaaatttttttgtcgagacgacatctcattatattgccccagctggtctcaaactcctaggctcaagcaatcctcccacctaggcctcgcaaagtactggaattaaggcatggaccaccatgcccagccccacagccaaacttcttgaaagaatggtctatatttactatctttactttctgaccttctattacctcctcaacccactccaccagaccaccacatatgggacttcccagggctccagcctgggtgccctcttctttaaatactcagtactaatgaaaaataaattcaacatataggagctgccttttcctgactcctccctccttttgctcatcttcagctctctattccatccctctcttcagcagaacaagagattgtgtttgtgtggtggtgagggcaggagaggctaagaacaggattgggggaccaagagtatagcaggggagatgggccctatctatcagcccaagccctcagcagctctttacacagccagttacctgtggcagcaagagggggaaagtcttgagagcacagaagagggaagaagggggagatgaaaggaaatgtgctgaaagagtacagctgtaagactgggtggcaatggacctggcggtggtactgggggcctgagattcacaggtgggggtgtaagaattggtggaggtggggggagtccaggaggaggtggtccttcaacaacaggaggctgtgctgggaaaggcagcataccaggaagattcacatcttctacaactactggatcacttccatgatcaaaaggacacatgtctcctctcatacaaaaacccttttcatcatagtctctacaccgtttctttggcatgggtggtcttacgtaagagttatggtccacttggtcttcatgaaattcagaccaactttcggtagtgttgtttccatgatgagtaggagcaattactgtaatagtgctgctcaaagtaggtacagggtagtggccagatgaaatactaggtaccgaagagactggagtataattattttctaatggatctgttctatccaggtcatatttaggttttaccagatccctttccctgcttcgtgttctgcttctgcttctagtcctgcttctatctctgtccctctcacgaagcctctctttactccaacttcgacttcgactcctgctataactgcgactccgccctcgtcttctattgtaccggtctctgtatgaatctcttccttctttatatctttttcttggtgtggaaaaaattctaccttcaggcttcctgatgatggctgctctggaggaggtaggtaactctttgtattcacagcatcaaaaagtttttccacaaatatctgtgtctctttctgaagaaatacatccagctgatcaatacataatgcctttaactctttttcacttttgtctttctttaccaaagccagaacatattttgctagggcggatggatctgcatcacagatgggctcgagagtcttgctgagccaggacttgagtgcctcgaagttttcaatgatcattttagaaaccatccacagcggccctaaggcccgtcacactcctccgcccgcccaggtcgc

SEQ ID NO: 174 - DNA, 2007 bp, Homo sapiens
  misc_feature (1991)..(1992): n equals a,t,g, or c
gccaacatgagccaccgcacccggccctctccatcttccttgaacgaccccattcacctactgctcctatttctaagactgtgaccaacagagcactggagcatgcagcagcacacagaccccccgcccagatgcctcgtcgtctgggaccccatgcttgccccaggtcccttgggccacatactaatccccctctggagaccttgagggaggtaagattgggaattagcaatacctgaaatgtgttaattctctaggtcatgtttgactctactccagtcctcgtcgccctcttcctccaccccagacttggtgcaagctattccctctgcctacaacactcttcttctccatgtttacccamctcataaccactgatcctttaggcctcagcttttctcaacccccatgcagccattcaacagaatctggsctgtggmaggctctcttctaggtaacgaagtgsattccttgcagcmtttagggacccagggtatcaagggctccgcaattaactttgacacwtggtttccaagatcgccctgaccctgaatrtcccaaggccagacaggagaagagcgaaattggagggctgtgtgagaggcattttggattgggactggaggtagggaacatccctttagccttcattccactgcctggatagctttcacatggccatgcctaatggccagggaggcttatgaccatggtcagaaagtcagctgtgtttccagggtgacaaaggaacaggtttgtgaatcatcatggtctgaagttcctggtacacgggatccatttcactcatcttgcctcatagagaaccctcattctcacctcccacaagggagaaaatgcaaagtttcatgcagtcactgcacagagtcttccagtgatgtgcatttctggacatcaagcctgaaagcggtacatcatagtttgtcaatgtaaaaactaaaataaaaccgtaacaattccccaccacacaccaaaaaatacctaacatcaggttaatgttacctccctycctgagtacagaaacaggatacgcacaaggaaaactgccattagaaagggaaggtttggaggcccatggcaagttcctggtccacaagcaattatwaaactcttctgggcaggtactgtgaagtcctcatactcctgctggttcaaaccaaaggacccaaggttgttttaagcatgacagttaaaggagtttggggtcctagcatgagctgattggtttcttggcaatgcaagtttctcagaaatgtaataggttctgatgacttgtttctagttatttccatgtatccatagccatgtccagagtttcttgttgtacataattccctaacttgatgaattatgctttctagttcatagacttctctctctctaatgatagagtttatgcaaaaccatcagacacaggtgggaagattacacctattattattacaccaattatttcatcttttctacagggctcagtcttaactggccacttaaaggatttttcatacttattttctattattgagctttaggtacaatcagctttttcaaccctgtgaaataccaaatttctrrgtratctgttctctatatcatttatatcatttataaactagcccttccttccctrarcctawttatctcctctaataagctttttaaaagcacaactaacaggccaggcacagtgctcacgcctataatcccagcactttgggaggccaaggcaggtgaatcacttgaggccaggagttcaagaccagtctggacaacatggtgaaaccccatctctagtaaaaatacaaaaattagctgggcgtggtggtgcacacctgtaatcctagctacttgggaggctgaggcacaagcattacctgaacctgggaggcagaggttgcagtgagccgagattgcaccactgcattccagcccgggagacagagcaagaccctgtctctgaaggaaaaaaaaannaaaaagggcggccgc

SEQ ID NO: 175 - DNA, 1049 bp, Homo sapiens
ggcacgaggacacataagacagctacaaaacccctgttctagtggaggaaggcagacagtaaagaagcagaacaatagagaatgtaagagccaagtcacaatgaatgctattattattaagtaaaatcaagataagggggaggaaggacaaatctcctctacagaagaatgccaaataatttatggagatatgcgaagacgtttcagaacctaatgtcccattctctaagtgtggcctgtgtttactgactttcttccacagagtatggtatggaaggaggaggaaaagtgacttcacagtggcgaaagctgatgaacattagcttggccaagtattggagatcaacatcaacagttataagtcatattgatagtatgtgccctgataggatgtgatgagaagggtacttcccctctgtggtcctcctcctcaaaacctgtaaccccagtctaaatagcagaaagacattgcacaaacccagagtgagggactctcaagaatgcctgaccagtactcctcaaaatgtccaggtcatcacaagcaaggacagtctgagaaacgtcacatccagaggaacctaagaatgaggactcaatgtaaaagggrtcctggaacagaaaaaagacattgggaaaaactaatgaaatctgcccaaagtgtagagtttagtttagttaataacaatttttaaagaggtattaaaaaaaaaaaaaaaggcaggtgaaggccggtgtggtggctcacgcctataatcccagcactttgggaggccaaggtgggaggatcatttgagctcagaagtttgagaccagcctgggcaacatggtgagaccccatctctacaaatactaaaaaattagccgggtgtgctggcatgtacctgtgttcctagctactcgggagcccaggtggtcaaggctacagtgagccatgatcacaccactgcactctaggctgggtgtcagagcaagaccctgtctcaaaaaagaaaaaaaaaaaaaaaaaactcgagggggggcccggtacccaattcgccctaggaaatgga

SEQ ID NO: 176 - DNA, 1098 bp, Homo sapiens
ggcacgagccggatcctcttcattcttttcggctactcaaccactccgcatgctgctggaatatttctggctttagaagtacaggagggcgcagatggctaactgagtaacattcatgaaatgaggctttctgtggcggcgtagtgtttggaattagaaggtaattcagtagagtgtaacttagagaatattgcaagtgacacattgaatcctgcccgtcagggaccttttcctcagagcaatccggccacacgaatagaaggctgtcgtgaatcacatcagatgtaaaatcattccttctgtttactcttttaattttcatcctttgcaggtagtgcaaattcaacttcaaatatggtgtaggttttgctagattccatatttttttcttggatttttgctaattatttttagcaaaaaatttttgctcagtggcaccctccctagtgtccatgggttagggccatgctggggaaaacgggccggtatttacacacgcgcaaaacacccagagacggcacaaggaggttgaactcatgtttcagttcgcgaacattgactccttacgaaagtcacttcattctaactagatgcgcccacttccggtcattatttcgtttgcatgatgtattgcttcttcacgttttgtttttattgagcacggagtagaattccagggctgccttgacttcttccctgcatgctccctcccagtgactttccttccctttcacatgaggatctgccgttcatgttgctttctcctttgtcctcttggacttgagggcattgtgaaaagctttgctgtgatttaaaaatgccagcaattttaatctagcagtgttgaagctgggaattttttggcgcaatccatgtagcagtgacccaggcttgggagccagaaacaagtgtgacctgggattttatttaacacaactgttgccaaagagttggctttgtttatttggttttggcggggagaggagtggtatttgatgctttctgtggacaatgtaaccctaaacacatcatgtattttaaatgccacctacataaataaaacataagcatattgaatacaaaaaaaaaaaaaaaaaa

SEQ ID NO: 177 - DNA, 652 bp, Homo sapiens
ccacgcgtccggagatgactcatggaaaaattgtgttggcttggtctgcatgtttaatgatgtgcttgtatatcgattagctgtgtcacttttaaataagaagtccacacaagcaagccaaatttttagatgacgaagtccataaataactagagaatttttgttatctgttgttaagttgaaatgtataatcatttatcactaaattgcacattgcctttatttatttgtgctctgtttttggtttacagtgtaataatacctcatttaaaaaataaaaaccactactgttacattttattaatttaaaaagctagaaaattcatgtagttactttttttacatatataatctgttaatgaattattgatttttgtatctgccacagtaaattaaagcattacacagtatttatcagtattttttaaacatcctgtccttttttaaaatctttgcttagtcagtcatatttttgtctgtatgattagaagtttttacgtccttccttttttgtacaaatctgtattgtattaatttctggatgcaatttttcaaatattaaaattatacagtcagtcaggcttcagtttattttttgaacacttgggcaattaattaaagccatatgtttaaaataaaaaaaaaaaaaaaa

SEQ ID NO: 178 - DNA, 1815 bp, Homo sapiens
  misc_feature (1115)..(1115): n equals a,t,g, or c
  misc_feature (1119)..(1119): n equals a,t,g, or c
gagctgaaccacgtcttcaagaaagaagccaaaaatatttccgtgaggtttttaactacctctgaatctgtcctactctaaatactaccggagtctctttgtaggttggccagtatatgtttttagtgaaatattatttcacaaagaactatatcacgtacctttcctctgactgtttcctggcatatatgcatgaatatggccattattgaactatcacttcagtaaagaagttaaacagtacttttctgaggtttttcagctacctctgggtcattctgtaatgtaaatgttgttaataagaatggtttttacataaattatgcaaaggttaacaagcagtaacactgcactcctcaaaaagtggcggtatgtaatgaaaggcccttttgatatccttgatttttcattgtgtatctgkttgggcacggtctatgtaacactagttctgcgtattagtattttagagtatctctgcctcccttgtcctgttgtttcttttgcccccttggaacacattggtcagcagttctaagagacactgcccacatgatggccattccctacttcatccttgctgagctaaattttatatttttgtgcatccttctcccagatgacttaggtggtaagtccagattagtcaaagctaatcatggaagttccattttaatgattctgttggggtgaacttgggagcaatgagatgtttgggaagtattgtgtagtacttctgggaaagatctccttgatacaacattgtcatgacatgagaagagactctgctgggctttttcatgtctgtaacatggtattggcttatcgtttttatctctgaagggcagtagcctgaagataacagtgcacaaggtgggaaaagccagctcagaggtgacgttgccgagctactctgctctctatacctgttctctactgggactttttataaccctcaataactgttttttatttggtcttagggctgtctgatacttagagctgaaggcattccagctgacacagaggaatatttttctaagtgttaatgttctatatggtaattagggggaagaattatttcttttcacaagttaatatagggatggctgtttgtntcanccatggttctttctggtggaaaacagaattctccaactaaaaatattttaatggcagactgattacagtggtgtgggccagaaacaagggacagtgaaacacccagagacttgtatcagcaggaagccattgccattctgagccttgaagggcaaggagggaaacagtgttaccagagcccagtaagaactgctgtcatgaaggaggggccaccttgtaagagacatcattactaccagaactgtggtgccaaattgctggtgtctctctttggagaaaccaaccagatacatctgctggagagcccaggtgggcacagagaagggtggagagagaatctgggaagagaaatggagaataagcagcacagtgttattcatttctgtaaattcctatgtagaaggctcagtgttagaaataaagttattctactagttgcaagttaagtgtttctgtttgttctgctttcctgttagcataagtaaactccctttggaactacacaggtatgtctctccttcaacatgtgtgaagcagacattatattaaattacattattcatacctccctgtggtgtttcttattgtatgtggtgtaaggtaagcagctctgtattcttccaaataaatagccagttgtccctgmaaaaaaaaaaaaaaaaaaaaaaaaaaaaaaaaaaaaaaaaaagggcggcc

SEQ ID NO: 179 - DNA, 1488 bp, Homo sapiens
cgccaagtttccggagggagagggtagaaactggagggggtggacctgtcactcacgggactgagggtccttttctcccgctcccaggaggaacgagaatgaatatgactcaagcccgggttctggtggctgcagtggtggggttggtggctgtcctgctctacgcctccatccacaagattgaggagggccatctggctgtgtactacaggggaggagctttactaactagccccagtggaccaggctatcatatcatgttgcctttcattactacgttcagatctgtgcagacaacactacaaactgatgaagttaaaaatgtgccttgtggaacaagtggtggggtcatgatctatattgaccgaatagaagtggttaatatgttggctccttatgcagtgtttgatatcgtgaggaactatactgcagattatgacaagaccttaatcttcaataaaatccaccatgagctgaaccagttctgcagtgcccacacacttcaggaagtttacattgaattgtttgatcaaatagatgaaaacctgaagcaagctctgcagaaagacttaaacctcatggccccaggtctcactatacaggctgtgcgtgttacaaaacccaaaatcccagaagccataagaagaaattttgagttaatggaggctgagaagacaaaactccttatagctgcacagaaacaaaaggttgtggaaaaagaagctgagacagagaggaaaaaggcagttatagaagcagagaagattgcacaagtggcaaaaattcggtttcagcagaaagtgatggaaaaagaaactgaaaagcgcatttctgaaatcgaagatgctgcattcctggcccgagagaaagcgaaagcagatgctgaatattatgctgcacacaaatatgccacctcaaacaagcacaagttgaccccggaatatctggagctcaaaaagtaccaggccattgcttctaacagtaagatctattttggcagcaacatccctaacatgttcgtggactcctcatgtgctttgaaatattcagatattaggactggaagagaaagctcactcccctctaaggaggctcttgaaccctctggagagaacgtcatccaaaacaaagagagcacaggttgatgcaagaggtggaaatgttctccatatcaagatgtggcccaaggggttaagtgggaacaatcattatacggactcttcagatttacagagaacttacacttcatctgttccacctctcctgcgatagtcctgggtgctccactgattggaggatagagccagctgtctgacacacaaatggtcttttcagccacagtcttatcaagtatcctatatgtattcctttctaaactgctactcatgaatgaggaaagtctgatgctaagatactgcctgcactggaatgttaaacactaaatatataacaagctgtgttttcctaagctgaaaaaaaaaaaaaaaa

SEQ ID NO: 180 - DNA, 721 bp, Homo sapiens
cggccgtgtcacagctgggaatgatgaggtggrggctgctgctcaggctgcaggcatccatgatgccattatggctttccctgaagggtacaggacacaggtgggcgagcggggactgaagctgagcggcggggagaagcagcgcgtcgccattgcccgcaccatcctcaaggctccgggcatcattctgctggatgaggcaacgtcagcgctggatacatctaatgagagggccatccaggcttctctggccaaagtctgtgccaaccgcaccaccatcgtagtggcacacaggctctcaactgtggtcaatgctgaccagatcctcgtcatcaaggatggctgcatcgtggagaggggacgacacgaggctctgttgtcccgaggtggggtgtatgctgacatgtggcagctgcagcagggacaggaagaaacctctgaagacactaagcctcagaccatggaacggtgacaaaagtttggccacttccctctcaaagactaacccagaagggaataagatgtgtctcctttccctggcttatttcatcctggtcttggggtatggtgctagctatggtaagggaaagggacctttccgaaaaacatcttttggggaaataaaaatgtggactgtgmraaaaaaaaaaaaaaaaaaaaaaaaaaaaaaaaaaaaaaaaaaaaaaaaaaaaaaaaaaaaaaaaaaaaaaaaaaaaaaaaa

SEQ ID NO: 181 - DNA, 1842 bp, Homo sapiens
  misc_feature (1134)..(1134): n equals a,t,g, or c
  misc_feature (1210)..(1210): n equals a,t,g, or c
aattcggcagagtttgggtctcagctgccacctcccttccttggatgctgtcccaaccaccccattccaaaagaggttatcgcttgtgattctctatcactgggccaaatctgcctgttgcctagtgctcctagccctttctatattaattcatttcattatttcagccctgtctcctccactaggatataagctgcacgagagatgggctatgtctcttactcactgttgggcctcccaggacctcagcacagggcctgacacacagtargtgggttaatagatactgattgaatgaaagaacaaggtgggtactaaaatcccccttttaaagaggaggcttggagttatgaggttgtacgagcaaagcttattccctaactaccacagtcccccccctgcagccagggccgggatcataccacaattccctgcccatcaagctgtcatgaatagccctaagatatcaggaagcacaaagatatcaatgccaggagggataggaggaggcggccaagaaaccccggaattgtacttaaaawtctggctacgcaaactgcttgcccaactttagacaccatgatgaatgatcaggtgctgcaaccatgaaacatgacgtaattagtgctgcactcttggctgggggttggcttggaggccccacctcgaggttagcctcccccagagggtcactgcacgargcagtctggtgcggggtgggggttacaacagagggaggtggaatcagaccactcggcagccctgtgaccattatgtgcacttttatacaaaggatacaaaagacaccaatactggggaatttatttaagaatacttctaggatgtgtcctgtgatgcctcaggtctatgtcccacattttcttaaatctatagtcctgtgtaataagaragartatttgaaagattagtcaattaattggtctaacaaaaagaattctatttctgcagccccaggagtggaagaaagagccagaactctgtggtgcagggctttagacttgcttcaggtcttctttcccctgggtcttctggatcttgctgccctggccatgaaagggaaaggataaaggaagtttgttcccttaagaccttgtgctgccctgtgctatctgnttctggccaacctgaatttgagaacgcttcttcagtttgcatctgtgtgaccttgggcaagataggaactgtctgnatctgctccttcagctacccaccttgtaaagcagttgggcaccatagagtagctgctgkcacagtggggtattctcttaccatcaatatggctggcatagtcattctacttctcctttacttgggcccttgcctaggccactcagcctccccagagcaggccccctctcagtcccaaggcctcctaggcctaggtgtctgccctagctggagaaaggcacaagaagaaaacaccagtcaatgggagaaaagtcccccaggccagtcttccacctagagcccctcccctttctcaccacaaagrttgcttcactgagggcggggcgcagtggctcacgcctgtaatyttaacaytttgggaggccaagacaggcgatcacttgaggtcaggagttcaagaccatcctgaccaacatggcaaaaccccgccttcattaaaaatgcaaaaattagccaggcatgatggtacacacctgtagtcccagctattggggaggctgaagcaggagaatcgcttgaacccaggaggtggaggttgcagtgagtcgagattgcgccactgcactccagcctgggtgacagaatgagactctgtctcaaaaaaaaaaaaaaaaaaaaaaaaaaaactcgtag

SEQ ID NO: 182 - DNA, 1427 bp, Homo sapiens
gaacatttcaagtagcctccctctatgttcctttcctttttaaatatattgataatcctactgcagggaatttgggagccatacttggtcttcgcatgcaacgtaattagatataactatactatgtgaatatgactaaagaaatgaaaatgaaaacagtatcttgtgctctgtaacgattgttattaaatatatcatagaaatgagaagagtaggctcaggagctgaactgcctagttcaaaaggccaaatttactactttttgttccgtgattgaatttgttgtgctcctgtttccttagttgtaaaacagagataacaataggacgtgcccataagcttttcatgaggattaaatgagttaatgtgtttggtggggaccaggtggacatggtactggtagggccctatttgacattggctttaagtatcattggctttaagtgcatcagtagatatatgatgacaataattgtattatcatggtgatatggatttcttataaatacttgtattatgttagtcacttctagaaaagaatacatctatacagtagaatataattcaaaaaataatgtcatatttttgtaaagaaattttttgtaaaacttttcagtcttcaaagagtttcatagactttattccatttatattgagagcctactttgtgttaagcattttgctgaacattgtcctcactcttatgttacttaccatctattgggaagagaaagaagtaaacaaataattacatgtagagtagtagtgtcaatggtagaggcatgaacacaacacagatttaacactagagaaagagtgatcacaaaagaaatgatgtttcagttgagttttaaatggcagctggagttcatctgaatgattaggtgtctaggacaggtttaaaggttagggagtaaggaagataatattcaaaataaaaagaacctgaggatattcacagaggacatttgcagaggcctgaaatagcattggtacattcctagaaccataaatagtttgatggtaatgtaaattacagtatgttttgaaaaatcatggaagatttataccacgatagaaacttcaactttattctaaagttgatgagcatttgacagattttaagcaagaaacaaatattaaatttatattttagaaagattctagatacataaaaagcacttattataatccagtatccattcatgataactctcagctaactggaaataaaagggaacttccttagtctaaggaagaacatctacataaattctacaaccagccacatacttaatggtgaaataatgaatgtttttctcctaagatcaggaaaaagaaaaagatgtctcctcttacttctattcaggatggtactggtagttcaggccagtacagctatgcaaaaaaaaaaaaaaaaaactcga

SEQ ID NO: 183 - DNA, 1768 bp, Homo sapiens
  misc_feature (1743)..(1744): n equals a,t,g, or c
cccggaatttccgggtcgacccacgcgtccgtttgaggatgagccacctttattagaagagttaggtatcaattttgaccacatctggcaaaaaacactaacagtattacatccgttaaaagtagcagatggcagcatcatgaatgaaactgatttggcaggtccaatggttttttgccttgcttttggagccacattgctactggctggcaaaatccagtttggctatgtatacgggatcagtgcaattggatgtctaggaatgttttgtttattaaacttaatgagtatgacaggtgtttcatttggttgtgtggcaagtgtccttggatattgtcttctgcccatgatcctactttccagctttgcagtgatattttctttgcaaggaatggtaggaatcattctcactgctgggattattggatggtgtagtttttctgcttccaaaatatttatttctgcattagccatggaaggacagcaacttttagtagcatatccttgcgctttgttatatggagtctttgccctgatttccgtcttttgaaaatttatctgggatgtggacatcagtgggccagatgtacaaaaaggaccttgaactcttaaattggaccagcaaactgctgcagcgcaactctcatgcagatttacatttgactgttggagcaatgaaagtaaacgtgtatctcttgttcatttttatagaacttttgcatactrtattggatttacctgcggtgtgactagctttaaatgtttgtgtttatacagataagaaatgctatttctttctggttcctgcagccattgaaaaacctttttccttgcaaattataatgtttttgatagatttttatcaactgtgggaaaccaaacacaaagctgataacctttcttaaaaacgacccagtcacagtaaagaagacacaagamggccgggcgtggtagctcacgcctgtaatcccagcactttgggaggccgatgcgggcggatcacaagggcaggagatcgagaccatcctggttaacacggtgaaaccccgactctactaaaactacaaaaaaaattagctgggcgtggtggcgggcgcctgtagtcccagctactcagraggctgaggcaggagaaaagtgtgaacccagragscggagcttgcagtgasccgagatcacaccactgcactccatccagcctgggtgacagggtgagactctgtctcaaaaaaaaaaaaaaaaaaggagacacaagacttactgcaaaaatatttttccaaggatttaggaaagaaaaattgccttgtattctcaagtcaggtaactcaaagcaaaaaagtgatccaaatgtagagtatgagtttgcactccaaaaatttgacattactgtaaattatctcatggaatttttgctaaaattcagagatacgggaagttcacaatctaccttattgtagacatgaaatgcgaacacttacttacatattaatgttaactcaaccttagggacctggaatggttgcattaatgctataatcgttggatcgccacatttcccaaaaataataaaaaaatcactaaccttttttaaggaaaatatttaaagttttacaaaattcaatattgcaattatcaatgtaaagtacatttgaatgcttattaaaactttcccaattaattttaaaaaaaaaaaaaaaagggcggccgctctagaggatccctcgaggggcccaaggttactcnnaaagagtttcccttaaagatcccg

SEQ ID NO: 184 - DNA, 840 bp, Homo sapiens
  misc_feature (789)..(789): n equals a,t,g, or c
  misc_feature (805)..(805): n equals a,t,g, or c
  misc_feature (836)..(836): n equals a,t,g, or c
gtctgtctcctactggcacaacagaattttggctgggaaatgagaagattcatttgataagcacacagtctgccatcccatatgcattaagagtggaactggaagactggaatggcagaaccagtactgcagactatgccatgttcaaggtgggacctgaagctgacaagtaccgcctaacatatgcctacttcgctggtggggatgctggagatgcctttgatggctttgattttggcgatgatcctagtgacaagtttttcacatcccataatggcatgcagttcagtacctgggacaatgacaatgataagtttgaaggcaactgtgctgaacaggatggatctggttggtggatgaacaagtgtcacgctggccatctcaatggagtttattaccaaggtggcacttactcaaaagcatctactcctaatggttatgataatggcattatttgggccacttggaaaacccggtggtattccatgaagaaaaccactatgaagataatcccattcaacagactcacaattggagaaggacagcaacaccacctggggggagccaaacaggctggagacgtttaaaagaccgtttcaaaagagatttacttttttaaaggactttatctgaacagagagatataatatttttcctattggacaatggacttgcaaagcttcacttcattttaagagcaaaagaccccatgttgaaaactccataacagttttatgctgatgataatttatctacatgcatttcaataaaccttttgtttcctaaganaaaaaaaaaaaaamwnggggggggcccgkacccattggccttatggngggc

SEQ ID NO: 185 - DNA, 903 bp, Homo sapiens
ccacgcgtccggatgaattagaagaaagaggtttggggactcagcggatactagttcttttaccttctgcttggtaacttagattaaactgagcattgtttttctgtcacaaatgttttccttatgacactggtttcgacatgtaaaatgtgtttgaaaacctgctttgtagatgcagagagaagctataggaaacccagtaccacccctggtctgttctgacgagacatcgttcataaggcacagcacatcgcaagatgaacagttgttaataaaagctgttgctggaaacttgctttaggaacagctcaagaaccttggagttcatatttcacaaatattaataaatataagtccaagagctgtcagcctaatctgtaggagcagaacctctgattgaccaaaaggcatatgggtttaggttggttttttgatgtcatatgtctctgatggggctgcaagtgctacctcgcgcttgtacactgctgctgtggggctccgcgcctgccggtgaagagctgcagatgccgagaagccagcaaacacagggcccactggaaaaaaatagttttttcattagtatttctcgggaggacccaaaagttaaggtcagcttgttcactgtaatttctggaagaagttcactcagaccttcctgaattcagatcatctcagaagtctggagggaaatctggcgaaaccttcgtttgagggactgatgtgagtgtatgtccacctcactggtggcaccgagaaacttacttccttgtattaagtgcacttcttgtatttctaataagatgactttccagaaagtgagatttgttatgttctggcttttaaaaggtaaaatataaataaatttcataacttaatctaaaaaaaaaaaaaaaaaaaaaaaaa

SEQ ID NO: 186 - DNA, 976 bp, Homo sapiens
ccacgcgtccgtgaagattcaagtcagttgttcagttacttgaagcaaaacgaaatctttcatttcagtcaaatcactgcagtcatgaaatactgaacaattgccttaagtctttgcttgactcactgggatagactgaggctttgggtgtgtctgtattagcatttcattagtacttcacatgcttttgatgtactcttgagattgctttaaattttgtattgaaacaacaatacattttgcactgtagtaatgggagcactaactcttacaacagttagtgaatcgttttaaagaatcagttcagtgtagacattttgaaaagattgtttcctgtgctttacgatagcttagtgcaatgtgcacttctgttttacttgccattttcctgctctgtttctctgtgacatgaagcaacagaaactgagatcaaagttaagattatatcctgtttgtagtatcagatatttttctgtgtacaattataggattgtaatctaaactggaatttttaggcagtaagtcaccacaaaatgttttagataagacacaataaaattattataaataaaagcttaatgtttgtaaaaaatctcttttttagtatttcttttttcacatgaaagaagtggtggctgctaaaaaaaaagctacagtgtttattaagggtctttttgatttatgtaaatatttgtaaattggtcagtgcctgtaaatttaaatataaaaagtaaccttgaaaacagttttaactttttcaaaagaactatgtccaacattttttagacctgctgtagtacagttttgtacctctaacgtattttttttttgcagaccaaatgctaaaacttttgcttttctttgacttgtaaaaggtgcacattttcattttcttccttaagttcaaatttttgtatgatgtcaaatgcaataaaatttatatatggacaaaaaaaaaaaaaaaaaaaaaaaaaaa

SEQ ID NO: 187 - DNA, 622 bp, Homo sapiens
ggcacgagccggaagaacctgcgggagtcgcagcagctccgatgggatgagagctgggtgcagactgtgctccctttggttatggacacataactcctgggccagaggctaaaaccccaggacccctgctgtccttcccgcagcttcttcttggagtctcagggcaaaccctttcgagcagcacctcccagtggccagaagctgaaatgacagcagtggtactgcctggtaaaagaattggttctgtgacccgggaagctttggttggccttgatttcttctctggaggcttggaaacgcttcctctcttcttctgttcttcacgccccatgcccctgctagcgtattactgttctgtgacttccctgtgacctctgcagaactcctcatcctgcgtttggtctccaggtgtcccctttctgccgtgttcctaacattttgattcctgtcttgaaaaaagcacctgctgcaccgtaagcccagggatgtggcagctgcagtgggcttggctttgtgaggaactgagtgtgtccacgttgggggaacatcatacttgatacacacgtttttatttgcacaaagaaaatgctgtttttggagccaaaaaaaaaaaaaaaaaaaa

SEQ ID NO: 188 - DNA, 1063 bp, Homo sapiens
ggcagagctacgttccagggattacggcatgaacatactgttttcaggaccctatctagcccaccatggtaaggaaacacccaacaaacatcatgcttattaagtttccaggcaggtgcctctctatcccagcttcattgttgtgttcttttcttcacaagtattttcagagctgcccttggccatctggaagatgcatggtgaaagaaacggatgcttgctctcagcacacacttccttccctgacagtttgtcgcctagcagctattttggcttcccaagggaaatcttgtcctttgcccttgtggggcttactgcaaatcaactcatcatgaggaagattaatcagrgaaaagacatacaattttttttttttaaactgtgagcatgaagagaatcacagagtgtatactcaatccccaatgggggcaaaatacttctgtaacctcctttcagtgscgaaggggacatggaatgtaggtaatyctgttgagcggtaataagtgatgaytaggaagattgaatggatacttgggagaatgaatagggggaggaaacagagattgacttattaatggttccctttggaaattaaatactccttggagaccagtcattactttgtaaaaaagtctgtttgagcgggcttacatcttaacgttctttcctgtagtcaagaagaagatcccagggagggagggaaagtgaattgtaataatcccgacatgttcagggagggaccctgtgggaggtcattgaatgatggggggcaggtgcttcctgtgttgttcttatgatagtgattaagtctcacaggatctgatggttttataaagccaggttccgctgcacatgccctcttgcctgccgccatggaagatgtgctttttctcctcctttgccttccgccatgattgtgagtcttccccagccatgtggaactgtgagtccattaaacctgtttcctttatacattacctagtcttggatatgtcttcattagcagcgtgagaacagactaatacagaacggaaaaaaaaaaaaaaaaaaaaaaaaactcgag

SEQ ID NO: 189 - DNA, 804 bp, Homo sapiens
ggcacgagctgatgtgggctggggccagtaggggcaggacaggtgccaggctggctgttcctctgcatgcctggtgcaccctgtggccgctagcccttggccaggccatcctgttgcagatcccagtgctgccacagggacaccaccaggcacctccctaggcaacgccaagcaggaggacctcacccacacccatggcaaagcaaaacaaaagaggcaccccgaccccattctacagaagccccagtccatggtcacctgtattctacctcacactccagcgtgggctttttccaggatgtgccctgagcctgttctgaacagctgtaaccccaactcccccacacaatgtgtctgcctgggaggtaagtaagtccagactgggtgtccaggagctggaacccagagagcgtcctgtccctaaccagccactgcagccctccagctctggccctcagctgcttgacaggacggactgctgggagatggcagccggttggcagggcccttgccctcacaccccgctgcccaggagccaggtctgaacttctgtgcacaggcctggcccctcagactcactcctgccaagaggggccacttcttcagggtgagccccggctatcaggcagccgtgagctccagggcgggctgcagctcccatccccttgcgccatgtttggagtaaagggatcagtggaagtggaggagccacttgggttctcctaagaccagcccttccggaggggccggtcctggaagaaacccataatccctggagtgtgaaaaagggcaaaaacggcacga

SEQ ID NO: 190 - DNA, 2450 bp, Homo sapiens
ggcacgagcggcacgaggtttcttgaggagtaattgtcgggaaagtagataaagtataagctttagaatcatatatttagattcaaatatctggtatcgaatcctggctctgaatttactggctgtgtgaccatgggtaaattacttaaattccttaactctccctgttttccattcctaaatgtgtatgatgaattatttgcagagccatttggaggactagtggtatggaatgcaaactatttatgtctatttactaaaacataaacagagtaaatcaccaagtacagacaggctccaaggaatggtttgcttacttgttcactcttttttgtctttctgattctatcctctgtcactctaggtcttcagtttctttactctccatggtggtgcctggctgctgcgactctaggggtcctttgcctgggattagtagtgaccattatggtgctgggcatgcaattatcccaggtgtctgacctcctaacacaagagcaagcaaacctaactcaccagaaaaagaaactggagggacagatctcagcccggcaacaagcagaagaagcttcacaggagtcagaaaacgaactcaaggaaatgatagaaacccttgctcggaagctgaatgagaaatccaaagagcaaatggaacttcaccaccagaatctgaatctccaagaaacactgaagagagtagcaaattgttcagatttagagtccgaggcgctgtctcccagacatacccttcaggtacctgtgcatatatacaacgaggagctgtttatgcggaaaactgcattttagctgccttcagtatatgtcagaagaaggcaaacctaagagcacagtgaatttgaaggctctggaagaaaagaaaaaagtctttgagttttattctggaatttaagctattctttgtcacttgggtgccaaacatgagagcccagaaaactgtcatttagctggctgcagaactcctttgcagaaactggggttccaggtgcctggcacctttatgtcaacatttttgattctagctatctgtattatttcacctagcttgtcccaagcttccctgccagcctgaagtccattttcccctttttattttaaaatttgactcctcttcaagcttgaaaaccctctgaactcagtcttctttacctcattatcaccttcccctcacactcctaaaattgcatgaaagacagaacatggagaacttgctcaagtgcaggcagagagcaaaaaggggaaatatgtctgggaaaaagtgcacgtgaagaaacaaagaaggacagaggccattccgaaatcaagaaactcatgttcttaactttaaaaaaggtatcaatccttggtttttacactgtggtccatctccagactctaccacttacagacagacagacagacacacacacacacacacacacacacattttgggacaagtggggagcccaagaaagtaattagtaagtgagtggtcttttctgtaagctaatccacaacctgttaccacttcctgaatcagttattatttcttcatttttttttctaccagaggacagattaatagatttaacccttcacaacagttcttggtagaatcatgggatgtgtggcccagaggtaaagaatagaatttctttccctaaagaacataccttttgtagatgaactcttctcaactctgttttgctatgctataattccgaaacatacaagacaaaaaaaatgaagacactcaatctagaacaaactgagccaggtatgcaaatatcgctgaatagaaacagatggaattagaaatatatcttctatttttaggcttctatttcctttccacccactcttcacaggctattctactttaaaggaagcctttttattttgctgcacacaatctagcaggaatctttttttttttttttaagagctgtgtcatccttatgtaggcaagagatgtttgcttttgttaaaagctttattgagatataattaacataaaataaactgaacatatttaaagtgtactatttgataagttttcacaccttgtggagaacatgcatactacaattaagagagtgaacatatccatcatccctcaaagtgtcacaatgctcctcctgatgactcctccccagaaaaccaccaatcggctttcattttgcattttgtagttttatgtgaatggaatcatatagtatgtcttttttttttgtctggcttctttcactttgcataattattttgagattcatatgtctccatcttgatgctcgtatgaattcattcttttaaatgttgaatattcccttgtatggatataccacaattcatttacccatttacttgttgatgacatttgggttgttttagttttgggatattacaaataaagctgctgtgaacatttgtgtacaaaaaaaaaaaaaaaaaa

SEQ ID NO: 191 - DNA, 2385 bp, Homo sapiens
  misc_feature (4)..(4): n equals a,t,g, or c
  misc_feature (14)..(14): n equals a,t,g, or c
  misc_feature (16)..(16): n equals a,t,g, or c
  misc_feature (35)..(35): n equals a,t,g, or c
  misc_feature (2376)..(2376): n equals a,t,g, or c
ctgntcttctcccngnaaccccccttggcatttantatgatggactcatgtcctttgctggtggaaaactgctgatcgtgggagaaaatgcaacagcacacatttttgcaacatacccagctccgtatctatctctggcgaacgcatttgcagatcaagtggtggccaccatgatactcctcataatcgtctttgccatttttgactccagaaacttgggagcccccagaggcctagagcccattgccatcggcctcctgattattgtcattgcttcctccctgggactgaacagtggctgtgccatgaacccagctcgagacctgagtcccagacttttcactgccttggcaggctgggggtttgaagtcttcagagctggaaacaacttctggtggattcctgtagtgggccctttggttggtgctgtcattggaggcctcatctatgttcttgtcattgaaatccaccatccagagcctgactcagtctttaaggcagaacaatctgaggacaaaccagagaaatatgaactcagtgtcatcatgtagtggcatgctcagctctggatttgcagtcagtttgggattctcttcagaaagatggcatctaagtgtctgtgttcttgtaagcctgaggtggaatccacccagttttgtctgctagccatatgggacatctaattggaaaagcatctgcataaaagtttggaaacaatgaccacttctctaccattgtcccccacccccaccccccagaataacgctgactgtcccctgaaacagccttctctcctgccctgtttatttcatcctcgatgggaattcttgctaggtaagcactaataactcggcatcttgacgatagtcccatttgggtggtttcagctgcactatctgtatgaaatggtgtcaccaaaacccttttcttcagtatcgacaaagattacattctgagtaccaaccaaaccctaaattgaaagacaaaactatggtttcagtcaacatattcatgaattagggagctaatgggttaagcttccagttcccgctatgctactggatttgtataaatactgatattctccaaacctagtggtgtagggagcaagagaatgcagctggaaggcacaaggggaggacattgtggcattcagaaactgcaggagacaagatgaatttgagaagccaaatggaatttttaatggaaaccatttatcagattaatctcttgctctcctgcattttagaggacaccaattaatttcctggtctttagtatataataacctaaaataccattgtaacctcagtcatgaaaaatacatcactctgtctttttagctcaaatgtattttcctaattgcccacttgagaacagacatttgacaagttatatcaacgactgtgcttgtccattattttacacatgccctagaagccaaaactgaaagccactggatcctggtctagctgaatcttcagagtgggaggtctccaaaaagatattaccttattgggcttaacaattcacaaggcactttcacacccattatctaatttaatcctcataatgactatgtgaggcaaatgccacattgcccatttttcagataaagaaacaaaatcttagggaagataagttgagttgtccaagagcacactgaaagttgaatgttatctaatgcattcctctacctttcagaagatcagtagctggctgagaatctttgccaaatcttccttgctagccagaagtggaattggcagcttctagaatatgtacacctctggacaaaatgttcctcaatcttaagatacaaagaccctcattgtctgggtctattcccacacttactgagtacagatgaaggaaagtggtagcaatttaatcataactttcatttgctgaaaaacattatgagaaggcctcccttcctaagccacctctggtcttgctaagtcttgatcttgcttcctgccagcaccaaacattacattcaggggatttcctctggctcagtcttttccccttgaagttctctaatagatgttacttttgacaaaagatcgcctatgagttacaagcaccaggggatgctctacatcaagggatgcaccttcagtcaaactgtcaaaaagcccagaattcccaaaggcattaggtttcccaactgctttgtgctgatatcagaacagcagaaattaaatgtgaaatgtttctgatgacttatgttctacaatctatggacatacgggatttttttttcttgctttgaagctacctggatatttcctatttgaaataaaattgttcggtcattgttaaaaaaaaaaaaaaaaaactcgagggggggcccggacccwttgccctagnagaggcgaa

SEQ ID NO: 192 - DNA, 2062 bp, Homo sapiens
ccacgcgtccgatcaattagatgccccgaaatctacagtcgctgaataaccaataaacagtaacctccatcaaatgctataccaatggaccagtgttagtagctgctccctgtattatgtgaacagtcttattctatgtacacagatgtaattaaaattgtaatcctaacaaacaaaagaaatgtagttcagcttttcaatgtttcatgtttgctgtgcttttctgaattttatgttgcattcaaagactgttgtcttgttcttgtggtgtttggattcttgtggtgtgtgcttttagacacagggtagaattagagacaatattggatgtacaattcctcaggagactacagtagtatattctattccttaccagtaataaggttcttcctaataataattaagagattgaaactccaaacaagtattcattatgaacagatacacatcaaaatcataataatattttcaaaacaaggaataatttctctaatggtttattatagaataccaatgtatagcttagaaataaaactttgaatatttcaagaatatagataagtctaatttttaaatgctgtatatatggctttcactcaatcatctctcagatgttgttattaactcgctctgtgttgttgcaaaactttttggtgcagattcgtttccaaaactattgctactttgtgtgctttaaacaaaataccttgggttgatgaaacatcaacccagtgctaggaatactgtgtatctatcattagctatatgggactatattgtagattgtggtttctcagtagagaagtgactgtagtgtgattctagataaatcatcattagcaattcattcagatggtcaataacttgaaatttatagctgtgataggagttcagaaattggcacatccctttaaaaataacaacagaaaatacaactcctgggaaaaaaggtgctgattctataagattatttatatatgtaagtgtttaaaaagattattttccagaaagtttgtgcagggtttaagttgctactattcaactacactatatataaataaaatatatacaatatatacattgstttcactgtatcacattaaagtacttgggcttcagaagtaagagccaaccaactgaaaacctgagatggagatatgttcaaagaatgagatacaattttttagttttcagtttaagtaactctcagcattacaaaagagtaagtatctcacaaataggaaataaaactaaaacgtagatttaaaaagaactgcacgggctttagggtaaatgctcatcttaaacctcactagagggaagtcttctcaagtttcaagcaagaccatttacttaatgtgaagttttggaaagttataaaggtgtatgttttagccatatgattttaattttaattttgcttcttttaggttcgttcttatttaaagcaatatgattgtgtgactccttgtagttacacttgtgtttcaatcagatcagattgttgtatttattccactattttgcatttaaatgataacataaaagatataaaaaatttaaaactgctatttttcttatagaagagaaaatgggtgttggtgattgtattttaattatttaagcgtctctgtttacctgcctaggaaaacattttatggcagtcttatgtgcaaagatcgtaaaaggacaaaaaatttaaactgcttataataatccaggagttgcattatagccagtagtaaaaataataataataataataaaaccatgtctatagctgtagatgggcttcacatctgtaaagcaatcaattgtatatttttgtgatgtgtaccatactgtgtgctccagcaaatgtccatttgtgtaaatgtatttattttatattgtatatattgttaaatgcaaaaaggagatatgattctgtaactccaatcagttcagatgtgtaactcaaattattatgcctttcaggatgatggtagagcaatattaaacaagcttccactttaaaaaaaaaaaaaaaaaaaaaaaaaaaaaaaaaaaaaaaaaaaaaaaa

SEQ ID NO: 193 - DNA, 1716 bp, Homo sapiens
ggcttttgcaaaaagctatttaggtgacactatagaaggtacgcctgcaggtaccggtccggaattcccgggtcgacccacgcgtccgctaagataagggctttcttaagctttcaggtgtatgtatcctctagatgtagacaataatgtcccatttctaagtcttttccttttgcttctccttaaattgattgtacttccaaatttgctgttatgtttttttcctaatactgtgatctatctgatctgcagacaagaaccttgtctctgttgaagagcatcaaggggagattatgtacacattgaaactgaagtgtggtgttactgacggaatgtgcagtaactcctcagatatctgttaaggcatttcccagatgtgatgccagccttcttacctgtactgaaagatgcttagcttagaaaaaaacaaaacagatgcaaaatcagataattttattttgtttcatgggttttcttatttacttttaaacaaggaaggaatattagaaaatcacacaaggcctcacatacatgttatttaaagaatgaattgggacggatgtcttagacttcactttcctaggctttttagcaaaacctaaagggtggtatccatattttgcgtgaattatgggtgtaagaccttgcccacttaggttttctatctctgtccttgatcttctttgccaaaatgtgagtatacagaaattttctgtatatttcaacttaagacatttttagcatctgtatagtttgtattcaatttgagaccttttctatgggaagctcagtaatttttattaaaagattgccattgctattcatgtaaaacatggaaaaaaattgtgtagtgaagccaacagtggacttaggatgggattgaatgttcagtatagtgatctcacttaggagaatttgcaggagaaagtgatagtttattgttttttcctcgcccatattcagttttgttctacttcctccccttccttccagatgataacatcacatctctacagtaagtgcctctgccagcccaacccaggagcgcaagttgtctttgccatctggtctatagtacagtgcgcggcgttaggccacaactcaaaagcattatcttttttagggttagtagaaattggtttatgtgatgggaggttggttgattgtcaaaatgtacagcacaggcttttaatttgggaagcccctggtggcatttcaaaaggggacctcttacaggttggtaaaaaggtattaagattcttactaatctgtgggttgtgccttgccagacaggtcctaaattgtatattttttggaaaagtttatatactctcttaggaatcattgtgaaaagatcaagaaatcaggatggccatttatttaatatccatttcatttcatgttagtgggactatttaacttgtcaccaagcaggactctatttcaaacaaaatttaaaactgtttgtggcctatatgtgtttaatcctggttaaagataaagcttcataatgctgtttttattcaacacattaaccagctgtaaaacacagacctttatcaagagtaggcaaagattttcaggattcatatacagatagactataaagtcatgtaatttgaaaagcagtgtttcattatgaaagagctctcaagttgcttgtaaagctaatctaattaaaaagatgtataaatgttgttgaaaaaaaaaaaaaaa

SEQ ID NO: 194 - DNA, 788 bp, Homo sapiens
ccacgcgttcggaaggcctgccctcagagtgcagatccgtcacagactaaggagatggcaggcattgacagcttcactccatgaaggccatctctgtttctctcctccgcttaaccaagctgttgtggtttttcagcatagtgttgtatgttccattgctagctgtcctgctgtttaacacagtgttgtattttttttctaaatgtacataattagaaaagaaaataacaataggaagctatgtgtatcttctgtgtaaagcagtggcttcactggaaaaatggtgtggctagcatttccctttgagtcatgatgacagatggtgtgaaaaccatctaagtttgcttttgaccatcacctcccagtagcaatttgctttcataatccatttagcaatccaggcctctgttgaaaagataatatgagggagaagggaacacatttccttctgaacttacttccctaagtcactttccttatgtatcatctaatacaatgatggttgagtgaaaatacagaagggtgtttgagtattcagatttcataaaacacttccttggaatatagctgcattaacttggaaagaagcctgttgggccagaagacagaaactccaactggcaaaaaagcaagcatctaagaaaaaaaaccaccaaagttcttgaatttactatatttaaatgcattggttaagtttattttgctaaataaagtgaactgctttttgctctaaaatgatattctaaataaaaccttaactttttgttgaaaaaaaaaaaaaaaaaaaa

SEQ ID NO: 195 - DNA, 1146 bp, Homo sapiens
  misc_feature (297)..(297): n equals a,t,g, or c
  misc_feature (489)..(489): n equals a,t,g, or c
ggtcttgatcttgttaccgaaatgcattctgtgtaatttcaacgtagactacgttcctgagtctgatgatgtcattgtaaataatcattcctcatgttgctctcacgggtttgacattggaggatagatgtgccatcaactttaaatagagtttccatcttttgtcagctctgcatgtcatacagcaagatggaacacaggttgcaagaaagaaccaacgttattcctgacattctattgatgtgttttgagcagcaatgtgtaaccaggtgtttctgcttctaatcttgattctgnctgatgaccatttttatactttatggcaaagcctcattgcctcagtttcctgtctggaaaatgagttcatcatctacctcttgggcaattgagagttttcattttgtgtcttttaaacatctggaaaatggaaaacactgagggctaaggataatgatattgttaatgtaatttgtcatcagaccggcctcntgctcactatttctttttttttagatgctgtttttttagaatattaaattaaaggagtgctgttaatatgtaatcttcaactagttccatggaggaaagtgatgttttatgaattagagcttaaattcctatctaatttctgaagactgcattcttttcaaagacttgaaattaaactcaggaggatacattttgtttgttctagggggaaacgtaatagaatggtatgagatgaattctatccttttacaataattattactataatattgaagtmttctatgcctttctgaaacactttattcagaaaagatcattttttggcttccttttaaaaataagcttgaagtagggaagcatttgcttcttagattttaaatgtagtcttattatgctgaggaaaatctttagttgaaaggataattcattacagatttttgatgaagggaagaaattaattatgttgctggaagactgtctacaaataatcaaaatatttaaatgtaatgtattcaagttgttattaaaaagttactgaatgttatctgaagatgtgaaatgtgtagtcaagtaaaaagttggcgtatactttcttgggctgcatatccaatttaattaaaaaattaaatctcaaaaaaaaaaaaaaagggcggccgc

SEQ ID NO: 196 - DNA, 2967 bp, Homo sapiens
ggggactcagtggagcagcggggagttgtgtccaccttgccgacgtcgctagccgtggggctgtcctgggaaggcggacggcgagcgcccggtgtccgcactcggccgcctgccgtgcccgtctgcgcccgtgtcatcctcactcgggacgcagggaccgtttttaaatcacaggggcgtgtgtcagcctgccctaggacttcatgtctatatatttccccattcactgccccgactatctgagatcggccaagatgactgaggtgatgatgaacacccagcccatggaggagatcggcctcagcccccgcaaggatggcctttcctaccagatcttcccagacccgtcarattttraccgctgctgcaaactgaaggaccgtctgccctccatagtggtggaacccacagaaggggaggtggagagcggggagctccggtggccccctgaggagttcctggtccaggaggatgagcargataactgcgaagagacagcgaaagaaaataaagagcagtagagtccctgtggactcccatgggtcataccagccagcatctgttcctgaactgtgtttttcccatcatgacggaagaagagagtgagccgcaattgttctgaaaatgtcaaacgaggcttctgttttgcacctgcagatcaccgagttggttttcttttcttttcttgcctttttttttttttgaaatttgccgagcagtggagccctctgacaatttgcaaggccctctgagaaaggaagctgcttagagccagggggttagtgggtgaggggagcgagtgctgtttttgagatcattatctgaactcaggcagcctagtagaggcagtggtgggattccaatgggtcttggtgggtgggaggtggggcatgtgcaaagcaagcaaggaacatttggggtaagaaaacaaacatgaggcaaaagaaaaaatacatgtttttaagaaaacattgagcagagaactgcagccaggatgcgctcagcagacattcactctggctgctgggacatcagaaaacaaagtcttcatctctctctccagtttcacccaccccaccctttgctttcatttcaggtgtgttggtctatatgacagggaggagagtaaaggagagcaggagcaattggctgcctgcaaagccagctggaggtgaagtgcaggaaaggaaaggtcaccccattctactccatggcctctctgctcccagctgtggtaggctcacatagccagtgtgatcggtttttaagaggcagtgcttttcagcttttctccctgatatatccattttgcttcccagcactttttaggagtagtgagagcacttcctgcccttgttggaagccccagggtggacactcagcacgaaggtctctcccttaactgctgcccttccaagacttgctcccgagatggagtgggcgtggtcttccaggctggcccttccttctcctcaccgccaccttccctgccccagccccagcagccatgggtacatgggtccccagctcacctatggattcccgccagtctgcccagctgcagtactcacgccccatgggggatcttggtctgtttttcttgtgggagcctagtggagagcagacgtggctttttatgtgtcttgttggggaggtgacttgcatggtggggacaaggctgtcgtggcaaccttgggatcgagtttgagactaaaggatgtcatgagatccctggcttctccccatgttgttcccggacaagggcagaagggaggcatggcaagggacctctgctgtccttactcaacagtggtcctcatccctccccacctcccactgcttcctgcaagggcaccagttgtatgagaaagttggcctttggacttaggatttcttattgtagctaagagccatctgaagcagcaggttgcaggacaaatgcttcagtccgccgagagcagtaccgtgtggccaagaggtggactcagagccttccttgagctaaactcggccaaccaaggcacgcagcatgtcccctcaggtctccagtcagtccaggttgaccctcagttctggacgtgtgtatatagctgtatttaatacctcaaggtcattgtggctctggggatgccggggcaggaggacgagggtgcgctgtggacacagcagtccgcggaattccgttctgggaagccaatggtcgccggcaccccttgcttcctccctctgttgtctgcctgtgtgacacacatcaatggcaataacttcttccaactcctcgcagaagtgggagaggccggcagcctgcaccgagaggggctttcctctctcttgctccccgcttcgttctgttttggctgcagagagtggttcatccatactctcattccctcgcctccccttgtggacgggggtcttgccttttcaattcctgtgttttggtgtcttcccttatctgctaccctgaatcacctgtcctggtcttgctgtgtgatgggaacatgcttgtaaactgcgtaacaaatctactttgtgtatgtgtctgtttatgggggtggtttattatttttgctggtccctagaccactttgtatgaccgtttgcagtctgagcaggccaggggctgacagctaatgtcaggaccctcagcggtggagcctgctggggggacccagctgctcttggacaagtggctgagctcctatctggcctcctctttttttttttttcaagtaatttgtgtgtatttctaactgattgtattgaaaaaattcctagtatttcagtaaaaatgcctgttgtgagatgaacctcctgtaacttctatctgttcttttttgaggctcagggagaaactagcatttttttttttccaaactactttttgtcactgtgacagttgtaaataaagtttgaaaatgctttccaaaaaaaaaaaaaaaaaaaaaaaaaaaaaaaaaaaaaaaa

SEQ ID NO: 197 - DNA, 752 bp, Homo sapiens
ccgcttaatacagtatcctttcgatagcatctaaattggtgttttgttttgttttgttttcaactgttattagtaggcaaagccttctttcaaaataaaatcgacatgaagcctgtgggatttagcagactgaggcaaagcttccctggttgctttggaatgggaggcctggacctgctggctctttgccctcctgacacatcatcccttgtttccacagcacactcagcattggaagcacactgcagacggtgtctcattaaagcagtagctcccttgaacccacaagttaaaacgccagacttttatttatttgtttattttttctgagttcttattggcagacttcagaatgaggtacctgaggaaatatagaaacctctgccttaaggttgattttactaaatgctctattttctggtgcagttattgactgtcttatctcttttgtcaggaatgtcttttttaattagaagacaggaagaaaacaaaaaccagactgtgtcccacaatcagaaacctccgttgtggcagaggggccttcaccgccaccagggtgtcccgccagacagggagagactccagccttctgaggccatcctgaggagttcctgtttgggggtgtgagggaaaatcagcgcggattttaaaaagatggctgtggcctgcccggcgtggtgggaggggagctggtttcctggtgaactttctaaaaggaaaaataattttaagtaaagaaaaaaaaaaaaaaa

SEQ ID NO: 198 - DNA, 640 bp, Homo sapiens
ccacgcgtccggttacaatttgggtcagaaacggagagatctgtgttaatttttgcagaacttactgatttttgttcttttattgctcttgtcattaggatgaaaaccaaaaaagtatcttcagaggaaaaaaatcaccttttaatattgctagttagaaaatgtcatgaacagtgtatcttagaaatataatattctacttatttacacatgtcaaaatttgtgtctcttccagtgttccttgcctgtatctccccttggttcaatagctaccagatttttggaagaggaggaactgaggtctcatcacattctagagcgcttggatgcccatattgaagaactaaaaagagagagtgaaaagacagtgagacaattcacagccttaaagtagcctcttaaaaaaatcacaatcttggaaataaaaataaacaccaaagagttactgtcatctgaagtagcagctctttaaaaacatgaagagataaaattataaaaatgatacatctaaagcagtggtgaagaaagctgaaaaactgatacttttgataggcattttctctgcactggtttgtttaaaggacttcttccagcaataagttgaaagaataaaccactttgctagaaaaaaaaaaaaaaa

SEQ ID NO: 199 - DNA, 443 bp, Homo sapiens
ggcacgagagcgcccatcctgcagctcaactgggagcatcattctcctgctttgtacatagggtgtggtcccctggcacgtggccaccatcatgtctaggcctatgctaggaggcaaatggccaggctctgcctgtgtttttctcaacactacttttctgatatgagggcagcacctgcctctgaatgggaaatcatgcaactactcagaatgtgtcctcctcatctaatgctcatctgtttaatggtgatgcctcgcgtacaggatctggttacctgtgcagttgtgaatacccagaggttgggcagatcagtgtctctagtcctacccagttttaaagttcatggtaagatttgacctcatctcccgcaaataaatgtattggtgatttgaaaaaaaaaaaaaaaaaaaaaaaaaaaaaaaaaaaaaaaaaaaaaaaaaaa

SEQ ID NO: 200 - DNA, 1190 bp, Homo sapiens
ggcacgagaacagatggaccattgacaatccatatatttagaaatgatcaaacctaatgttttccttttttaagatgaaagtaaacataaatagagatggtatttttttctgcaattctctttttatacatcttatatctctttgcagattacagttctatatttgacttcccataacatgtcacaggacatgtgctttaaatcccccacaagttgttctcttgtggatatagtctaggtcttctgggttgtcccaaaatatgatgtgcacagacacaaacatattctgtatattggttttggattaacacagaatgcagtgggatttccttcctattatcattatatttcccttaatgcagtccaagatatgtattagtgtctaaagaagtataccacatccttaggtcttttaaaaagtatcatctgcctcttgggactctgggctatctttactaatccatctcaagtattattttggtctctcctttccactaaaactaaatatcctccactctgctgtcctaccaaattaatgtatggccattggcagtaaactcctttatacttagtgctttctcaattttaaaatgtttgaatattacactgatgcagaagttatttcataagcatagctttttcttgtgtggggtggaaagggaagaggattaaatcactgcctcacttgagcacatacatagctggaaaatgtgtggaaagtttcttgatgttgagaaaaaaagacagtgtcttgttaatcaataaattccgtttatttttcttttactatgtcctttactatatcataactgtagccttgctatatcctgaactcctcacaaaggccttctctgagccaactaaattaatgataaagaattgtaattcttggctgggtgctgtagttcacgcctgtaatcccagcactttgggtcactgaggtgggcagatcacctgaggtcaggagttcaagaccagcctggccaacatggcgaaaccccatctctactaaaagtacaaacattagctgggcatggtggcatgcacttgtagtcccagctactcgggaggctaaggcaggagaatgacttgaaccctggaggcggaggttgcagtgagccaagattgcaccactgcactccagcctgggcaacagagcgagactccatctcaaaaaaaaaaaaaaaaaa

SEQ ID NO: 201 - DNA, 1204 bp, Homo sapiens
ggcacgagcccacgccaaacctctgggctggccaggctcactccagccccacagtcattgccaggactgcctttgaccttacacagaggaaacatcttccacctgtcgggagggagccgggggcggggatttccatggcaaaatttactgttctctggtgatagagttctttcagttttgctacatggtcttgtggcaaaggactgggtgcaggtgcagccttggttatttctggaaacacttctccttttcttttattttgccaggtctggctcatcagtcaccttcctctcagaaaggtgattttggctcctctgcccagaccatcaaacatttctggaggtgtcacaagcttccgtgaggttctggtctctgcgaattgcaggaagaatccaaacataggaaaggggtgatgtgtatcagggtgtccatcctcagctttgctccacaaagaccctcacacttgcacattgttttgttaacagtattatctctgagtagtgggtttattgtttttgcttacctgttttaaacacttcttcaacaaacttgctttactttccattttttaaaagtgtatttcaattttttattaataatgccattttactcctgcaaaatttctcactccttcaaagtctgtgtatggcaaagatcttcctaaccatcattcaagttagagcaactccatttctgtatcaaaaagaaatacctttagttattgtctgaacttgtcagaatttctgagaacgatgccagaaattctgtaattgttttgtcacattaattgaacaatgagagggcaccagcattcctcactcatgaggtagaagcaccacatctacatttctttttagctatgggtgatgtttttgcttttaaatcttagaaatctgttaataaacaaataacacaacaaagtttggggtacttccttgtggggactgggatgcttaagctaaaacaaagtttaaatttggactgtgtgtgttatgtttcgcagaatctatatgtttctcaaaagtgggtgtcaccctccttcctcccccaacacacccttcaggggtaagaggagaagtaatgtagaaaaattaactgtttctccactgtaaaagtagggtgtctttagaatgtttcatgttcaaaggaaagattgtgcttctcccaaggcaaggtgttcccttaaaaaaaaaaaaaaaaaaaa

SEQ ID NO: 202 - DNA, 2641 bp, Homo sapiens
gccttctccaaaattggcatctcttatagatggttcatctcctgttagtattttggtctggaccacacaaccttggacgattccagccaatgaagctgtttgctatatgcctgaatcaaagtatgctgttgtgaaatgttctaagtctggagacctctacgtactggcggcagataaagtagcatctgttgcttctactttggaaacaacatttgagactatttcaacactttcaggtgtagatttggaaaatggtacttgcagtcatccattaattcctgataaagcctctcctcttttacctgcaaatcatgtgaccatggcaaaaggaacgggattggttcacacagccccagctcatggtatggaagactacggtgtagcgtctcagcacaacctgcccatggattgtctagtggacgaagatggagttttcacagatgttgcaggtcctgaacttcaaaacaaggctgtccttgaagagggaactgatgtggttataaagatgcttcagactgcaaagaatttgttgaaagaggagaaattggtgcatagctatccgtatgactggaggaccaagaaacctgtggttattcgtgccagcaagcagtggtttataaacatcacggatcttaagactgcagccaaggaattgttaaaaaaggtgaaatttattcctggatcagcactgaatggcatggttgaaatgatggacaggcggccatattggtgtatatcaaggcaaagagtttggggtgttccaattcctgtgtttcatcataagaccaaggatgaatacttgatcaacagccaaaccactgagcatattgttaaactagtggaacaacacggcagtgatatctggtggactcttccccctgaacaacttcttccaaaagaagtcttatctgaggttggtggccctgatgccttggaatatgtgccaggtcaggatattttggacatctggtttgatagcggaacttcatggtcttatgttcttccaggtcctgaccaaagagcagatttgtacttggaaggaaaagaccagctcgggggttggtttcagtcatccttattaacaagtgtggcagcaaggaagagagcaccttataagacagtgattgttcatggatttacccttggagaaaagggagaaaagatgtccaagtctcttgggaatgtcattcatcctgatgttgtcgttaatggaggacaagatcaaagcaaagagcctccgtatggtgctgatgtccttcgctggtgggtagctgattccaatgtcttcaccgaagttgcaattggcccatccgtgctcaatgctgccagagatgatattagcaagcttaggaatacacttcgctttcttttgggaaatgtggctgatttcaacccagaaacagattccatccctgtaaacgatatgtatgtcatagaccagtacatgctacacttactgcaggatttggcaaacaagattaccgaattatacaaacaatatgattttggaaaagttgttcggctgttacggacgttttataccagagagctctctaacttttatttcagtataatcaaagataggctctattgtgaaaaggaaaatgaccccaaacgacgctcttgtcagactgcattagttgaaattttggatgtaatagttcgttcttttgctcccattcttcctcacctggctgaagaggtgttccagcacataccttatattaaagagcccaagagtgttttccgtactgggtggattagtactagttctatctggaaaaagcccgggttggaagaagctgtggagagtgcgtgtgcaatgcgagactcatttcttggaagcatccctggcaaaaatgcagctgagtacaaggttatcactgtgatagaacctggactgctttttgagataatagagatgctgcagtctgaagagacttccagcacctctcagttgaatgaattaatgatggcttctgagtcaactttactggctcaggaaccacgagagatgactgcagatgtaatcgagcttaaagggaaattcctcatcaacttagaaggtggtgatattcgtgaagagtcttcctataaagtaattgtcatgccgactacgaaagaaaaatgcccccgttgttggaagtatacagcggagtcttcagatacactgtgtcctcgatgtgcagaagttgtcagtggaaaatagtattaacagctcactcgagcaagaaccctcctgacagtactggctagaagtttggatggattatttacaatataggaaagaaagccaagatttaggtaatgagtggatgagtaaatggtggaggatgggagtcaaaatcagaattatagaagaagtatttcctgtaactatagaaagaattatgtatatatacatgcagaaatatatatgtgtgtgtgtatctgtggatggatatatgtatatctcttcctatatatatccatagtggacttattcagaacatagatatgtattcagcttgtcttcaaatacggccaagcagaaaatgttttatattttataaatcatcttttgactctgtatttaaattctatgatactgaaaataaaggcattctggaaaaatactgaaaaaaaaaaaaaaaaaaaaaaa

SEQ ID NO: 203 - DNA, 2836 bp, Homo sapiens
  misc_feature (152)..(153): n equals a,t,g, or c
aattcggcacagccgcggcagacggcgaggacggacaggacccgcacagcaagcacctgtacacggccgacatgttcacgcacgggatccagagcgccggcacttcgtcatgttcttcgcgccctggtgtggacactgccagcggtgcagcnnacttgggaatgacctgggagacaaatacaacagcatggaagatgccaaagtctatgtggctaaagtggactgcacggcccactccgacgtgtgctccgcccagggggtgcgaggataccccaccttaaagcttttcaagccaggccaagaagctgtgaagtaccagggtcctcgggacttccagacactggaaaactggatgctgcagacactgaacgaggagccagtgacaccagagccggaagtggaaccgcccagtgcccccgagctcaagcaagggctgtatgagctctcagcaagcaactttgagctgcacgttgcacaaggcgaccactttatcaagttcttcgctccgtggtgtggtcactgcaaagccctggctccaacctgggagcagctggctctgggccttgaacattccgaaactgtcaagattggcaaggttgattgtacacagcactatgaactctgctccggaaaccaggttcgtggctatcccactcttctctggttccgagatgggaaaaaggtggatcagtacaagggaaagcgggatttggagtcactgagggagtacgtggagtcgcagctgcagcgcacagagactggagcgacggagaccgtcacgccctcagaggccccggtgctggcagctgagcccgaggctgacaagggcactgtgttggcactcactgaaaataacttcgatgacaccattgcagaaggaataaccttcatcaagttttatgctccatggtgtggtcattgtaagactctggctcctacttgggaggaactctctaaaaaggaattccctggtctggcgggggtcaagatcgccgaagtagactgcactgctgaacggaatatctgcagcaagtattcggtacgaggctaccccacgttattgcttttccgaggagggaagaaagtcagtgagcacagtggaggcagagaccttgactcgttacaccgctttgtcctgagccaagcgaaagacgaactttaggaacacagttggaggtcacctctcctgcccagctcccgcaccctgcgtttaggagttcagtcccacagaggccactgggttcccagtggtggctgttcagaaagcagaacatactaagcgtgaggtatcttctttgtgtgtgtgttttccaagccaacacactctacagattctttattaagttaagtttctctaagtaaatgtgtaactcatggtcactgtgtaaacattttcagtggcgatatatcccctttgaccttctcttgatgaaatttacatggtttcctttgagactaaaatagcgttgagggaaatgaaattgctggactatttgtggctcctgagttgagtgattttggtgaaagaaagcacatccaaagcatagtttacctgcccacgagttctggaaaggtggccttgtggcagtattgacgttcctctgatcttaaggtcacagttgactcaatactgtgttggtccgtagcatggagcagattgaaatgcaaaaacccacacctctggaagataccttcacggccgctgctggagcttctgttgctgtgaatacttctctcagtgtgagaggttagccgtgatgaaagcagcgttacttctgaccgtgcctgagtaagagaatgctgatgccataactttatgtgtcgatacttgtcaaatcagttactgttcaggggatccttctgtttctcacggggtgaaacatgtctttagttcctcatgttaacacgaagccagagcccacatgaactgttggatgtcttccttagaaagggtaggcatggaaaattccacgaggctcattctcagtatctcattaactcattgaaagattccagttgtatttgtcacctggggtgacaagaccagacaggctttcccaggcctgggtatccagggaggctctgcagccctgctgaagggccctaactagagttctagagtttctgattctgtttctcagtagtccttttagaggcttgctatacttggtctgcttcaaggaggtcgaccttctaatgtatgaagaatgggatgcatttgatctcaagaccaaagacagatgtcagtgggctgctctggccctggtgtgcacggctgtggcagctgttgatgccagtgtcctctaactcatgctgtccttgtgattaaacacctctatctcccttgggaataagcacatacaggcttaagctctaagataggtgtttgtccttttaccatcgagctacttcccataataaccactttgcatccaacactcttcacccacctcccatacgcaaggggatgtggatacttggcccaaagtaactggtggtaggaatcttagaaacaagaccacttatactgtctgtctgaggcagaagataacagcagcatctcgaccagcctctgccttaaaggaaatctttattaatcacgtatggttcacagataattctttttttaaaaaaacccaacctcctagagaagcacaactgtcaagagtcttgtacacacaacttcagctttgcatcacgagtcttgtattccaagaaaatcaaagtggtacaatttgtttgtttacactatgatactttctaaataaactctttttttttaaaaaaagtcgacgcggccgmgaatttagtagtagtagtagtagtagkmggccgc

SEQ ID NO: 204 - DNA, 1607 bp, Homo sapiens
ggcacgagcggcacgaggaagcagccacgcctggaaacaattaaccagcgtatttctggctttgtggatggatggatgatggcacccatatggagctttggacctaaactttatgtggataagagttggctttttggtcttcaagacccctggcctgcgtactccagcagcaggagagcggatttacaacatctcagggaatggcagccctcttgctgacagcaaagagatcttcctcactgtgccagtgggcggcggagagagcctgcgattattggccagtgacttgcagaggcacagtattgcccagctggatccagaggccttgggaaacattaagaagctctccaaccgtctcgcccaaatctgcagcagcatacggacccacaaatgagacaccaaagttgacaggatggacttttaatgggcacttctgggaccctgaagagacttcttcccttcaggcttattgtttgagtgtgaagttccagagcaaggagccatgttcctctaagggaattcaggaattcagacgtgctagtcccacaccagttaggtagagctgtctgttcaccctcccatcccagctgatcccagtcactgcttgctggggccatgccatggaagcttcccatcagtctcccagctgaatcctccctgctctctgagctgctgccttttgcctcctgcaactcaacatcctcttcaccctgccctgcctgcagttgagggggcgaagaagaaccctgtgttctcaggaagactgcctccaccaccgctacccagagaacctctgcatctggcatttctgctctctatgcttgagaccgggaggtttaggctcagataagtgagctctgggccatgagagggtaggtccagaaggtggggggaactgtacagatcagcagagcaggacagttggcagcagtgacctcagtagggaacatgtccgtctaccctctcgcactcatgacacctccccctaccagccctcctcttcctcctcctcctcctcctgtggaggtggtcagtgggacttagggatctttcacctgctgtgcccagtagttctgaagtctgcttgtggagcagtgttttatgtttatccctgtttactgaagaccaaatactggtttggagacaacttccatgtcttgctcttctacctccctagttagtggaaatttggataagggaactgtagggcccagattctggaggttttatgtcattggccacagaataactgtctctaagctatccatggtccagtggtccctgccaagtctgtagacttcagagagcacttctctcttatggggttcatgggaacaggggcgggtgtgacttgcttggtggcctcattccatgtgtgcctgtgcctggggcatggactttgttaagcagagtcagcagtgaggtcctcattctccagccagcctctctgccctggagaatcatgtgctatgttctaagaatttgagaactagagtcctcatccccaggcttgaaggcacatggctttctcatgtagggctctctgtggtatttgttattattttgcaacaagaccattttagtaaaacaaaaaaaaaaaaaaaaaa

SEQ ID NO: 205 - DNA, 1064 bp, Homo sapiens
ggcacgaggaagagtcagccttcttcttttcctggcctaggtagtagagctcatatagaaaaagtgagacaatattggtacaaaactacattatttattgcttccactgaaatgtcaagaggcagcaggtgaggcatgaggatgggcagttctcagaagttttcctgaacctacaggtttatgttaatttttttatgtataatttgtcttccttgtttatgatctcatttctagtctgccatgtaaccccttctcaaactttaaaaggacctcccttgagctggagctaacgagaccatttcttgtctgcttacaattttaaaaaaaaagctatttgcaagtaatttttctcattatgatgctgttatcataaagtgagattccagtagccagggtgtcaagggatggtatatggacagtgcaactttgacttactttactctacttagtcaaattttaactattttctggttcctttcatttgaatataatagttaaaataatgcagaccattcacagttcatatgttctccctttgtttttctctgactccacatgcactgacatgtatagtttctgctgaatttattaatttggtccagtttattcctgctgttaactttgatttcttttcctcctcttatctaatatttttcactatgatcagtatgttccatgaaatatatatattccttatttttctctcctaaagtataaacaaattgtcattgggaaaggagaacacttttctctgactcacataatgtagtagtaatcattcatattttacttatttgtggctgcataattgtaataggaagagtgtgtggccagggtgagcgaagccagaaaatatgttgctttggtagtttttccacattgctctcaaattttcatatattttgcttatttactggsccgtgtgtgacagtagtcacacaaatagtacctattattgtctaacttggggatgccatggggaaaggtgtarattttcttggcactggattctgcaacacttgattaatcttaattctatggcaaaaaaaaaaaaaaaaaaaaaa

SEQ ID NO: 206 - DNA, 1323 bp, Homo sapiens
aggcccagcaccacgggcctttccccaggccagggggaggaccacctaaggattcaagggcagctcctgttttcttggttctgtgaacactcgagtctgagccagcccctcaggaattgcctcaaaagagaaaaacaaaaaaaagtcctccttcccaaggcctgctactccaaggtttggctccatcccttgcctttgggtcctgcctatttccccactcctggtctcttatctttggggccaccagtggggagtcacccgggccccaatccctctaaggcgctaagttgaaggaggccttcccagagtgactattggtgccaaagtcccagttcctgttggacttggggtaaaaacaggagatggtgagtgggtgtaaggcccaaatgcccagagaagttaactcgaacccatgggacctgtcccagcctgtcagtccctgatgagtgtaacttccttcccctgggggcctggccyttctctccaacccagtggccatgctttctcacccagccttgtgcccggcctgcatttctgtatatattgctgtgtattgtgtgtatgtatgtattcctggacaagtgtgttcatctgcagcccttgcctgaggataaggtttaggattgggtaaagatcagaataccagggccagctaaggcaacgactccctccccaaacccttgggacctcagccagtcccaaggctgccctgacaatcaggcaggctccccaccgtgaggccaagcctcctctgccactgccagcatggcccaagggaggcttggccttgggcttgccagcctcagctctgccctgacaagggtcttgtatccagggcagaggcctgaggtgacccaggcttgctttgtggctgatgccagcaggcttggttctagtgggcaccactggtgggcaacctccataactggcccttaggccctaccttcctacacagctaggctataatgggcctgagtgagagggtagcttccccagccccaagcacaggcagaggggtggagagcaatttttggttttatttttgtttctgaagtggtgcctgtacctccagcccccagggggccttccctggccacacttctctgccccacccaggcatcgccatcccagcactttgctccatgtcacccgtaagatgccctttgctgaatgtacctgagtgtatgtatttaaaaggactcacatgggcatcagagaatttatggctctgtatccaataaaaaagatggtgaaactggwmaaaaaaaaaaaaaaaaaaaaaaaaaaaaaaaaaaaaaaaaaaaaaaaaaaaaaaaactcgag

SEQ ID NO: 207 - DNA, 1738 bp, Homo sapiens
ggcacgaggaaggcttaaattaagtatgttgacaataccccaaactactggatgatatttgtaatgaatttcaccctatatcagtacagaagggtgtcacagttcagcaaaacaaaagagaatacgctttgttaaacctctactttctgaattttaggacagtgaggaaatttaacattttcaatttttttttcttttcttgactgaaaagaaagtcaagccagcaatatgtttctgagagagcagtgatgcatttcacaacactgttaactgtctgcttggctttttgaggcttccagagttcagaattgtcttctcttgaataggtcagtgcatttttttccttcagtttttctccttaagcagcaaaacagaccatttaacttccaaatatttacagcttgcaaacagataaacttcccaaatctgttttttttttatgaaaaggaaaacgatcagccacaataatctataatatgatatatttgaatcaaagttattagatgccctagggtcttttcatggcagattttatatatcaccaccattaataaatctgttatcagaattatgtctttctctctgctgatagttatttttagactaacatattcatacctccttctgatgaaaaacattaaaatttgaataaggcatattagaaaaccctaaagctctgtatttacacaaaggagactcataaatattggtttttcagggtgaagcattgtgtgttattccattttgtaccacagggaaagcctagtcacacatggggcctcattaaaagaggatctaaagaaatatttaatggttgaaatataaggtcttattctgaatatctaccttcactttataataatagaaactgaactgaaaagattcagtaagtgatttagaacatccactcattttaaaagtaatgtctaggcctaggaaagtgacatcatgttccaaatgttacaaatccagcgtttttccttgatgtctttataaatacattgtttacagtttttattctcctccatatatgatgccccttttctaagattatttcgtaggtatatcctttaatgagagaacctcataaataaacttcctgaatttgaaaacgagtgagaggagacttcaagtttgtggactgagctaaacatgtgtctactctcccttcaaacatcccatggaaatggcagtaaagacagaacaaagagaatacatttctgaatatactgaggaacatatactccagagagcagaaacaggaagaggggcctctgctaaagctgaaggagtcttcaggaggtaacccagctgggctctgtgttctggttggcagatacagagagtagccaaggtcaaaagcagacaaacagaaagtgaggtgattggccacaggtttggaaatggctcaggtttgctctttccaaccccttgcatgtcactgcacatttacctccagaagtaaagcaggagaactctgcaaagggaaccaacaatctgcatgggagggcattgcctccaagtgtgtgggctggcgaccaagtgcagccctctgccctagttatgggagttggagagggacttactggtttgcatgttccatgcaagagctaaagcaaagcacatctcggagaagtgagccaggaaagtggatcaatccatgccaacaacctatattaattaacctgataattaatatgtatataaagtgaaaaaaaagaaaaaaaaaaaaaaaaaa

SEQ ID NO: 208 - DNA, 2048 bp, Homo sapiens
ggcacgagtcaaaggccacgggaacaaagtcctgtgcatggactggtgcaaagataagaggaggatcgtgagctcgtcacaggatgggaaggtgatcgtgtgggattccttcaccacaaacaaggagcacgcggtcaccatgccctgcacgtgggtgatggcatgtgcttatgccccatcgggatgtgccattgcttgtggtggtttggataataagtgttctgtgtaccccttgacgtttgacaaaaatgaaaacatggctgccaaaaagaagtctgttgctatgcacaccaactacctgtcggcctgcagcttcaccaactctgacatgcagatcctgacagcgagcggcgatggcacatgtgccctgtgggacgtggagagcgggcagctgctgcagagcttccacggacatggggctgacgtcctctgcttggacctggccccctcagaaactggaaacaccttcgtgtctgggggatgtgacaagaaagccatggtgtgggacatgcgctccggccagtgcgtgcaggcctttgaaacacatgaatctgacatcaacagtgtccggtactaccccagtggagatgcctttgcttcagggtcagatgacgctacgtgtcgcctctatgacctgcgggcagatagggaggttgccatctattccaaagaaagcatcatatttggagcatccagcgtggacttctccctcagtggtcgcctgctgtttgctggatacaatgattacactatcaacgtctgggatgttctcaaagggtcccgggtctccatcctgtttggacatgaaaaccgcgttagcactctacgagtttcccccgatgggactgctttctgctctggatcatgggatcataccctcagagtctgggcctaatcatcttctgacagtgcactcatgtatacctgagaatttgaaatcttcacatgtaaatagatattacttctagaggagcttagagtttattgcagtgtagcttaggggagcaacccatggctcacaggtcactaagcgtctccaatatgactattaaaactgtcacctctggaaatacactagtgtgagccttcagcactgcgagaataccttcaagtacagtatttttcttttggaacactttttaaaatgtatctgtttttaaggttattctaaattatagtagcctcaactcattctgtcaccagtagaattcagcagttaatatattccatattatttctttgaatcaattcattttcagagcactttaaagtctgatatttctcgatgtgcactgtgatgcctggaaccttcctctggaagtgctgattttatggactgaggactggtgactggtctgtgatagaagcaaattccaattccaaatgtaattagacaaaaatcatttttttagaatgtgtttttattgtaaaagtatctttttcagcttcctgttctattgtcttttttcagatacaacatttttgtctatggtgaactgctgtaaatgacgcagagaaatgcctaaaaaggacaggtggtttgactcatggatgatgatgatgtcactgtgccacttggacagggcgttttctctgaattgaagggaaagccaatggtgtttgtaaacaaatgcttctgagagcaaagaaaagtcttctgtgtgggaacacaagatagtaaacttatttaaaaacctattagtagaattagtggaaacacttaggttaaagtgaatcttgtccatataaattatattcatggccgggcgcggtggctcacgcttgtaatcccagcactttgggaggccgaggcgggcggatcacgaggtcaggagttcgagaccacggtgaaaccctgtctctactaaaaaatacaaaaattagccgggcgtggtggcgggcgcctgtagtcccagctactcggagaggctgaggcaggagaatggcgtgaacccgggaggtggagcttgcagtgagccgaggtcgagccactgcagcctgggtgacaaagcgagactccgtctcaaaaaaaaaaaaaaaaaaaaaaa

SEQ ID NO: 209 - DNA, 799 bp, Homo sapiens
tgctggtggtgttctgcttgctcgcaggcctggtgctggccgtagtatcacagtgctgagcggcgcggcctacctgcaagtgggcaggcttttgtgcaagagtgctggttatgcaaggcttggggcgctttggcgctgatcacgccccgcgttattacttctacttctctgcaggcttgctcacctatggcgtcacagcctttatcgcattaaacgtgatcatcaagaagggcaaacacttcttggatcgctcgccggcgccggccactcagatgctgctgtacctgacggttggttattggtagtgatcgtactgttcacgattccaagttccaagaaagcgcgttacattctttcgattacgccggcgatttcattattggccgcgtatatcttcgtggatcgcagtcagcgctttgcaagtacccgcgacaagttgctgaagttctgcctcaacttacctatggtcggcctgggcatgttgttacttgcctttatctatggcctgtatgcagcgacgccgctgcggcctaactatcttggcgcgtgtgccgggttgatcagccttattgccattcgctcttgggtgacgtcgcggtttcatgcacatccacaccgggagttcgtactgttgtgttttggtgctgccgccttcctggtcctggatatgtttttcttcaattcgattacttaccacctggaattggccgatgagccgacacccaagtttctgccttattggttctggtaggcgcgttctatcgcagttttaactttcgtttggcgacccacaaggcac

SEQ ID NO: 210 - DNA, 1396 bp, Homo sapiens
cctattctttctccagacttgatggacaacatggttatatgtcttttagaaatgacgatgtaacagggttttgccagcagagtcggggtccccagctttatgagaactgtaatgttgctttctcgtggcagagcaatctcaaaagcttctgaaggaaggaaggaaaatgaagtaagcaggatgatttaggtctgcaaactgctgtggtccccgaccccaatctggttcagagaggatgtcctctatgacaactttgttccttccctccttttctgagaagaagggtggtgcaaaatgacagttccgaccttagcaatgaaaaagaaccaggatgctgccagctggtcactgacatgtgtttcttgtttgcattattaatttttctacaaattgaaaacactataccacattctagatgtcttgagcagtatgctgttagatatcccatctgagcagtattaaataacaaccagagtaaccaccacaccttttctcaacatgacagtagaacaaagtctacacacagaaaccatccatcatagggagacacatttatctgcaaagagctgctgtcccttgccctgggtgctttatatgcccagcacatacacacatacacacgtacgtacatacatacatatgtatgtacgtatggtagtgggggctagaaaaacatttgcagaaattagatataatcatattgtatcaatgaacttggaaagttagagcaaaacaatgctattatctcagattggggtttagaaaaaacacctgagcaaacagtatcaagcaagtgaggtgggggttggttattaaacagaattgtacaaatgtcagagtagggctctggttcacaaacaagcccaatctccttcccatttgctttgcttgattgattaagtgctcttagaccaagaagggagagccactttctccttagctgacactgcccctgccctatcttggattctgattatgagtctccgggcagctgatggcctgggaacagcagatgatgggaagatcgtctgtaggtaaatcctgtggagggagcctaggggctcacagttcatgtagcaccatgttctggtacaaacagctggtagggatctgttatcgtgctggcacacaaatggtgcttgataaacagttagtgaatgaatagcaatctaatcagaagcttttgtttcccatctattcttttttccctccttgtaaaaatttatttttaaaaaatcaaccttattgacagtaatttacacacattaaaaaggactcactcattttgagagttttgacaaatgtatacactcatgtgaccaccacagtcaggatatacaaatattttcctcaccctcaaaagttcccggaattcgatatcaagcttatcgatacc

SEQ ID NO: 211 - DNA, 2945 bp, Homo sapiens
ggaattccaactatggcctgctgcctgtttttggctggtgagctaagaatgatttttacatttttaaattattggaaatatcaacaccggaattatatttcatgatatgtgaaaattacatgaagttcaaatctcagtgtctagaaataaagttttattcgcacacagcctgctcatttgtttacctattgtgcatggccactttcacattacagtggcagagttgaacagctgctgcagagactagccacaaaactaataacgtttactgcttggcccttacagaactttgccgagccctcatttaaagtaatagatttaaacagtctccataagcagctgctggctttgaaggtaggtgcagccactagtgcttttcttggcagattcattgccaaggaacagtttgttaagtaattcccttgttttgtgtgccaggctccataaagaaagggttctcacgctcaaatatatgggcaatacctcatgctatgtatgtatatgtgatttatttctctctagggaacaaacctgtataattgcttaatgtagtctccttaaaaggtagaaaagggctctttggtcaaataattgtaggaaaaagattgacaatcacagtgctgagaaggcctccaatagagaagttggtttagttgttcctcgatctcccacctcctccttttgagctcagccttttagaaattaatcattgcctcctcttcttgcccctgagtggaagggatgaggcccatgggctttgtatccctaggaggagaaagagccagtaagtgaggagcttttaaagccctttctttgtgggaggggccacaaggggccaggtctcttagggctgagaaagccaaggccagcatttctcagagtgctgtcaggactgtctgcctcagaatcatctaagggaccagctaaaacagactctggggccatttcagactcactgggcagtagagctcaggaatctgcatgatgttgctgacgaaagcttaggttggatttcctcttggtgtcccctcccaagagcttgaagatcctgtctccttcctcctctgtcccaacctggcttggatatttgttgaatgaataataacacctgccacttatcagtgtttattgggtgctgagctgatctcattggattttttttttttcttgagacagagtcttgctctgtcacccagtcacccaggctggattgcagtggtgtgatctctgctcactgcaccctctgcctcctgggttcaagtgattccttctgcctcagcctcccgaataggtggggctacagacacacgccaccatacctggccaatttttgtatttttatagagacggggtttcgccatgttggccagactggtctcgaactcctgacttcagctgatccacatgcctaggcctcacaaagtgctggaattataggtgtgagccaccgtgcccggcctgatctcatttggatctttgcagcaatttgatgaattgggtgttctcgttatccccaggtgacaggcaactgaggcccagaagaaggttggtaatatgttaatgagttaagacatagcgccagggttcatgtgggtgagggtctgacaccagacagatgaagggtcgtcggctacagtgacttgagtacccgagctgggccagatttggacccgatggtgtgaggaacctccacccctctaatgctggcagaaaggagtttggggagggcaggggctggaggaggatggtcttcgccttgttcaaggcaggcagcagccttttccctctcacggtgggcaagtttctctgctgcccgagtccctgggcctcggagcactaaggctggccacctgctaggtgggaaggccccaaacggcttctcatcctgcctgcctccactcctaccagaatgacctcacctggcagggagggtggccccagggccctgtcagctctgttcctgccagccaggagggtcctggagtccctcccaagcctgccgcaagcccagagggcacatccaagaggcaagtgtaagctcctgtttccttcatcctcagcagcacaaagctctggaggctggaaggcagcaggcagggccagaaggtattttcatctttcctggaactgcgttaaagggccctgggcagtgaaggagccagagccatttcctgcgtgcttacagcatgccaggtgcctggccacacactgcccacaggatcagcttgaaccctcagcagccccgcctggtagggccagccgtcctcccatttcacagatggagccgtaggggctctcctcaaaagtcacacagttaggagatagccaaattcaaatcgtggtgcatccatccccgtccagggctcgtttcttacctaccttgcccccctgctaactcggacacctcttgagtttggcatccaagagcagaacctggatcccgggggagggaggcacagggaggcgtgaaggatgggaaccagcctcccctgggctgcttgggccggcttcccccttgccagttctgctgcccttaactgcggccttgggcagggggcgtaacctttgcaggtgacgcttgggtctccctgttggaagaccggcaagatgccgtgtacttactttaagaagcaaatgaaggttgggcgcggtgctcacgcctgtaatcctagcactttgggaggccgaggtgggcggattacttgaggtcaggagttcaagacctgcccaaccaacatggtgaaaccctgtctccactaaaaacacgaaaattagctggatgtggtagtaggctcctgtagtcgcagctactcgggaggctgaggcaggagaatcacttgaacccgtgggggcagaggttgcagtgagccaagatcgtgccactgcactccagcctggatgacagagtgatactccatctcaaaaaaaaaaaaaaaaaaaaaaaa

SEQ ID NO: 212 - DNA, 1667 bp, Homo sapiens
ggagtcgagtgggagtcggccggccggcacgggcagcgccgggaccccgcgggggacactgcagccggagcccgggaggggccgcgccgccaccgtctgaactaggatgtcccgacatgaaggtgtcagctgtgatgcatgtttaaaaggaaattttcgaggtcgcagatataagtgtttaatttgctacgattacgatctttgtgcatcttgttatgaaagtggtgcaacaacaacaaggcatacaactgaccacccaatgcagtgcatattaacaagggtagattttgatttatactatggtggggaagctttctctgtagagcagccacagtcttttacttgtccctattgtggaaaaatgggctatacggagacatctcttcaagaacatgttacttctgaacatgcagaaacatcaacagaagtgatttgtccaatatgtgcagcgttacctggaggcgatcctaatcatgtcacggatgactttgcagctcatcttacacttgaacacagagcccctagagatttagatgaatcgagtggtgttcgacatgtacgtagaatgtttcaccctggccggggattaggaggtcctcgtgctcgtagatcaaacatgcactttactagcagttctactggtggactttcttcttctcagagttcatattctccaagcaatagggaagccatggatcctatagctgagcttttatctcagttatcaggagtgagacgttctgcaggaggacagcttaattcctctggcccttccgcttctcagttacaacaactgcagatgcagctgcagctagaacggcagcatgcccaggcagcacggcaacaactggagaccgcacgcaacgcaacccggcgtactaacacaagcagtgtcaccactacaatcacacaatccacagcaacaaccaacatagctaatacagaaagcagtcagcagactctacagaattcccagtttcttttaacaaggttgaatgatcctaaaatgtctgaaacggagcgccagtccatggaaagcgagcgtgcagaccgcagcctgtttgtccaagagctccttctgtccactttagtgcgtgaagagagctcatcctcagatgaggatgatcggggggagatggcagattttggtgctatgggctgtgtagatattatgcctttagatgttgctttagaaaacctaaatttaaaagagagtaataaaggaaatgagcctccaccacctcctctttgatgacatcccaattcgcagacaatgtcctctgtgctgtatttgccaatgaaagtggacaacaactatcttgggtttgtttggtgattgtaatttcaggtctgtcactcttgttacattgtgtacattcaaaaggaagagagaaaatatatatgataatcatttccacttaactaatttttacttctagcaggtaaatgtaggtagcagtgcaggggtgatctctgcttcctgtaccttgacatgcaaaaggctctcctaatactccacattcaaactgaagaggaaaattgaaatctctaatgaagctgctgtgtgtatttatgaatattaatgaataaaaactgcttggatggtttaccttaaaaaaaaaaaaaaggaattcgatatcaagcttatcgataccgtcgacctcgag

SEQ ID NO: 213 - DNA, 2249 bp, Homo sapiens
ccgcagcacagtcacatcctactgaacatcatcctgttctctgggtggaatgtcaccatcgcccaggtggggatttttgtgtgttttgttcactgctgtacacccagcccccagcacagcgcctgtccaggacaagtgcccagtaaacacttgggaagcaatgcaagcgtcctcccagcagctcctgcaaacagacccccgacccaagcccttccttctgcctccactgccaccactgctgctcatctctgctggcacagaagtctcttccctggtcttccagaaatcccctctccacactcagccagagggagctattaaaactgcgggccagcccacatcagtccacagcaaagtcctctctaagggatctttgttgcttggagaataaaccctcggattccttccttggctctcggggcctcctctctgacctccctctgtctcctctcccagccttcctcctcactcaccctccagccatgctggcttcctccttgctcctgaaacagcctgaggcccacactgccccgggccctttgcactggctgtttcctctgcctggagcacttctcctaggcatccacagggctccctcccacaactccttcgggtgcccacatgggaagccatccctgaccacccccccgacttccttctgagcaaggtagggtctttctacctagtcatgagggcagggatttttgtctgttgtgttctctgtgtgcccccagtgccatcccagtgcctggcagatggtaagtgctcgacacacattggctgactgcctgaatgaacaactctatgagccgatggcagataaggacactgaggtcctctggggtaggtgaccagcccaaggccacacagctggtctgagattaggccaggagaggagcccgggttggtcacatcctggagttggcgtcttggaaactgcatcaggagaataacaaagatgagacgcaggctctaacaagtggataccagtgactctcgccccgccagccccagcctgcagccttgggcccttccaggagtcatggtctgcctgcctggggcattccaggcttcgacccaggtcctgcactttctattttgagcctcttagtcctgaggactgtgtgttcccagcaggcggcgcgggccagaggctgagcctgggtgtggctgtcaccctatctggggccagagacccagattcccgggcccttaacctgttggctgctgagggctctggcataagccctgttccctgcttgattgtctccccttcaagcccctgccctggtatcgtatcggcccatctcaccttggattatatccctgtttggccccatttgaatcctggctctgcccctttccagcaatgtgaccttgggcaagtcacttcatctctctgggtctcagtttcttcatctgggaaatggggacaataagagtacctgtctctggccatgtgtggtgactcatgcctgtaaccccagcgctttgggaagccgaggcgagagaattgcttgagaccaggagtttgagatcagccctgggcaacatagtgagacccctgtctctacaaaattctaaaaaaattagccgggtgtggtggtgtgtgcctgtagtcccagctattctagaggctgaggcgggaggattgctcgagcccaggagtttgaggctgcagtgagctgtgattatgcccctgcacatcagcctgggtgatagaattgaggccccatctctaaaaataacaatactaataataaataaaaatgaaaatgagtacctgtcttctggggttgcagaggagattcaatgtgatgaaattgatgagagtgccctgcagggagccggaaactcagggagcatcgataatgagtcccccaccatcagcagctggcttaaatataaaaactgtcatggcctctggagaaatgacaagaattcgaaggagcttccctgcattggccaccctacaccctacacccttacttcctcccctcaacttgcctggatttatcgacccccactaccccactggttgccttctctccacctggcacatttcgtatgaatttgcttgttggttcttgcctatctccccagtagaacattagctccttcaggacagggacttttgtctaccttatgcacctagtgcaatgcctggcacacagtcggtgcttaataaatgtttcttaaaagaaaaaaaaaaaaaggaattcgatatcaagcttatcgataccgtcgac

SEQ ID NO: 214 - DNA, 2205 bp, Homo sapiens
gtcgacggtatcgataagcttgatatcgaattccttttttttacaaggttttgtttacaaagccaagaaaagataaaacattttaagttggtactgccctcgaaaattatggtggatgtacacttggactttctaaaacaagatctgaataaaataagacacttaacatgaaaaactctatttaacacaatttaatctttctttgattcctgagtgggtaattcggcattttacagaactttggggtcaccattataaatatcagctgtcactgtactggtaaaatataaaatgtaccagttaataatagctttgcaattcacagaaaatcagataatggaggttttaccgtaactggaattatgatgttaaaagaatcaatgcacttttccaaaagagcctaaatcatttctaggaaataattcatgccttgtaagaatttacaaggaagtgcttgatactccctggaaaaaatcagtagttcttcattattaagttttcattttgcatgtgtacttcattgtattattattgtggttaatcctatgtccacggccctggcctcgaaccacacaggctcttcttaaataaagtggaagatttctttggcctgtcctaaatccaaggaacaatatgcaactctgcaagtgcatatcacaagaagtcttttcaaggtcgtgctcttggtgaccctttgtttaaaggaatttgggctggatttatagttgtcagttctgaagaatcaggaaagggcaggccgtgaaggggtgggggaggaaaagagaaggaaagagggagggagggagggaggcagaggctcataccacacagtactgagccaccaaggacagagtttctacactgtttcattagaacatgaaatctactctgttgtctatgcgtctgctgtgagctgaaaagaagtcagtttacttcctcagcatctggggtcccataattctgagtcgtggccacattacctctgctactgaaaaggcaagagctgggttgctcagacagccccgcagttcacactgcctgtgctgcaggcaggaaggtttccacccaaaggccggcagagggagggtgtgcccctggcgggtgggctggggctggggtgaggaggggcagggaagaaagggaaggagacttcctttttaatgctggttctcttctcagtccaatccaagtctctccatggaaggatggaaaattctgatttcctgtatctctttgaaaacaatgaaatccactctccccggagggcaggtttgctgaagctgttggctccggctggcatgcacagccttggctaagtagccacacagcacagcatagacatcccggcgaactgaaggctcacaaccaggagcctaccccatgcactccctccccagcaccgggtcaccgcagccagggttcctggggcctccggaatgtcagggagcccctcactgcctcttgggtggcaggaaatcactaagctatgaggataaagaccagccggggtctccatgcagctttagggctgatttctatttccccttgtggtggtgaagcagatttcaaactgcactcaatacagtccccagcacaggagaaatgaaaccctttaaatcttaggccttcacgcaggagcctcccctgcagctttcaaactcacagaagccttttgttacagtcctaggaatgtgtacttagcagagaaagcgtgcctttgtggtggctgtgaaagaatactgagggcggtggcgggggaagaagagacccgcctctggtaagatcctctcccgaagtctgatggcagccagtctcagaaaacaagaaaatccacccaaggacaaggtactcaaccacccccagggctctcccaaaagtgtcggagtgagaggaaggaaagcactaaatatatttgagtatgtgagtgagcgcagggggaggagtgagctaaaggggttttactgcattggttgctataatttgtggggggttcctaagaattattcccatatccttccccaagggaacctgtgaggaaactggcagctgcttattgtgatctagtgtaacagcacatagtacagccaaaatactgcaaggaattagaggcggaaggggcctcaggactgatcttcaccagttttctggtaagatttgtgcaaaactccagtgaagagtgtgcacgcggtcaatttctccaaaatg

SEQ ID NO: 215 - DNA, 3839 bp, Homo sapiens
ccacgcgtccgcccgctcgctgggagagaggtacctctccttttccctctccctttccctaagagttgtctgctggttctcagcttgaagaagattctgcagtccttattgatcctttttcttggcgttaccattttttgaagcaaagttaacctagctttctagtttgagctttctttttggccgtctttaaaaaaaattttttttttaatctataaaatagacaagagctagttctacaatgtccaagtcattccagcagtcatctctcagtagggactcacagggtcatgggcgtgacctgtctgcggcaggaataggccttcttgctgctgctacccagtctttaagtatgccagcatctcttggaaggatgaaccagggtactgcacgccttgctagtttaatgaatcttggaatgagttcttcattgaatcaacaaggagctcatagtgcactgtcttctgctagtacttcttcccataatttgcagtctatatttaacattggaagtagaggtccactccctttatcttctcaacaccgtggagatgcagaccaggccagtaacattttggccagctttggtctgtctgctagagacttagatgaactgagtcgttatccaggaggacaagattactcctgagaatttgccccaaatccttctacagcttaaaaggaggagaactgaagaaggccctaccttgagttatggtagagatggcagatctgctacacgggagccaccatacagagtacctagggatgattgggaagaaaaaaggcactttagaagagatagttttgatgatcgtggtcctagtctcaacccagtgcttgattatgaccatggaagtcgttctcaagaatctggttattatgacagaatggattatgaagatgacagattaagagatggagaaaggtgtagggatgattctttttttggtgagacctcgcataactatcataaatttgacagtgagtatgagagaatgggacgtggtcctggccccttacaagagagatctctctttgagaaaaagagaggcgctcctccaagtagcaatattgaagacttccatggactcttaccgaagggttatccccatctgtgctctatatgtgatttgccagttcattctaataaggagtggagtcaacatatcaatggagcaagtcacagtcgtcgatgccagcttcttcttgaaatctacccagaatggaatcctgacaatgatacaggacacacaatgggtgatccattcatgttgcagcagtctacaaatccagcaccaggaattctgggacctccacctccctcatttcatcttgggggaccagcagttggaccaagaggaaatctgggtgctggaaatgggaaacctgcaaggacctagacacctgcagaaaggcagagtggaaactagcagagttgttcacatcatggattttcaacgagggaaaaacttgagataccagctattacagctggtagaaccatttggagtcatttcaaatcatctgattctaaataaaattaatgaggcatttattgaaatggcaaccacagaggatgctcaggccgcagtggattattacacaaccacaccagcgttagtatttggcaagccagtgagagttcatttatcccagaagtataaaagaataaagaaacctgaaggaaagccagatcagaagtttgatcaaaagcaagagcttggacgtgtgatacatctcagcaatttgccgcattctggctattctgatagtgctgttctcaagcttgctgagccttatgggaaaataaagaattacatattgatgaggatgaaaagtcaggcttttattgagatggagacaagagaagatgcaatggcaatggttgaccattgtttgaaaaaagccctttggtttcaggggagatgtgtgaaggttgacctgtctgagaaatataaaaaactggttctgaggattccaaacagaggcattgatttactgaaaaaagataaatcccgaaaaagatcttactctccagatggcaaagaatctccaagtgataagaaatccaaaactgatggttcccagaagactgagagttcaaccgaaggtaaagaacaagaagagaagtccggtgaagatggtgagaaagacacaaaggatgaccagacagagcaggaacctaatatgcttcttgaatctgaagatgagctacttgtagatgaagaagaagcagcagcactgctagaaagtggcagttcagtgggagacgagaccgatcttgctaatttaggtgatgtggcttctgatgggaaaaaggaaccatcagataaagctgtgaaaaaagatggaagtgcttcagcagcagcaaagaaaaagcttaaaaagcgtcgttttccagggagtatggaaggttttgtcactctagatgaggttggtgatgaggaagattcggaacttcagaaacttcgtaaatcgggcatggcatttaaatctggtgacaaaaatgatgatggtttggttgaaattaaggtggacaagatcgaggaacttgatcaagaaaacgaagcagcgttgggaaatggaattaaaaatgaggaaaacccagaaccaggtgctgaatcttctgagaacgctgatgatcccaacaaagatacaagtgaaaacgcagatggtcaaagtgatgagaacaaggacgactatacaatcccagatgagtatagaattggaccatatcagcccaatgttcctgttggtgagatttaagtctttgttcttcaccttcctcactctcctcaaaacaaactcttaggttttaaaataagattttaaagttggtcttacataagctgtgatagcattttaaatttgctttgtttctatggggaacaatttataaatcttaattgatatattttcctctcatgcatgtctctgattttgtattattttctgttgttattccacaatgtgttcccttttttcgtaaaatttcttgcaagttacacgcttttgttttgcttttctgtgttgtttttctgtattatatttctttttttaagaatacagttaggtgagacctcaaacatcaattaggtaaaagcaaaatatggttcggtttttgttttttatcttaggctgtattggacttctcaaaaacatgttgtttcatttaaattatgttgacaggtgaaattgtgaatactaaataaaatcttcagtttaatttgtaagaatgtatgtttgtatttctaggtatagactatgtgatacctaaaacagggttttactgtaagctgtgttcactcttttatacaaatgaagaagttgcaaagaatactcattgcagcagccttcctcattatcagaaattaaagaaatttctgaataaattggcagaagaacgcagacagaagaaggaaacttaagatgtgcaaggagatttaatgatttcaaagaaaataatggttctttgtttttaatgttaaccttttttaaatacaatactgatagttagaagaaaactattgtactcttttgttttagtggagaaataatagatgtctgttcatgtgttaagtgttatagcaaaaaaaatacacatatggttaagttaatgaatagtttttgttttatcagaatggcaacagacagaagtactttgtagagattgacttcctaagctacttaagacaacttgcaccactaagaaaaaaatgtagaaccatttggaaaaatgaaatttagtagttccaagtttcaaagaaatgtcaacattttattccattcaataaagaacaaaaccaaaaaaaaaaaaaaaaaaaaaaaaaaaaagg

SEQ ID NO: 216 - DNA, 2000 bp, Homo sapiens
  misc_feature (99)..(99): n equals a,t,g, or c
  misc_feature (580)..(580): n equals a,t,g, or c
  misc_feature (1790)..(1790): n equals a,t,g, or c
  misc_feature (1858)..(1858): n equals a,t,g, or c
  misc_feature (1862)..(1862): n equals a,t,g, or c
  misc_feature (1904)..(1904): n equals a,t,g, or c
  misc_feature (1913)..(1913): n equals a,t,g, or c
  misc_feature (1951)..(1951): n equals a,t,g, or c
  misc_feature (1985)..(1985): n equals a,t,g, or c
cggcccaggccgcctggtctggcgctggaggccggagtcccgcggcctgtgctggatccgcgcacacccagtggcggcggatgggcggccggggcggcnggagcggcgggtcctgagcgcggcccgggctgtcagggctggctgctggcgggatggacaccctggaggaggtgacttgggccaatgggagcacagcgctacccccacccctggcaccaaacatcagtgtgcctcatcgctgcctgctgctgctctacgaagacattggcacctccagggtccggtactgggacctcttgctgctcatccccaatgtgctcttcctcatcttcctgctctggaagcttccatctgctcgggcgaagatccgcatcacctccagccccatttttatcaccttctacatcctggtgtttgtggtggcgctggtgggcattgcccgggccgtggtatccatgacggtgagcacctcgaacgctgcaactgttgctgataagatcctgtgggagatcacccgcttcttcctgctggccatcgagctgagtgtgatcatcctgggcctggcctttggcacgctggnagagtaagtccagcatcaagcgkgtgctggccatcaccacagtgctgtccctggcctactctgtcacccaggggaccctggagatcctgtaccctgatgcccatctctcagctgaggactttaatatctatggccatgggggccgccagttctggctggtcagctcctgcttcttcttcctggtctactctctggtggtcatccttcccaagaccccgctgaaggagcgcatctccctgccttctcggaggagcttctacgtgtatgcgggcatcctggcactgctcaacctactgcaggggctggggagtgtgctgctgtgcttcgacatcatcgaggggctctgctgtgtagatgccacaaccttcctgtacttcagcttcttcgctccgctcatctacgtggctttcctccggggcttcttcggctcggagcccaagatcctcttctcctacaaatgccaagtggacgagacagaggagccagatgtacacctaccccagccctacgctgtggcccggcgggagggcctggaggctgcaggggctgctggggcctcagctgccagctactcgagcacgcagttcgactctgccggcggggtggcctacctggatgacatcgcttccatgccctgccacactggcagcatcaacagcacagacagcgagcgctggaaggccatcaatgcctgagggcagctgccagggcctgtggaggacaggccagagaggaggccagcaggcccagagtccccaggggaggaggaccaggtcaagggacgttctgtgggcagtagccctgtgtggccctgttcccaccatgagtctggaggccccacctccctggggctcccaatcccctttgccatctctgctctcactggggaccctcctccccttcccacctgctctcatactgctcagtgacatggcccaggctttccttccagggccatgcttggcaaggttggctgagggcaccctccttctctgcacccttggcacgagggcagggctggctctcccaatgcctccatcccatccccatggtgctttggcctcctcaaagcatccaccatggtggatggactgaagtgtgtatattttcttgatctattttttaataaaaaggaaaaggagcaaaaaaaaaaaaaaaaaaaaaaaaaaaaaaaaaaaaaaaaaaaaaaaaaaaaaaaaagggcggccgntctagaggatccctcgaggggcccaagcttacgcgtgcatgcgacgtcataagctctctccctatagngagncgtattataagctaggcactggccgtcgttttacaacgtcgngactggganatctggtacttgggaactttgggaaggaaccttacttntggggggggacataaattggacaaactacctacngagatttaaaagctt

SEQ ID NO: 217 - DNA, 1351 bp, Homo sapiens
  misc_feature (1009)..(1009): n equals a,t,g, or c
ggaaatcccctatagggaaagctggtacgcctgcaggtaccggtccggaattcccgggtcgacccacgcgtccgatcgggttgggcctgggagatgccaaggacatcacagtcaagggcctggaagttgttagacgctgcagtcgagtgtatctggaagcctacacctcagtcctaactgtagggaaggaagccttggaagagttttatggaagaaaattggttgttgctgatagagaagaagtggaacaagaagcagataatattttaaaggatgctgatatcagtgatgttgcattccttgtggttggtgatccatttggggccacaacacacagtgatcttgttctaagagcaacaaagctgggaattccttatagagttattcacaatgcctccataatgaatgctgtaggctgctgtggtttacagttatataagtttggagagacagtttctattgttttttggacagacacttggagaccagaaagcttctttgacaaagtgaagaagaacagacaaaatggcatgcacacattatgtttactagacatcaaagtaaaggagcagtctttggaaaatctaatcaagggaaggaagatctatgaacctccacggtatatgagtgtaaaccaagcagcccagcagcttctggagattgttcaaaatcaaagaatacgaggagaagaaccagcagttaccgaggagacactttgtgttggcttagccagggttggagccgacgaccagaaaattgcagcaggcactttaaggcaaatgtgcactgtggacttgggagaaccattgcattccttgatcatcacaggaggcagcatacatccaatggagatggagatgctaagtctgttttccataccagaaaatagctcagaatctcaaagcatcaatggactttgaacatagatatttaccattgtctgatgtaaatttcagccatatatggattgatatggtttggatgtatccccacccaagtctcatcttgnaattttaatcctcataattcccaggtgttgtggtaggtaattgaatcatgggggcagtttccctcatgctattctcatgatagtgagctttcatgagatctgatggttttataagtgcctggcatttcccctactggctctcattctcactcttgccgccctgtgaagaggtgccttccaccgtgattgttaagtttcctgaggccttcccagccatgtggaactgtgagtcgaaaattaaacctcttttataattaaaaaaaaaaaaaaaaaaaaaaaaaaaaaaaaaaaaaaaaaaaaaagggcggccgctctagaggatccaagcttacgtacgggtgc

SEQ ID NO: 218 - DNA, 2288 bp, Homo sapiens
gcaaaggtgaccagaagtcagcagcttcccagaagccccgaagccggggcatcctccactcactcttctgctgtgtctgccgggatgatggggaggccctgcctgctcacagcggggcgcccctgcttgtggaggagaatggcgccatccctacagaccccagtccaatacctgctccctgaggccaaggcccaggactcagacaagatctgcgtggtcatcgacctggacgagaccctggtgcacagctccttcaagccagtgaacaacgcggacttcatcatccctgtggagattgatggggtggtccaccaggtctacgtgttgaagcgtcctcatgtggatgagttcctgcagcgaatgggcgagctctttgaatgtgtgctgttcactgctagcctcgccaagtacgcagacccagtagctgacctgctggacaaatggggggccttccgggcccggctgtttcgagagtcctgcgtcttccaccgggggaactacgtgaaggacctgagccggttgggtcgagacctgcggcgggtgctcatcctggacaattcacctgcctcctatgtcttccatccagacaatgctgtaccggtggcctcgtggtttgacaacatgagtgacacagagctccacgacctcctccccttcttcgagcaactcagccgtgtggacgacgtgtactcagtgctcaggcagccacggccagggagctagtgagggtgatggggccaggacctgcccctgaccaatgatacccacacctcctcccaggaagactgcccaggcctttgttaggaaaacccatgggccgccgccacactcagtgccatggggaagcgggcgtctcccccaccagccccaccaggcggtgtaggggcagcaggctgcactgaggaccgtgagctccaggccccgtgtcagtgccttcaaacctcctcccctattctcaggggacctggggggccctgcctgctgctccctttttctgtctctgtccatgctgccatgtttctctgctgccaaattgggccccttggccccttccggttctgcttcctgggggcagggttcctgccttggacccccagtctgggaacggtggacatcaagtgccttgcatagagccccctcttccccgcccagctttcccaggggcacagctctaggctgggaggggagaaccagcccctccccctgccccacctcctcccttgggactgagagggcccctaccaacctttgcctctgccttggagggaggggaggtctgttaccactggggaaggcagcaggattctgtccttcaggccccacagtgcagcttctccagggccgacagctgagggctgctccctgcatcatccaagcaatgacctcagacttctgccttaaccagccccggggcttggctcccccagctctgagcgtgggggcataggcaggaccccccttgtggtgccatataaatatgtacatgtgtatatagatttttaggggaaggagagagggaagggtcagggtagagacacccctcccttgcccctttcctgggcccagaagttggggggagggagggaaaggatttttacattttttaaactgctattttctgaatggaacaagctgggccaaggggcccaggccctgtcctctgtccctcacacccctttgctccgttcattcattcaaaaaaacatttcttgagcaccttctgtgcccagcatatgctaggcccaccagctaagtgtgtgtggggggtctctacgccagctcatcagtgcctccttgcccatccttcaccggtgcctttgggggatctgtaggaggtgggaccttctgtggggtttggggatctccaggaagcccgaccaagctgtccccttcccctgtgccaacccatctcctacagccccctgcctgatcccctgctggctgggggcagctcccaggatatcctgccttccaactgtttctgaagcccctcctcctaacatggcgattccggaggtcaaggccttgggctctccccagggtctaacggttaaggggacccacataccagtgccaagggggatgtcaagtggtgatgtcgttgtgctcccctcccccagagcgggtgggcggggggtgaatatggttggcctgcatcaggtggccttcccatttaagtgccttctctgtgactgagagccctagtgtgatgagaactaaagagaaagccagacccctaaaaaaaaaaaaaaaaaaaaaaaaaaaaaaaaaaaaaaaaaaaaaaattt

SEQ ID NO: 219 - DNA, 1224 bp, Homo sapiens
ggcacgagtatacatccatacacacacttgaatattttgtcaaaagaatgaaaacttcttataaccatgttttgaagatcttttatacctcatagaatctccccgtggctcttgttttcaacaaatgcctgtggattggttaaggttctactgaatcttaagtattatttacagcagagatggggccaggagtagaatattcactggacagatcccaagtctgtagtagaaaacagcttgttcattatcctctgaatttcctttgccagaagagttgtagggaagaaatggggtggtcctcccattggtctaacttcttgagtgtaaggctttggttctcaactttggctatatgttgaagccactcttgattcctaagtctaatccccagggtttctgatttaattggtgtagggtgtggccaggaccaaataattgtaatgtgtagccaagattgagaaccactgccttaggagatgacaacccccagtctcagttaagaaattagcaggcttattttgcttaactctaggtaatatacgtactgagaaggtctgggaaccatcccaatagtaatgaggatccatagctccctgatctttgtttcaaaggtctattctatacgaaaagataccagagatcctcagagaaatagctgtttttaggactggagcagggaaagaacaagatgtgcctggatatttcttgtcagaaagcaaagaaataatcagagattattgtcagaagaacataaaagtctgagggagttatgactggtcaaatctgggatttttttttttttcccccgagacagagcctggctctgtccctcaggctggagtgcagtggcacaatctcagctcactgcagcttggacctcctgggctcaagtgacccttccacctcagtctcccaaatagctgggactacaggtgcggaccatcaccctggctaattaaaaaaaaatttttctttttttggagagatgaggtctcattatgttgcccaggctgatctggaactcttgggctcaagcaatcctaccatgttggcctcccaaagtgctgggattacaggtgtgagctaccacgccaaatctgggaaaatctgagaatcaaaataaggaattatagtcatggattataactcattgaacaaagtaggaatcctttaatctgtactcatacaggtaaataaatgaaaaaaaaaaaaaaaaaaaaaaaa

SEQ ID NO: 220 - DNA, 2710 bp, Homo sapiens
ggggagaaatcagtgacagaggtgttttggttttattgttatgtgggttttcttttgtattttttttgtttgttttgtttttaaacattcaaaagcaattaaagatcagacataggagaaaccctgaatagaaacaaaacttttgaatgctggattcaaaaaaaaaaaaaagttatctggacagcttctttgagactatttaaaaactggtacaacaggtctctacaacgccaagatctaactaagctttaaaaggtcaagaagttttatggctgacaaaggactcgcgcaacgcagaaggcctttcccaccttaagcttccggggatctgggaattttacccccattctcttctgtttgtctgagtctcatctctctgcaagcaagggctgaaatcattttgtttggttgttttgagggagagaggcggggtgggggggtgcaaatctgccagcagctcttacgtaaggcatgttttattggggagggctgagcttttattttctcctctccagtggggttggcttttattgtttcttgtttgggtttggaatggaaatatggatagcagcataaagtacttttattttgacaaaattcatttttttcaacaatggagacatagatttgacccacaataacttctccccctctctttttactctgctcaaaaagcatctctcctcccattacccaaccttggtcataagtgtgcctggctggtttgcagatatttgttctgctttgtaaaaattggccattagtgcatttattgagatgatctctaaagagctatgccctgacctacccctgattctatgacattggggcccttcttttgctgaaactgccttacgtaatggttttactccttgaaagagatttgacggaatccattttatgccaagtgctgccctgcactgtttctgcaatatgtggtgtatgctgtggtgatcttgctgggaatgattataagtgtgtgtgtggtgggggagtgggtattacatgcattgctgaagagtcatcctggtgttcctcattcctcccaccttcccgtggtcattttaattacggggcagtgtcaccgcaaagggaggaaactcaaagccgaaagcaaaattccaggcctgattctggcttttgaggttcctggttcttgaagccaggcctgacccgactctcagatggggtcagtcccgtcgctttgcagactgaccctggaaatctacaaaatgcagattttcctgatttcctcttctcttgcccagtttttttttttttttttttttttaaagcctggattgtaaccagattttcttttttcccccttctcagctgtagatatgatatctcctttcagggccccagcttaagggcaaagtgagttaatgtgtagacaaaggcgagggacaagagagagttaacatctagacagtggaaaaagccatggtgtgtggtttctgggaaccaccaacacttgcaggtttagctttttcccagggttgactacaagaaagaaaaccatgtttttgcaagattaaaatgtggttgagtgtgcctaaattaaccatccccatttttatcatatttccaccatcacttcagggttttaagagtcagtgctcacctgggcggagctggtagtacattttgcttcttagaaagctaagtcctgggttccgtctgattttaggttccaggaacttcctgagaacacccgatcgcagagggtaattttctggagtttgttttgcagggatagctgggagtatggccaccctgctccacgatgcggtaatgaatccagcagaagtggtgaagcagcgcttgcagatgtacaactcgcagcaccggtcagcaatcagctgcatccggacggtgtggaggaccgaggggttgggggccttctaccggagctacaccacgcagctgaccatgaacatccccttccagtccatccacttcatcacctatgagttcctgcaggagcaggtcaacccccaccggacctacaacccgcagtcccacatcatctcaggcgggctggccggggccctcgccgcggccgccacgacccccctggacgtctgtaagacccttctgaacactcaggagaacgtggccctctcgctggccaacatcagcggccggctgtcgggtatggccaatgccttccggacggtgtaccagctcaacggcctggccggctacttcaaaggcatccaggcgcgtgtcatctaccagatgccctccaccgccatttcttggtctgtctatgagttcttcaagtactttctcaccaagcgccagctggaaaatcgagctccatactaaaggaagggatcatagaatcttttcttaaagtcattctctgcctgcatccagccccttgccctctcctcacacgtagatcatttttttttttgcagggtgctgcctatgggccctctgctccccaatgccttagagagaggaggggacggcacggccgctcaccggaaggctgtgtgcggggacatccgaggtggtggtggacaggaaggacttgggaaggggagcgagaaattgctttttctcttcctccctgggcagaatgtagcttttctgcttcactgtggcagcctcctccctggatccttagatcccagaggagggaagaaaatttgcagtgactgaaaacagtaaaaaaaaaaaaaaaaaaaaaaaaaaa

SEQ ID NO: 221 - DNA, 489 bp, Homo sapiens
  misc_feature (477)..(477): n equals a,t,g, or c
cggcacgagcttcctcaaaagtatataaaatttgaaaagacctagaagtgatctagtggaatgaagacgctgagataccattgaggttggggaaactactgggacgtgcttacaggataaactgcaaaacaaaagcacaagtttgtaatcatggaatgacatgccttattctgaaaacttaacgtttgtagcgtaccttataattcataagacatttaaaaatggtattgaatcccaataacctatgcgtagggttggatcttgttgttatccctgttttttaatggaaaatctgaggcctgaagatggtaggccatgtatatgcctgccccgccgttgagcctggctcctgctgttggagaaactttcccagtctgtagagagaggatgtggtcctggcaagcctggctcctgcctgattctgtatcttctggtaacacacagccgtcatttaaaaaaaaaaagacaaggtctttnccctcggacaga

SEQ ID NO: 222 - DNA, 2073 bp, Homo sapiens
ggcacgaggtgtgtctgtgtatatgtatatgtgtgtgtccttgcacatgtcatgtggctgtgcaagtgcatgtgtgtgtgcatgcatgtgtgtgtgtgttgtgtgtggtgggaggcagcctggggctgtcagaagagggcagaaggtgggatcaggcctagctggacctgaaccctgcttgtgccagctgggtaactttgaggcaagtcatttaagttctttctgcctgtttccccattcaaagaatggaccaaatattacttacgttgtgaagatgacaaatatgtgtgtaaaatccaggcacacacgatgtgcttaggacacagcagttatgatttatttgtgtgttgtctttgtggagtggggggaggatttgcagccttttaaggacttgggaatttcaggtcttgacagagccagtctggaaggcccatctggtgtggctgctctgagggactggggacattgcgcccgtgtttacagagacccatagtcagacatccatgggccaggcacagaggcaacacagcagtcctgcccgcagggcccccagtggacaggcagaggcgcagataatacagtggctgtcccagggtccacagctgggtgtggggggcttgagggttagaattggccgggccctatgcggggcatttgattctagttcgttctatttttatctttttcatcagatcagggcaccgtgccctctgggctcgctgcgtcttcctgcttcccagccccaatttcctcccctttcctacctccagcgcatcttgtgtgagacgcatggggacaggtgtgtgtacaccctggggaatgtgtggtgggttttcatttatctgtgtccatgtcgatcaagagcacatgctcatgctgcctgtcttagtctgttcaggttgtgataacaaataacaacaatcggggtacttagaacaacacacattcctttttcacagttcaggagggtggtaactccaagatgagagtggcagcaggggcgggctctgcagagggctgtcttccgggatgcagcctgccggtgtcctcactgtgtcctcgcaggcagaagttggcgtgccgagccagtgctctgctatcagggcttggagcccaattatgagcactcctccttcatggcctagtcacccccaaaaggccccacatcctgataccatcactatggaattaggacatcaacaggtacattttggggggataaatgcattcagaccatggcactggtttcagttgtcatgtaagtcaccactcgtatatcaaggctaactcatgaccctagatctacatggggtctgccctctacctcacagcagagatggacacccacaccaccatcttccccgtgtctcaccacctgcaccccaattacggacacctatgcctctgtcttccctgcgtctctcagcactctacagcgagtgacacacacaccttcatctttcttccatgcttcatgttgcagtggagaggctggggattgggaggaggtgctgctggggtatggggagtgagatctgtgccgcagtggggtgggattcaggagaaaaccaggcagtgtcccaccagttcacttgcttgtaacacagaaacctcttcaatggaaatggaaccctgtctagaatgccagactctctgctgaccattctctctggtcagaactggatcactttatttgatgtaaattgtatttgatttatttttttcttttttaagagatgaagtctcactatgctgcccaggctggtctcaaactcctgggctcgagtggcccttccgcctcagcgtcccaaagtgctgggattacacgtgtgagccacagcactggccataaattgtatttgatttttacagctacctgtatttagccatgtgaaagtgattttccacttatgtcagaatacaaagtttcgtttagggataaattgtaaaaaagaatataggcctgggtggtggctcatgcttttaattcccatactcagcttgagtaccggaaccaagactagtcgaggcaacatagtgaacctcatttctttaaaaaaaaaaaaaaaaaaa

SEQ ID NO: 223 - DNA, 1442 bp, Homo sapiens
  misc_feature (126)..(126): n equals a,t,g, or c
  misc_feature (148)..(148): n equals a,t,g, or c
aattcggcagagctgggtttcccctaggctgtcccttcaccctggcagacctccctgcgcccttccagcccctctagttcttccccaggctccagtccagcacccacctagtgtgggcatctgctncacagtctcctgcgcgcgcatncaacagaggtggtctgtaccacctggtggcatcagctaggctttggtgccctccttccaactccctgaaccccctccaactgttggggagacaggacccaggctgttaccttccttgtgggtgagcttctcccccccagactcgtgagttttgaccgcaggtcggacgccatgacgtaacctttcttctccttgtccaccatcaacatggctagaagaatttctttctttgggtcttcttgttttatttgcatgtgcataatggtcagaaaagtggagagaatccagctctccatttccgtctaggaaacccgcaaacacagcagagtgagcagagggaaaaagactcctaggaagccagctggcctcctgctggacctgcacagccggttcaaggtcaactgaccagggaatgccaggatgtggcagtggtcacagtgaagaggatgcatcccctcccaccgagttcccacgacaggcccctcactggactggacattcttcatttcagcaacgtcctcagtgacgatgcttatcatcaccccaaagctcaagaaagtgggttcccaaccacagatggaggactgggctcctctgctcccttctagcgcttccctcctgccctgaactggagggaaacaggtccatgtgtgcattccacctttgacagccaccacagtacatcttaccaggatggatcagcacccccacctggggtctcaagcctcagtcgcaggctgggctgctcacctgccttcccctcactgcagtctccatcccagcccctcctccacgggccctggctgggatgtaactgcaggaaatcaaaacttccctggactacaacttcctgtttggaggggacagaaatcaaggaaaccaccacccctttggagctggacatgggggatctcaggtatcagaccactgagcaacccaccgccaggctgcaggctttcagaggcccacctgggcccagcgtggcctgccccagggtgggctcccagcgcaactgcaggcatcctctagtggggcctctggtaaccctagcagatggtggtgacccccctgagatgaggaagctggtgacctgagactgagcagcagcctatgggctccgggtcaagtgctattcccagcggatgcccttcccctgcgccagtccctccttcctgagtgtccagcccccaatgcaaacagcaaccccaggctctgaaactactttttttcttagaaaaagcaaaacaaaacataaaacttgtttctgattatgaaaaaaaaaaaaaaaaaaaaaa

SEQ ID NO: 224 - DNA, 728 bp, Homo sapiens
ggcacgagagacaccagtctgcagtctgtgagcttggtggttatttgtacataatcggaggtgcagaatcttggaattgtctgaacacagtagaacgatacaatcctgaaaataatacctggactttaattgcacccatgaatgtggctaggcgaggagctggagtggctgttcttaatggaaaactgtttgtatgtggtggctttgatggttctcatgccatcagttgtgtggaaatgtatgatccaactagaaatgaatggaagatgatgggaaatatgacttcaccaaggagcaatgctgggattgcaactgtagggaacaccatttatgcagtgggaggattcgatggcaatgaatttctgaatacggtggaagtctataaccttgagtcaaatgaatggagcccctatacaaagattttccagttttaacaaatttaagaccctctcaaactaacaggcttagtgatgtaattatggttagtagaggtacacttgtgaataaagagggtgggtgggtatagatgttgctaacagcaacacaaagcttttgcatattgcatactattaaacatgctgtacatactttttgggtttatttggaaaggaatgcaaagatgaaggtctgttttgtgtacttttaagactttggttattttactttttggaaaagaataaaccaagaattgattgggcacatcaaaaaaaaaaaaaaaaaaaaaaaaa

SEQ ID NO: 225 - DNA, 1156 bp, Homo sapiens
gaattcggcacgagtgcggtccaagcccatggggccacctcttaattccagcttccttgcctactatgacagggaaagaaacatggcaacatgcgcacagctcttaaggcttgtrctggaggcggaacacatcgcccctgcagcctggcactggccatgggacatgggaggtagggggaggcgtgttccagcctatgttggccggtgggcaggtgctcagactcagcaagctccttggggtcattcatcacccctccacccattcatcctcaaacacctgcagagggcttcctctgccaggctgtcaggcgccaagggcacagaaatgagaactgacagtccactgggggagacggtcttcgcatggtcttgccctcagtgtaaggcacaagagtggtgcaggggggcctaaccaggcccccakggtaaatacsggttggggggctgtctgggggaatggggaagaagagcattctgggctgggggctccacaggctcaacacagctggagtkarccacaacagtgaatcacgagaaatgaggctggaaaggccagtgggaaccatggtcctggaggtgggcattgggtggggakctktgcttcaagctgagggcaggattttcagcacagatgactgtgttctgaaagatccctgtgggaagaktgaggagaggggtgagcagcagccaagactggaggcaggaggaccaagcagcgggttgtggccacgtttcaggtctggagtcacccaggagagattctgatcatatgggtctatggtgtgacgtgggaggtggaaggttccaggacaactcccaggctcctcaaaataacaacttttttttttttttgagacagagtctcgctgtgtcacccagactggagtgtagtggcgcgatcttagctcactgcaagctccgcctcccaggttcacgccattctcctgcctcagcctctggagtagctgggactacaggtgcccgccaccacgcccagataattttttttttttttgtattttttagtagagatggggtttcaccgtgttagccaggatggtctcaatctcctgaccttgtgatccacccgcctcagcctcccaaagtgctgggattacaggcgagagccaccgcgcctggcccaaaatcggcacga

SEQ ID NO: 226 - DNA, 636 bp, Homo sapiens
ggcacgagtagcatagtgcctgacatatagcagtttcttaataaatgaagtcattggtctattactattattgctactattgtgcaataataatagacaaaagcaacgtagaggtgaaagtgcagacgcctggcctttgccctggggtttcccctctgctgaggaatctgtggctgctcagctttaagggtgcagggaggtggccacattcctcaggccccagccctggcctcaggcatgaggcaacaaggaaagcaggtttaccttcagggcaatccttgggaaaagaataattttagggacaactagaaggctccatggtctctcaaatatctctcctaaggcctggatgctgcctaaaactcatttcagggtagccacaccactcatcctgctaggacagtaagaaagctcaaatacgccaatacccaggaaagggtacacagaatgtgagtatagttcaggcaaacagcataaaatgatatgagatcttaagagctgtgacactagagacttttctctttttaaaaatttttttatttccataggtttttggggaacaggtggtgtttgtggtgtttggttacatgagtaggttctttagtggtgatttgtgagactgtggtgcgcccatca

SEQ ID NO: 227 - DNA, 1045 bp, Homo sapiens
  misc_feature (607)..(607): n equals a,t,g, or c
ggcagagcctgaacacatgcatgaccatctccatctccggcactgaccccagctgcaggtgagctgcgtccgtgtgagggcactcagcccggtgagaacagggagggcccacgagagggtcccaagaaggcagggccctgatgcagggaaacagtcagagatggagagacaggaaagacatggaccggggtaagcgccactgcctgcccaagtgtgagtgcctgctgccttggtttacctatctggattgtgggcaagtcaaagagagcttggtgcctgcccaccccacctgactcctccaggytcaagcccaggccacatgaggcctgtcccacccgttctcccatggcacagaccgcacccccaccatcccacaaagtctgaatgagatgcgctctctcttctttctaccgtgacgtggctgttccttcccctgcacctgtgtctcgggtaaccccacgtctctctcacgggccagactgggtgtcaccaacctggagtggcccccacaaaccccaggctgggtcagggacctccatggagctcccgcakcccctcaagtgcccaaaacagggctgtgtttgctggcagtgtgagactgaakgangtcgccctttgcaaggcgaagaatcccctccttggagatggcaggccagggcccctktcgcgagmatccctgatcagcacggggctggcccacgaggctggggttctgcccattcccagytctgcacctgcatctctgagcctcagtttcctcacctgtgggatggggcaatggcgtccgcccctcccacccacccccaccgcagcccacctgctgccacttacccagcaggctctgccgctcctctttcttccgggccttctgcttggcctccagctgtaccacagacagggatggacccaccgtggggctggggagggcgctggcggcgaagcgtgccakcaggcccakcccactctcctccaggcccggtgacagggcccgctcccgggcacccagcctgtagccaccaccgctggcctcgtcctcctcctcgta

SEQ ID NO: 228 - DNA, 1425 bp, Homo sapiens
gaattcggcacgagctgtaccaaggcttcagagtgagcagggggacatctggataggttagccagggccacagagagaagagctgcttacacctgaattgtttcacccttttcaagaacagggttgtccttctccccatctggatccttgggctagatctctgccgaggggctccgtcaagtcccgcaaggctagagaagggagccccacatcatttccactttcaaagagggaagatgctcgtcattcaaattacttctgttgatttccatggtatccccctgtccgtcccacaatctcttaccaggcgtcaatgcacatgcaggggatggaaagaggatgagccgatgagcagactttgcattaatcaaggagaaagaaaaagcagatggaaggaggtaggtagatggagaaagcaacagctccttttagcccttgatgacggccctgaaggcctgtctcttttagtgactcctctttgggtcctcttcccctacctctcagtgactaggttcctcatattaattccctgctgtgagtttggctccttgtgctgggcaattcagtcatcctcagaaagagcaaagttggtcttggaattaaggtgcaggtggggaaaaagagggactcagctagacacgaagaaaggctctcttcccagtctaagcccttytaccgtaaggggcattttatcaagacagccacccaactccccatcccatctcccctcctttgtagaaacagcatttgactcaccaagcctttctctccctttccgtgtgtcttgcttagtttctggattgagagaatttctatccttgctccctcgaactctaaaagagcttcttttgaaaactggggagtatcaggcctacctctacatgtgcaacagtgccaggattcaaaggaaaagctcattccagcctctgcctcttgggagatggttcagagtgccacatagggactgaaagagggtgtctgaatccttcaggaatgctttaagtgacattgttgaaaagagataaagaaaaggaaaacaatggaattgggtttctaaggtccctggaaatatcctgggggtctaattgagaaagaaaataagaggaaatttgaagactcacttcttccttcatctgaatccactcagatggcaactgatctctgtcccaaggaccctctaccccacccaattcataatcatctcagattagaaaaggcagaattccttcccattctcaaatcagcatttgggttaggggcccctaagttacgtgagcatgttagaaatgtgaccccaggcctcaagagagaggctctgccacatgagaggagataggaatcatgactgaaaggggattagcacagaacagagaaaactgatttgatagacaaatcaaatagaaaaaaaaaaaaaaaaactcgtag

SEQ ID NO: 229 - DNA, 1002 bp, Homo sapiens
ggcacgaggccaacatggaagccacagggtctctcgtgccctgatctgggaagtggcaggccgccaccaacactgctgctgttgttgttcatgctaagtcttggcaagccactgggtcgcacgtagggcatgtctccattcaggccagccgcatttcgagccacacgtggttcgtggcaactgttggacagcacagatgtagggcatcaaaagcctatgaccgtatgcaacctggtgcttctgagatgctcacgtggtccatgggtagaagttgttcacctgaggtcttggctacctggcattagcccacacacagatattagtgtgcccacctagtgtgcagagtagcttaggggtgcatccctctgtttctgccctagctgataattctcttgaccacaggatcccagtttcccttcctttatatgtaagacactttgttcagtgtctttatttcataatcactgtcgagaaatggaggtaaagtagtatcagttgtctgtagacttagtggcagattgtgggggaggctgcatcccaaagctgggctggccctggaggacaggctcagggacagctccatgtcccctctcatgggtgccaaaccattctgtgagtgcctgtgcttcaaaggtgagcccggagagctctgtactcggccccctctggccttgagggaacgggggctgggaggtttctggctggaccctgaggggctgcttgcgggctctgggtctttggacttggcaccgttgccttggcatttgttggcttgggagttgttgctgctgctttttcccagatgcatgggcctgctaatgtcagtgtttgacaaaccaaggagaggacactttcctgagctcttgaagtccatgctttatcgtttttgccttcagatttcagagcgacctagcagccgtgtgtaacaaacacgtcacttgtccctgtggagattggcccaccagcctccactggcaccctgtccactttaacaagcacact

SEQ ID NO: 230 - DNA, 1103 bp, Homo sapiens
ggcacgagcggcacgagtgccaatacaactgctgtcgccctcaatgcgccagcccaccctgcaaggctcctaccacctggacccgcagtagccctcctactgctccgggggagctgcagtctctgttgctgccaccaaccgcataaggcgagctgcaaagccatgccatctgcaggctccaatgtaccatagatgactcctcctcttcctcctcctccagcctggcttggagcagctagatgggcaaagctagaaaagcctaaaacgggatgcagggagtggtagcattagagcctcaccttgtcacgctggccactgggtggcagggaccagtttcagcaaaggcactcacacccaccctccaaagtccagcctctccttctggcaaaagctggccaggaactggggcccagggtgagtgtgtgtgcctttgctgaaaccagccctaggtcaggtcctgctggacagaaattgctgggtccaccagggctgcactcctcagggagcaggagtaggagaaactcaggcccagccagccctgcccacccaagttctggttcccgttcctgatgcctccacccacagtgccctatccccccacccccaccacagtggtgcccactactccctgcccagtagtcccaggttgtctctgcaacacagagcatgagagcatgggccagggaaccacggtgggtgtgggggccctgtcatactcaagattgtgcaaggaggaggagatcactctctagagtctggaattggggaagaggagaacggtcccttccttggagaccacctgaaggaggaaggaggccactgctgtcactgccacctccgcagcctgccaacgccactagcagtgtagcccctgatagcacccctaacctgctgcctgctgcctgccaccaacagtgtagcccctggatagcacaccaaacaaaccccgcaccagctgcagggtgtgtaaccccaatatcccccccaaagcaccctccctcccccagagcaggcagtgtagcacccaatagtgcccacaacctgacccagccatgggtgttgctgcactagatagcacccgaaacctgcccccccaaccccac

SEQ ID NO: 231 - DNA, 585 bp, Homo sapiens
ggcacgaggagagaggtaactcttacatgagcggacaggggaaggcagagagggcagaaaaggcctctgagctcacgattttgcttggcggtaggaaagttaaacttatctagcgaattctctcgtttttcaaactcagatttaagctttggtgagttagattctttgaaactgcccctgcaaatggctcccgctccctgctccgcctccccacgtcctgcggggggacgggacggtggcggtgctcctgagctgtccttcttgttatctgttcttgtctgacctgtggcatggtgccgcccagtgcccgctttcccaggcagcttcctggctttgggagcccatatggagtcaggcttctcacccagtccacctgcccaccttgttggcagctgtcccactgagcccatcctttcccagcccctccagcctctgagacttgagccctagttaagctctcagataatttctgccatcctttctgtatccgtgggtcacacacaaattccactacagctgtaaggaaaagtcagggctgatccaagaccttcgttcctcactcttcaaagaagcctccatggttat

SEQ ID NO: 232 - DNA, 1047 bp, Homo sapiens
  misc_feature (5)..(5): n equals a,t,g, or c
ggcanagactcaggaggctgaagcgagaggatcgcttgagcccaggagttcaaggctgcagcaagctatgattgcaccactgcactccagcctgggtgacggcaagaccctgactctaaggaaacaaaaacaaaaacaaaagtgggtataaatatgactgcaaaactgctctgagctgctcctctctgcctatgcggtagccctgctctgcaggagcggtcacagagcagtaatactggctctctaataaagctgttttcttctgcctccggtttgcccttgaattctttcttgcacaaagccaagaaccctcctgaactaagccccactgtggggcttacctgccctgcatgaggtaagtatcaactatggctcaaaaggcaggtcaaaggcagcttttcaagtatatttgtgtcacagaaactcccactgtaacatcaaaaaatgaatgattttttcaattccctttattagggtttctttccctgcccccctcatttctccacttctttctcttctctccgtaggtatatagttatactctcccctcacacactcattttgtgtatgttcaaaaatattttggttatcttttatttctggtaactgctttttcatcctgcatgagcagccaagaaaagaattaatttagactttctgcaatgtcagggcctctcattcaattactctccttgtctcttggaagctctggtaacttagtttaatgacctctcacaccttacatccttaaaaaatgccccgtgtgtctcctggctcgggcagtcttaattatgttggcagctttaggtttccttattaccagcactccaggacctcatccccaccctgtccccatcttcatcttcacccagagcttcccatctccccacctcccttatcgccaatttctgtctgcactttatccacgatattcccatgttttctgctcttactagaaacattattttacccagcactgcatttttaaactgaaagaagatggtgattattatgcccttatcgaaatccattacttgaaaagctcga

SEQ ID NO: 233 - DNA, 1246 bp, Homo sapiens
  misc_feature (746)..(746): n equals a,t,g, or c
ggcacgagggccaccaggcacatctgctccactgagctggtgcagtgcactgccttgtccagcaggtggtggtactccaggtcctctgtcagccgctggagcatggacaggggctcattgaagttcacctgtgggtggacaggtgggtggtcaggctgggcaccagcccggcttggcatggtgcccttgcttttctcggatgttcagggacatccctgstcagacagcaccttcacagtgaggctcctcagatggccctgtccaacagtgtggcccccaagccatcacctccctggcccctcctgggctgttttctccacagcccttcccactttctggtctgctgcatcctacacacttttatcatgttcactgttgctctcctctgctcggatggacacccamcaaggccaggggttctgcctggcccactgctgtatcttgagtgcagaatcttaggaagcagtgactgaatgggcacatgagtctgtgggtggaggaagtgggtcttccccatgttgcgagctgtgatggggcccggcacaggatgggttaggcccaakgcccctatcycggtgtcacatakggcagggtcactctccccaccatgatgccatcgggtacgagtctcagcttcctcgtgttatcttgctccatcctcccagacactgaagaggacgctgtgtttctccccaccctacacatgtggacacagaggctggagatgtgaaggaacttgktctggntcacacagcagaaccktctggcctagtggagatgccatgtagccaggtggcatgaggatccaagctctgagcctgcatttcctggggatggcaccagggatggctgccagctgaaggagggcccacccctccacacacagccccatcytgccactccccatctacagatcggkacagctgggacatggtaaggtcctgtgagatccagaggtgctctggggctccccaggttgctgatccatgcagagcttctccctggctcctcctgtcagagcccaaagatccctgtactttggaagattgggcaatgcctatgtgcacgattagataattagttacatgctcctcaggtgccgttaagaaaatgacactccaaggctgtgtgtacttcacacaggccattactgctcatccatgcacaggaaagcagccccagaggacctgtcggggctgccctgcccgagccacccaccgaaaaaaaaaaaaaaaaaaaaactcga

SEQ ID NO: 234 - DNA, 1048 bp, Homo sapiens
tgcaggaattcggcacgagccaccaccccagcccattatctctattgatcctcactccaaccttgcaaaataggtagcgtattccagtggagaaactgaggcacaaagaggtgaaagacctttcctgtcacagttaggaaagtggcagaagccgtatttgaaccccagcaggtctccctctgaagtccacacacgtcagcgcctctgtgttgtctctttgccagcacagggctccctggagcccagagatgggggtggtgacttgaaggggttggcaagcctgggctcctccagcgaaaattcccttggccctgggcattcctaagcgagaagaggctcaatcctattttcttctcctaattggatgccttttattcctccttcctaattgaagtctggtcattgctggttgccatggcagcagccaaagcgctcatctcactgtggcttgtctctgcctgcggccaatgggaaacctcctttcccatatacggtggggacatggagtgtcaggctgtcgtattctggtggctggaggaggagaggaagtgagatgggaggaaaaaggcctgtcctctcccacgcagagactccggacagcaggatgtgtggaatccccagtctgttttcagccaggcagcaacagcatctgtactgagttgagtctatgtgtctaccagtgggctaagaacttcatgtgcagtatctcatttaatcttcgtgatggccccaggaagataagggatcaaggcccagaaaggctaagtaagctgccaggtcatccaaggagaaaatggcaaagcctggatttgaacagagactccagcttccttatgtgtagccatctcaccatgctacttctcagggggttactatgagtgtctctcatgtccccagacccagattacaggtttggaggaatacacagcccaccttcccaatatcgcaggcaacagttccaccaaatgccctgcatggcatcacagggagcctagttgcccactgctctactgctgagctcaatgccacccagcccgggctctctcga

SEQ ID NO: 235 - DNA, 1178 bp, Homo sapiens
  misc_feature (138)..(138): n equals a,t,g, or c
gaaagcaggctcatttggggactgattcaagcagggttctgaagaaagagctagcccactgcgcagtggcccacctggagaggtagcagtctcctttcctgatgccagatccaagcagaggctaatgctggagaccangatgcccgtgggagaatccctgtagctagagggaattatctggaagtaatttatccctgtaccgccttgtggggttgggtgtttcttgcccactgcatgagttggtattactctaagagcgacagatacatgttttcacatgctttccatgtactagacactttctaggcatcagttctcaacatgacaaagagatccttctcagggaaatcagatccctcttccactgctgaaaaaccccacagtggctcccatttcacttggcataaacaccagtggccttgcagtggctgccaaggtcaaaccatctgcctttctgcttcctgctcacccttttccttcatcttctcaycttttctgtcttctccatagctcacactcccctagccacactgttctccttcctacaatgcagcacactgggcatgcttctaccccaggscccttgcaccagccgmaccatctggttgacatgcttctcccacagattcttgcttggctaactccgttgtgctctggtttttgtcaagcagtcaccttctccatgaggcccacctgggccaccatatttaacactgcagtctacactgcctctcctcccaccacccagcactcccaggccctcactctgcttcctttattttttccatttcgccagccatcttccaacacatgggaccacatccttatttattgagtgtcttgttgcaggtctctaagactgtgcctgccttgttcactgatgtatctctagcgcctacaacagggtcgggcacagagtaggagctcagtaaatacttgtggaatgaatgaatgagctcattttacctcaatcacaactccaggggtagacatggtgatttcactccattttatggttgaagctcagaagcttacggaacttgcccaaggtcacatagttagtaagtggctgagtgacgcatcaacccaaagcctgtcttactctggggtcctggatcttaaccaaaacactaagctcttccctcctccaggtgagcccctggtcctgatgcctcgag

SEQ ID NO: 236 - DNA, 825 bp, Homo sapiens
tgcaggaattcggcacgagccagagcagccctcaaagcctgggctgttgagagtgcacatcctggcctgcggtgacagccgtcagatggtgaggggccccaggcgactgccccagcagcagggcctgggagctgcacaggggagaactcgataaggagcatcatgagcatagtgggtccattgacaacatgcagtccccacggtggtgcctaatgacaaaatgacatcatgccacctgcaaaaaaagtaaaaatgatcagaggcgagcttgtcagagaagctttgaactaggtgactgcatgaaacatctcagaggcggaagagtgcctccccctccccgggactcccacctggtgccctgagctcatcatcccttctcttgtagcatatgctgtcaatacccagggccttttcgaaacggcaatgggtccgaaggcctcgggaccacctttcacacctcccctttatgcagtgtccatacctccttggtgctcagctgctggtcagctccatatgccctgtggtccctgccctcccaaggcctgtgaacaaatgcttagtcccagattagagtctacgtcaatctgggatgtgagctgagtggcacctgtcgtgaaccaggccagagtctacgcaatctggggtgtgagctgagtggcacctgtcgtgaacgtgcatgcacatgggcattttgtcagtctgcaccggtgaataaatgtcgctgcatttgccagctgagtgtcaccaggttccaggtcccattacacatcaggaattgtgtccgactcttctggatccgctgattggacctgagggatccctgac

SEQ ID NO: 237 - DNA, 853 bp, Homo sapiens
  misc_feature (20)..(20): n equals a,t,g, or c
  misc_feature (40)..(40): n equals a,t,g, or c
aattcctaacgcaaaagcanccctggggaagaacacaganacaggtgacacgtgtcagactgggcccatgtcaggtacatgtatttcccttcacctcaccctgaaatgtgccatttcagaaagtggtgcatttaccagacaatttgggttgatcatcatgttagccacttggcatctcagtcaccatcttggtcacctggtcaacatagcaaccacatctcttggtcagctagctttatttgcaccttgatcactaagatagatgtcatctgcaaagctgtttaataatcttaataatggtctttattatttccagatccctagagtaaccttagaacagcaagaactattcattcatccataaattccagcaaggtgctatagaaagcactatggaaaaaagaggaaaagagagggagaacatattgtaaaagtagacagggattctgctactgagaaattcaacacctggcaagggggatgaacaggaaagagaggtgctggcagaataaaatcactccccagctccccacacaatgagcaatgagtatgctatttctattttgtgtccatgtgtccttgctcatattcttaatctgcagcccaatgctctacctctgagctataccccctcctccttgctcatactcttacttgtgacttgaagtgacttcctgctcctgcctattgtcacctcccccatgaaggcttccccaattatcctgaagcagagacagtccatccctccctcccctgtgcaaccagggcccctgggctgacctcaagcttctcacacttggccataactagcttttaggtatttatctcccacactagactctgagctcctcga

SEQ ID NO: 238 - DNA, 621 bp, Homo sapiens
  misc_feature (616)..(616): n equals a,t,g, or c
attcggcacgagggaggaaagagggtggaatctggacagtatgaaggatttgtattgtacctgtaatgtttgatgtctgaagctgggtggtgggcatggctgtttgttattctccatccttttggtatgcctgatacatttcataataattttaaaaaggacaagactactgcagagaaatgcatagagtgagctctgtttgggtttttaaaatgattcctacatctatgcttgcagatgtaagcaccagccctggaaaacattgcaagggattcttagtaggcccaagctttgggaaagggccaagggggctggggagttgattaggaggggatacatgctttttcctgctgccttttgaattttgtaccacacgtagtattacttattaattaaaaaataatctgaactagccaggcgtggtggcacatacctagtctcagttacttggaaggctgaggcaggaggatcacttgagcccaggtggttgcggccagcctgggcaacatagtgagaccctgtctctttagaaaaaacaggccaggcatggtggctcacacctgtaatcccagcactttgggaggctgaggtgggtggatcacctgaggtcgggagntcgag

SEQ ID NO: 239 - DNA, 903 bp, Homo sapiens
  misc_feature (18)..(18): n equals a,t,g, or c
  misc_feature (27)..(27): n equals a,t,g, or c
  misc_feature (56)..(56): n equals a,t,g, or c
  misc_feature (94)..(94): n equals a,t,g, or c
  misc_feature (889)..(889): n equals a,t,g, or c
  misc_feature (898)..(898): n equals a,t,g, or c
  misc_feature (900)..(900): n equals a,t,g, or c
tgttaccggttcgccggnagccggaancggaccgaaccgcaagcgaattcattgancgaggaaccggaaggagcgcccaaatacgcaaaccgcntcttccccgcgcgttgccgattcattaatgcagctggcacgacaggtttcccgactggaaagcgggcagtgagcgcaacgcaattaatgtgagttagctcactcattaggcaccccaggctttacactttatgcttccggctcgtatgttgtgtggaattgtgagcggataacaatttcacacaggaaacagctatgaccatgattacgccaagctcgaaattaaccctcactaaagggaacaaaagctggagctccaccgcggtggcggccgctctagaactagtggatcccccgggctgcaggaattcggcacgagacgacacgataaataaaagcagatgttcaaatgggagacacctgaagagacaagttagtccaatggataggagcgaaggaaactgcccctttgtaaagattgaggaaaagagtgtaaaattatgctctcattacactcatgctgttactaaggcctacagagagaaggtattgagaggtgacaacatgctggcagccctcgcttgctcttggcgcctcctcagcctcggtgcccactctggccgtgcttgaggagcccttcagcccgccgcttcactgtgggagtccctctctgggctggccgaggtcaaagccagctccctctgcttgcagggaggtgtggagggagaggtgcgggcaggaactggggctgcgcgcggcacttgtgggccagctcgarggggggcccggtacccaattcgccctatagtgagtagtattacaattcactggccgtcgttttacaacgtcgtgactnggaaaaccngnaaa

SEQ ID NO: 240 - DNA, 909 bp, Homo sapiens
ggcacgagccagaagagggattgctgggtcatatggtagtttaatttttttcagcaatctttgtattgttttccataatggctacaccaatttacattctcattaacagtgcaaaagggtttttgtttctctataccttgccaacttgttatctattgactttttgataataggctttgcatttgcctgatgattaatgatattgaacacattttcatatacctgttggccactttttatgtcttcttttgggaaatgtttgtttattctggtacttggcctattttttaattgggtttttgtttttttctttgctattgattttcttaaatttttggatagtaacctgttatcagatatgtggttcacaaatattttctcctactctgtagattgccttttcattttatcgattatttcctttgctctgtagaagcttttcagtgtgatgtagtcctacttgtttgttcttgctttcattgcctgtcctatcagaaaaatcattgccaaggccaatatgtatcagcttctttcctatgttttctcctaggtgttttacagattcaagtcttatgtttaggtctttaatctgttttgagttgacttttgctcttggtgtaagataagggtccaatttcatccttttgcatgtggatatccagttttcccaacactagatatgaaagagactaaactttacccattgtgtcttcttggtgcctttgtctaagacacttctatgacagttgtttctcagatgggtacttgtttacgtgattcacaacagtgaatggaaatgtttaccactcatcactccatctaacacaccttgttaagacacatgtaaaaactgttctaatagtaccagttgcaactataactgaaaatagtattattttaggaactagt

SEQ ID NO: 241 - DNA, 901 bp, Homo sapiens
gctcgtgccgcacgggaggcagaggttgcaatgagtcgagatcgtgccattgcactccagcctgggcagcagagcgagactccggctcaaaataataataataaattagagatggggtctcactattttgcccaggctggttttgaactcctgagctcaagggatcctctcgcctcagcctcccaaagcactgggatcacaggtgtgaggtgccatgcctggcccacaccagctgtgtttaatcaatgctgggcagccctgcagcttggtgacatcagtgggccactggctactgggtgttttttccatcctgccctgttccctgctggcaccaggggaaaaaggcccatacaggagtctgttccaggtcaccagatcctggggtggcccgtaaggatttgaaggggacaggaggcgcccctttgccgaggcccttcactgtgtcaggcacattgctggctgccgtgggtgcacaatcttagggaaccctcctgcctcctccgccttgctgcttccttgcaaagaaaatttcccactgcagagggcagcttaattgctcagcagtggctcttcagaatctcacagatgggccaggcgtggtggctcatgcctgtaatcccagcactttgggaggccgaggcgggcagatcatgaggtcaggacatcgagaccatcctggctaacatggtgaaaccccatgtctactaaaaatacaaaaaaattagccaggcgtggtggtgggtgcctgtagttccagctactctggaggctgaggcaggaggatcacttgagcccaggaggctgaggttgcagtgagctgtgactgcaccactgcactccagcctgggcaacagagcaagaccctatctcaaaaaaaaaaaaaaaaaaaaaaaaactcgag

SEQ ID NO: 242 - DNA, 817 bp, Homo sapiens
  misc_feature (4)..(4): n equals a,t,g, or c
  misc_feature (7)..(7): n equals a,t,g, or c
  misc_feature (600)..(600): n equals a,t,g, or c
  misc_feature (683)..(683): n equals a,t,g, or c
  misc_feature (685)..(685): n equals a,t,g, or c
  misc_feature (728)..(728): n equals a,t,g, or c
  misc_feature (811)..(811): n equals a,t,g, or c
  misc_feature (814)..(814): n equals a,t,g, or c
atantgnatcactcattggaacattagctggagctccaccgcggtggcggccgctctagaactagtggatcccccgggctgcaggaattcggcacgagctcgtgccgaattcggcacgagaaattcatgggagtgggattattaaatagaataatatgaacaattgtatggcttatgtttgccttattgtattcccaaagagctgtaacattttatagcatcaccacttgggcaggggtattacctgttgttgctaatttagtaagtagaagagagagatcaaagtttctctaatttgtgtttgtgtaatttatctgtatactttcttcatttatataaataaatgtcttcactttgggaggctgaggcgggcagatcacctgaggtcaggagttcgagacaagcctggccaacatggtaaaaccccgtccctactaaaaatacaaaaattagttggatgtggtggctcacatctgtagtcccagctactagggaggctgaggcactagaatcacttgaacccgggaggcggaggttgcggtgagctgagttcacagcctgggcgacaagagttaaactccatctcaaaaaaaaaaaaanaaaaaaactcgagggggggcccggtacccaattcgccctatagtgagtcgtattacaattcactggccgcgttttacaacgtngngactgggaaaaccctggcgtacccaacttaatcgccttgcagnacatcccctttcgccagctggcgtaatagcgaaaaggcccggaccgatcggcctttccaacagtgccaacctgaatggcgaanggnaaa

SEQ ID NO: 243 - DNA, 1959 bp, Homo sapiens
ccacgcgtccgattgctctttatttccctatctagattttctaagtatcttagctttcttaatataagtttaacttggtacttactgaaaatgcctttttacccctgttaacggtattttgagcttttgaaaagaacttggttgacactgcttttattgtggataaaggagagatggtcagtaattaatggcttgaagtattattggagtggtttatcatttctgaaactaatcgtgtcagaattgactttgaaaagcattgctttttacagaaatatattaactttttaggagtaatttctagtttggattgtaatatgaaataatttaaaagggcttcgctcatatataggaaaatcgcatatggtcctagtattaaattcttattgcttactgatttttttgagttaagagttgttatatgctagaatatgaggatgtgaatataaataagagaagaaaaaagaataaagtagattgagtctccaattttatgtaagcttcagaagaactggtttgtttacatgcaagcttatagttgaaatatttttcaggaattacatgaatgacagtcttcgaaccaatgtgtttgttcgatttcaaccagagactatagcatgtgcttgcatctaccttgcagctagagcacttcagattccgttgccaactcgtccccattggtttcttctttttggtactacagaagaggaaatccaggaaatctgcataaaacacttaggctttataccagaaaaaagccaaactatgaattactggaaaaagaagtagaaaaaagaaaagtagccttacaagaagccaaattaaaagcaaagggattgaatccggatggaactccagccctttcaaccctgggtggattttctccagcctcaagccatcatcaccaagagaagtaaaagctgaagagaaatcaccaatctccattaatgtgaagacagtcaaaaaagaacctgaggatagacaacaggcttcaaaagcccttacaatggtgtaagaaaagacagcaagagaagtagaaatagcagaagtgcaagtcgatcgaggtcaagaacacgatcacgttctagatcacatactccaagaagacactattaataataggcggagtcgatctggaacatacagtcgagatcaagaagcaggtcccgcagtcacagtggaaagccctgaagacatataatcatggtctcttaccttaaggccaagctaccgagatgatttaaaagttcaacgacatggtcataaaggaaaaaattcgtctcgatctcagagcaagttcgggatcactcagatgcagccaagaaccaggcatgaaaggggcatcatagggacaggcgtgaacgatctcgctcctttgagaggtcccataaaagcaagcaccatggtggcagtcgctcaggacatggcaggcacaggcgctgactttctcttcctttgagcctgcatcagttcttggttttgcctatctacagtgtgatgtatggactcaatcaaaacattaaacgcaaactgattaggatttgatttcttgaaaccctctaggtctctagaacactgaggacagtttcttttgaaaagaactatgttaatttttttgcacattaaaatgccctagcagtatctaattaaaaaccatggtcaggttcaattgtactttattatagttgtgtattgtttattgctataagaactggagcgtgaattctgtaaaaatgtatcttatttttatacagataaaattgcagacactgttctatttaagtggttatttgtttaaatgatggtgaatactttcttaacactggtttgtctgcatgtgtaaagatttttacaaggaaataaaatacaaatcttgttttttctaaactgcttcaaataccttatttaaataaattattaaaaaggaaaattttaatagcaaaaaaaaaaaaaaaaaaa

SEQ ID NO: 244 - DNA, 922 bp, Homo sapiens
tgcctttcaggctcttagaagccatagatttggacaagcccagcaagatgggtgtccttccaggcctcttcccctttcctccatctctggcaacagttcttggggtttggcaattgtttggattttttttctttctgcagttgtgtgtatgtgtgtttgtgtgaagaaaaacagactctgtccaggtagaaatggtgaggagggggaagagaattacatttccagggtcagaaacttggcaacagttttcctagagtgactcagacacaccacagtaacaactctcgctgcaattttattttaatttgagaaataaagatttcctccaagccacatgaggactctggcacccacccacaaagcaagacctgtatttataagccgagggctcagggagcctaactgcgggacccgtcagggccccgtgacccatccccgtccccacccccccctccaccgctgggcccatcagtgtgtgttggggggatgcttggcagctgggggtgaggagacaacaaacctcgggaactggagccagagctgcggcctgactgacgccttttgatgctcacgggaaatttctgcccaggatctcagccccaggctggttgtttctacaaatctctctcaaatgtattattttggtgacaaaaatgaaggagctttgtaaatttttttaaaattatgaatcatatcaagtagttgtttacatttcttgaaaaaataggaactcgggcagcagaatcagattggcagaatctttagactacacaggcaataatcaagtctgctgttttggcctttcgtagtagaagtggttgtagtgtttagatatctgtttggtcttgcttcttgtattgcatttttttcaataaacaacaacaaaaagaaaaaaaaaaaaaaaaaaaaaaaaaaaaaaaaa

SEQ ID NO: 245 - DNA, 900 bp, Homo sapiens
ggcacgagctcatcttaatgaattaagtctgggaatataattatgtctgggaatataatagagaagactctatttcctgtgttctgggtgagtatgaacttttgggggatactaacttactatatactcactaggttaatctatgctaaatacccaacaggaaggcagctgtagggaaaagcaagagtatgaaacctggaaaaacaattgccagactctgctgcttgtgggtatgtggccgtgggtaaggtagttgctctgtgctttcagcttcctcatgtacaaaattgagataataatgatgcccactttgtggaattcttgtaaagatgaaaagattccaaatatgtaaagtgcatagaacaatccccagcaaaaagtggaacatgttagtgataattgctgtcatagtcggtcttcttgcttagtaggcctgagataaaactttctcctatttcatccctcctcctccctcttcctgattttacatgttatttagttgtttctccctctcactataattatttgtgagaagttacaagagttatactatggtagagcagacaggctttgcacaccttcagggtcagttctggaccaaaccactcagaaaccactgcacggatgaatggctggagattgtggggcctattgtgtctccaggtggctgtggttacatgggatccctggaatgttaattaattttcatatttccctttaaggtacttctgtggctcaaacaatgaatttctgagttaggtcccaaagtggcatttttgtttgccaacaccctcataggaaactgtattagaagctttcttgtaatatttaagagcctttaaaagagcgagactccgtctccaaaaaaaaaaaaaaaaaaaaaaaaaaaaaaaaaaaaaa

SEQ ID NO: 246 - DNA, 604 bp, Homo sapiens
  misc_feature (152)..(152): n equals a,t,g, or c
ggctgcaggattcggcacgagaatcatcagagatgaaactgtttgagagactcatgtgaccttacgaaaattacaacagcagtcttaaagtatgaaaaagatgcatcacagcagagacattatggcccagttgatatcaaatgtaaaatgtnaatgcatgtaaatgcacacttcattttatgtattatttagtaatttgcagtggtatgtgtttaatatttttgctacctacacattaggcaaaaaaaagatgtaaataatttgggagaaaaagaggaagaacagtgtaaaataaaactttctataagtactccatttcaatgtgttcaacatcatcctaaaaggcaagattttcccacgcaggtgacaaggtggtttatgtactatttaagggcggaaggtgcgtgcccgttcaataagcatgttttttgccaggtaggaaatatgttccatatctttacttatcattgcatttcagatgggaactagaaaaactggagagaaaaatgtaatgaaactgctgctgtaaattattccttttagcatgtattcacttgctaaatacacatttcttcaaaataaaaaaaaaaaaaaaaaactcgta

SEQ ID NO: 247 - DNA, 1119 bp, Homo sapiens
ggcacgagccttgatagcttttctagtaccatgtggatttctagagaagggaatattcccagaggaaacaggggcaccaaacaacaaatatcaagtatacatgttaagacaggtttttttcttcccgctatgtttagggccagtaagaggtctcttaaggacagtcagtgtgattgaagggttatacagttttcagctttgaacagtattggatcaaaattgattttgcttttaatattgacatctattattgctcagtgatggatatactgcgttggtgggtatattgtagcagatactgttatttcttctttttatatgtttaaagtatttcataattttaataaaatagaaaattaactttgctttgatttaagttggtgaataataacaaatatttgggttataattyccctttagtattaagttagctgtagaaatggtgttgtatctgacctagtaacccatttgactttttaaagatgaattactaaatttttttaatgatatgaaaaaatgtaatttgctccctttacctcttatcaatatatttatgataccataggtacctgcaaggtgtggagttacagtccgagacagtctaaagaaagcactgatgatgagaggtctaatcccagagtgctgtgctgtttacagaattcaggatgggtatggtttgtatgtgrcgtgaaattttgtttaaaaagaaaatcacacattaaactttgaagttttcttaggatctttaccaaaacctagggaattgaaagtgtactttaggaaaaagtattaaaataatactaagttagcctgaagaaatactgtaggccatatgaggagttaaataattgtatatgactgtagggtttgttactttgatcaaatgattttatttggaatttgagattcttacaatttttgaaccattcagagtgtgatttatttggataatagactcttacccccctcccatttttaatacaaactcatagtttcacaaaaggtatatcaaaattaacattttatattgacctacttttctttcagaaagtgtctaacattgttccaagaccctcacattttgaatcctctttaaaaaaaaaaaaaaagggcggccgc

SEQ ID NO: 248 - DNA, 927 bp, Homo sapiens
ggaattcggcacgagcacttttagtacagcatttccaggaactatgtatcagcatataaaaatgcacagaaggattctcggacatctatctgctgtttactgtgtagcatttgataggacaggacatagaatctttacaggttcagatgactgtttggtaaagatttggtcaacacataatggccgcttgttatctacattaagaggtcattctgcagaaatttcagatatggcagtaaactatgagaatacaatgattgctgcggggagctgtgattaaaattattagagtgtggtgcttgagaacttgtgccccagttgctgtgctccaaggacacacaggatcaattacatctttacaggtaaacttgtagcttagtgggcacattccctatatgtattttcacctttttctttaaaacagtttctttgggaattgagaaatagtaagatgtgtattagttatgttttaagtaagagaagtgataatcattcatacaaatcatacaaatcatggaaggctgatgaaatgaagatctaatgcatatttacatgaaggcttattgatattttggggttatggttgaactggatgagtgtcaattagaaactggtgatagattaattatttttcaactttaaaacttgtggattttgctaagttgattttttttttttttttgagactgagtcttgttctgttgcccaggctggagtgcagtggtgtgatctcagctcgctgcaacctctgcctcctgggttcaagcgattcttgtgcctcagcctcccgagtagtctcggtactcctgaggttgagggaggattgcttgagccaggaggttgaggctgcagtgagccgttatcgcaccagtgcattccagcctgggtgacaaagtgagactgcctcaaaaaaaaaaaaaaaaaaac

SEQ ID NO: 249 - DNA, 1365 bp, Homo sapiens
ccacgcgtccggtgacagaatacatgttagaaagactgactgctctgcaactccttattaacgttaagtattgatgggtcaagacaatggtctgaccctcctgagaccctgaagcaccttctcgtgttcagtaatcctagcattcctccccaagcagacccctcgcaggcctctgcattaggctctggctctggtgcttggcattgccctggggtcacttcccctgcatatgtgttggtatgtcatctccaggcctctttggctcaacaggctctgcatgtcctccaggctttttgtgttgccacagccctctgtattgatcactctcagacctgcagcctcagtgggctttttgcctgtgggagaacatatctctaggctctaagtcaagccagctgcctgcccagctgagctctctgcagctcttcccattccagctagtttgggctgtaggaatcaactgagaggtgtccctttcctgaagctacatgcggaaatcatttccttgtcttacacttggcagtccttgcatcactgttttctgcagtcctgatgtagtctgtttctagaattctcaagcatttttagaaaaatatttttatagaaaaatactcaggctaacctagtggatataatcttggagcttccagattacccacttaaagatcaaagtattatatgctgtgtgctttttagctgttagtgctatgaaagcaaaaatgctttctgcgttgtccttcctgatctactggacaccaacgagcatgtgcttaacgctgtggaagtaggctcaaaggtctccccttatatagcatgttaagtgtttgtacaggtttgctaaaaccctttctatataaataagtttattaggttttctgttacgtagggtctctagttccttcctcctctcaaaatctccctacgaagatggtgttccactgagcgagctcagcgcaagtaggagagagcagacagctttactggtcacatgtatgctttgatttagcacaatgtttcatagaaagtactgaccaggaaacacaggtgtcacatctctagaaagaaagtacgtagtatttcaattcccagtgtgtaccttctgtgttttttgtaagtaaaagtaagactctatactgatctcagtcacccattctggttttcaagtatgagctatataggctatgcgtgacgcttattaaatacttttgtaccatgagtaaacttggaggtctgttgcaagaaccatgaaaaaaaaaaaaaaaaaaaaaaaaaaaaaaaaaaaaaaaaaaaaaaaaaaaaaaaaaaaaaaaaaaaaaaaaaaaaaaaaaaaaaaaaaaaaaaaaaaaaaaaaaaaaaaaaaaaaaa

SEQ ID NO: 250 - DNA, 1478 bp, Homo sapiens
  misc_feature (2)..(2): n equals a,t,g, or c
  misc_feature (42)..(42): n equals a,t,g, or c
  misc_feature (46)..(46): n equals a,t,g, or c
  misc_feature (49)..(49): n equals a,t,g, or c
cnccggggaccgatccagcctccgggactctagcttagcccncggncgnataccaatttcacacaggaaccagctatgccactaggcttttgcaaaaagctatttaggtgacactatagaaggtacgcctgcaggtaccggtccggaattcccgggtcgacccacgcgtccgattagaaattagtgctagaggatttaattagccagctcacaggatgcagtccctttaatttaggatttccctttgagaaaattatggagttgaaaaggaatatgatatttcatacaagtttccatcttgggcccttatgttgtttgttctgctgatctggaaattgtacatgatttacattaaaactttttgtttttaatatcgattattgtagtgtggggtgttagattatgtgcaatagttctcagagttgggaaaggtaaaagggtttttttgggcaatgattaactcatctactttaccagggttacataatcaagtattagttactatacatttagctaatgcagtgggtttagttaagcaatgaatacattatcawgggagcattaacacttttgcatttttagacttgcctttaaaaaaattacagaaaaactcctcacaacccttgccaccctttcagccataacattacattgccttggtttctgcctttaatttccctgggggttctttttatttaggaaaagggtgaaagatgtatttgtgtaagtactacaccagtgcttctgttaaattctttttcaacaaagaatatgttacttgggtgccttgtacacagggcgcatatttttttggaaataatgtgccatgaaagcagtagtttttagtgtgcatgtttatttcatgtctgccagtttattttagcttagaaatttcctaatgctttgagtttataacagtctttcagtttataacagtctttcagttaactgagtgcatatacataatatgcacaaaatggccaacttttagaaattgtgtattttaaaatcccttttttttcagtckgatatcatgtgtctccttgttccctttaatatgcaactaaaatttamcctaagatatgaaaaatatgttaagaaagcttaatttcttaagcttaatttggaacgtcaatgaagaattaaacatttgctttctagaaaccttaatctttgttaatgtgaaattaacatagatgatttgaatatgtgttcatgtgtgaggactttgccccttcagtgtttctctactgagtctttttgacctactataagagctaagtgcaaataatgccacatcaatatggcgtagagaagagttctttcttccgcctgttggcagtgcattataagagcagttcttcaactttctggtatcactcttaataatggaagtgcccatagcgcttttgcttatgagaattatatctagtgatatttactatgtttgaaattaaaaaaaaaaaaaaagggcggcc

SEQ ID NO: 251 - DNA, 1125 bp, Homo sapiens
cggcacgaggtgatgatggcctgttttggagtgtgtctgagactgggattgcatttggggtttcccgtgtgcttgggatgctagagggtcacctgcaggaggcctggggccggcgagaaatctcctgtgatgccctgtgaaatggcttgtctcctcccccatcagggcccaccgaaagctcaggggagcacagaagcccatggaagcccagggagatgtccctggggcagacactaaggcaggtgttgaagacaagctgcttgtcaagaagcatttcccggcaagagaggggcaagtcgggggctccaactgggtacagcctgggtgcagttataagcccctttggcttacttggtagaagatggctacttggatgtacctcacttaaagatgttttgtaccacactaggtctctgggcccttgtgcttcctgtgggtggggtgagggccaaaggctatggtttcctgcctccaggagaatggagagaaagggcttccaggcccctccaagcctggggaaggacgtggcatccaagctgagccagagggaactgctgctggcctcccttcatttctgtggaccttggaggctttggctttgtggcagggcctccccaggcagctctgggacctaggagtttgcttctgatagggtcagctttcccatttcccttcaatgcttgggaaccttctcccttagcttcacacttgccatttcaagccctgctgggaccttgtggcttggctggaatccaggactgtattttcatggagaagaacctgcagattcttccatcctcagctggccatggcccacagctctgcatctgcatctgagcttctcaggactcctggagcatggggggaatggggcggggccactgctctgtgctgacgggctccgtctcggagattcttgtcctgtttttttttctgttgtttttttttggctggtgctggggacaagcctgtgcctgccaaagctcccaggccaagtttgggggctggtgtttggggttgggtttggggttcaggatgctgcagtctgtgcaataataaacccgcatctgctcaaaaaaaaaaaaaaaaaaaaaaaaaaaaaaaaaaaaaaaaaaaaaaaaaaaa

SEQ ID NO: 252 - DNA, 1157 bp, Homo sapiens
cccccgggctgcaggaattcggcacgagaatgtggctcctgtgtgtggcgttggcggtcttggcatggggcttcctctgggtttgggactcctcagaacgaatgaagagtcgggagcagggaggacggctgggagccgaaagccggaccctgctggtcatagcgcaccctgatgatgaagccatgttttttgctcccacagtgctaggcttggcccgcctaaggcactgggtgtacctgctttgcttctctgcaggaaattactacaatcaaggagagactcgtaagaaagaacttttgcagagctgtgatgttttggggattccactctccagtgtaatgattattgacaacagggatttcccagatgacccaggcatgcagtgggacacagagcacgtggccagagtcctccttcagcacatagaagtgaatggcatcaatctggtggtgactttcgatgcagggggagtaagtggccacagcaatcacattgctctgtatgcagctgtgagggccctgcactcagaagggaagttacctaaagggtgctctgtgctcacgcttcagtctgtgaatgtgctgcgcaagtacatctcccttctggatctgcccttgtctctgcttcatacgcaggatgtcctcttcgtgctcaacagcaaagaagtggcacaggccaagaaagccatgtcctgccaccgcagccagctcctctggttccgccgcctctacattatcttctcccggtacatgagaatcaactcactgagcttcctctgaagccttgaagggttttcagatccaaggaacaaaggggaaaatagacaaaggagtgcagaggacctggcctggcactggcttatttacctgagctcaaggagatccccgctggagcagcctctgcaaaagggagcccatgtaggccaggggctgtccaaactccagcttcttcccctgggaaaaaacccaaagaaccaaaaacaaaccaccccaaggataataatagctacactgctagcttctcaagttcttgtgaaaaacaatttacataatgacacagtagatgtggaacacctagcccagtgcctgggcaggtccctattatcataaatgaacataaaagtgctctaaaaacaaaaaaaaaaaaaaaaaactcga

SEQ ID NO: 253 - DNA, 1552 bp, Homo sapiens
ggcacgagaaacagaaatgatactaatatcggtgattccttccttttttcctgtaataagtgctgtgcagacaacatatgagcagtgctgataaatgtaaatgtatttttcatagctcattaagaatcagtttcagaaagagatgtctgcttattttgctacttgaagaatccctgtcaaacagtccttttgaggaagtacaagaggctgtctctattgtgacctcaggaatggctgtgacagtgtcgtgagcagtccttttcctgtggcacagatctgaactttgtgttgcagaaaaatcttggcttcaagtgagccaagatgccccctgagcatcagcatcacaacttcatcctcctatcttgaagttcatgttatagtgactttaatgaaatcatagaacactgtttcttcgtgaacaatgacgagggagaggaaaaaactttattgaaaaataaaaaggcaggtaatttagatgaaaatatgttacccatgaggttttgtttttgctttttgtttttgtttttgagaaacagaatctcgctctgtcgtccaggctggagtgcatcggcatgatcttggctcactgcaacctccgcctcccgggttcaagcgattctcctcagcttcccaagtgttggtactacaggcatgcgccaccacaaccagctaatttttgtatttttagtagagatggggtttcactatacgttggccaggctggtctcaaactcctgacctaaggtgatccttctgccttgggctcccaaagtgctgggattacaggcatgagccaccttgcctggccctacccatgagccttgactaaaacattcttctatctgtagaaaagcccaaaagaacttttccagattcaaaaaacttggcactttgtaatggtaatgtttacattaagtaaaaaaaaaaaaaaaaaacctggcgagaagggaacggagttttcatcaggtagattggtttttgtgcggccgtcctccaccgtttcctccaggacagcacctagtcgtggccggaggagtctcagagctgtcagaaagaataagactgattttatgggaaaattaagcagatgctccagtttgagaaacctggatctgcgatctgtttgtggtaccagcatcaagatgatttatggtaataagatataaaaccaaggaaaataacctaaagtctgaaaaagaccagaatcgaagtttcctgattcatattttaatgttttgaaatttatactccaggctgggtgcagtggcttgtgcctgtaatcccagcactttgggaggccgaggcggccggattgcctgaagtcagaagttcgagaccagcctgaccaacatggtgaaaccctgtctctacttaaaaatacaaaagagctgggcatggaggtggtgcgcgcctgtaaccctagctactcgggaggctgaggcctaagattcttgaacccaggaggcagaggttgtagtgagccgggatcacgccactgcatctagcctgggcgacagagagagagactgtctaaaaaaaaaaaaaaaagaaa

SEQ ID NO: 254 - DNA, 897 bp, Homo sapiens
ggcacgagggacaatgaagagtatgaaattgaagtttttctccattgaaaacattcagggaggactttgattaaaactttttgtaaaaagtttcagtagtgttgacttgaggatgatacaaagctgtatactatgttagttagatccttgcttctcaggtctgggaaacatcttcatacatcttccatgcacaggtgtactcatgtgcgtgtttgtatatgagcttatgcttctctctctggtgtttcttcctcattggtctttaccttctcttccttacttttcctttgcccttcatagcaatactgttaagccagatatttacttcttatgtggatcaaatagtcttatatttcctgtggacaagagatatgttttctactcatttatttctctaattgtgaataggaaacagctagaaaattggaataccttcagcttatgtggctgttgattgactttgtgattcagtgggccttgatatattagaaaaaagtcttttcttttctcttaaaattagtataaaggaacgcatgaactcagtatatgaccttagagacagaaagaaaaaaaaattatgtaacagccctttgagagtgaggaaacattggcactgaaggtaaaagcaacttgtctggagccatataacaagtggcagagccaatagtagaactccagccttctggagagttcttgctcccagatcttgctctctacatgagatgtggactatgtgtctcttcaggttgtcacctggttctttcaagttgctgagttcttccttggggaagtgcagaagggaattaatagagaggatccatttcgtagtctctgccactttttgtgcttatctccctctcatttcagtgtgtcttatttggcaaaaaaaaaaaaaaa

SEQ ID NO: 255 - DNA, 1767 bp, Homo sapiens
cggcacgagcgcggtcgcgtcataggccgaacaaccaaacagaaaagtttaataaacagcggacggaggggccggcggtggcggagcggagcaagcaggggttcggcggcattacctgtacccattcaccggcggctaccggcggcggcgcgcagctgtcaggcggagagacccgccgccaggaatgaatctgaagtctgctgcagtaaaacacagaaggctttaaaatgttttcttgcataaaattcaaaacttttaagtagctgcttatgagaatagggaaggcagaaagctaatgtctgtctcaagatacaggacagctgtttgctcatcaacctcaactgtgtgtgcaactgaggaacatggctcaagaaactaatcacagccaagtgcctatgctttgttccactggctgtggattttatggaaaccctcgtacaaatggcatgtgttcagtatgctataaagaacatcttcaaagacagaatagtagtaatggtagaataagcccacctgcaacctctgtcagtagtctgtctgaatctttaccagttcaatgcacagatggcagtgtgccagaagcccagtcagcattagactctacatcttcatctatgcagcccagccctgtatcaaatcagtcacttttatcagaatctgtagcatcttctcaattggacagtacatctgtggacaaagcagtacctgaaacagaagatgtgcaggcttcagtatcagacacagcacagcagccatctgaagagcaaagcaagtctcttgaaaaaccgaaacaaaaaaagaatcgctgtttcatgtgcaggaagaaagtgggacttactgggtttgaatgccggtgtggaaatgtttactgtggtgtacaccgttactcagatgtacacaattgctcttacaattacaaagccgatgctgctgagaaaatcagaaaagaaaatccagtagttgttggtgaaaagatccaaaagatttgaactcctgctggaatacaaaattcttgagcatctgcaaactaaaaattgacttgaggttttttttttcctagtcattgggaatgtagagcagtgtatcttgcatgtcatcggaagaatagatttttgttttggttttgttttgaaaatgactctgaacatttatttccattgcaatttctgtggctgaggagacttaaactttacaagtattatccttttaagatcattttaattttagttgagtgcagagggcttttataacaaacgtgcagaaattttggagggctgtgatttttccagtattaaacatgcatgcattaatcttgcagtttattttctcattgtgtatgtatatatcgcttttctctgcagcacgatttctcttttgataatgccctttagggcacaactagttatcagtaactgaatgtatcttaatcattatggctgcttctgttttttcattaacaaaggttattcatatgttagcatatagtttctttgcacccactatttatgtctgaatcatttgtcacaagagagtgtgtgctgatgagattgtaagtttgtgtgtttaaacttttttttgagcgagggaagaaaaagctgtatgcatttcattgctgtctacaggtttctttcagattatgttcatgggtttgtgtgtatacaatatgaagaatgatctgaagtaattgtgctgtatttatgtttattcaccagtctttgattaaataaaaaggaaaaccagaaaaaaaaaaaaaaaaaaaaaaaaaaa

SEQ ID NO: 256 - DNA, 1129 bp, Homo sapiens
ggcacgagcctaaatatacgcacacctgaggttgtctttataggagctttatggttgcaagttttgtgtataatctttaatcattttgagttgattattgtgtatctagtaccataagagtcctgtattattcttttgcatatggatatctagttttggaaatcttccccgttgtgtcattttggtggtgttttgaaaaatgtgttcattccatataaatttttgtttattatcgagcacattcattttgctcactggtctgtgtttctctgtgtacgccagtaacatatgggtttgttaactacagattttcatttaattagaactcagggaatgtgacacatcccatatggtttgtatttctcagaataactttggaaattcagggtgtttcacatttccacataaattttggcattgttctttatatttcttaaaacactatttgtcatatactaaatgtatacaattaaaaggtacaaggaagattttgatacgtgtatatgttgagtaatgataaaatcaggttatttagcatctcttcatctcatatagttattatttttgagtggtaacaacattcagaatctttccttctagttactttgaaacatatggtacatttgtgttaaggctagtcaccctgctgtggaatagaaggccagaattgatcagtctcatctgagagtaactttgtacccatcactgattccttctgagactgcctccacttccccagcagcctctggtttcttcatgtggctgcagatggcaggatttcccaaaggtttctggctgaaacatattccgtggtgtatctgtacagcagtttcctcatccctgcagctgtgtttgaacaggttcaacagtatggctccaaaggatgaaatttcattctgattttctggctgaagactattctctttgtgtatgtccaccacagttactttatcccttcatctgtggatgggcagtctcgctgtattgcccaggctggagtgcagtggcatgatctcagctcactgcaagctctgcttcctgggttcacgccattctcctgcctcagcctcctgagtagctgggattacaggcacccgccaccacgcccaggaaaaaaaaaaaaaaaaaa

SEQ ID NO: 257 - DNA, 1284 bp, Homo sapiens
ggcacgagactcgtgccgaattcggcacgagcaacagcaaaagcctagtgcattgggagatgtgcaacctccctgaaaatcttttctgtttctggagtacttcaggggtggcctctggccccagagcctttgccacagtgctcccaccagcccccacctcatccgtctgtttgcagagcctcatctacaggtccccacgctgccttctttactcactctgcgcttggccgttttgttatttggcttagtctacattgggcggaagtctgtgtgcacagagtgggtgttccttcgagccccttccactcagagggccacacccagcgatgccagtgaaggtggcacagcctctcttcagtttctcctgactgtgatctcactggggtagaattcccctgagagaatccctcactcacggctccctttgccagagtcagttcaatcaggtctgatgtgagcaatttacacacttgtctcagaaagtccctcagggtttgtagaggactgcaggggggcatccgctgcagactcagcctttctctgcagccatcctgcagtgggggtgagcgggcacaggctgagaactgctcttgggtggtggaagcaggtgtcacggtgcaagtctccccctgcacccctcccccagcttgagccgtgtcacccccctctccctccagcatgggcctgtgtctcaggctctctggaaggtggccctgccccggaccctcttgcaggtgtcctggtttgacttggaactagatggccatctttccaggctttggtggcccaagagcagtctgggtggatggaagtggctgtcccctcctctccagcccctgcccacccactggtggaggtgctaactagcagggacgtggcataggatgggagctgggcgtgaggtgcttggggtccattctttgtccctcagcttctcagagtccggccagcccttgtgttcccgtgccccacactttcctcctccccactgcagtgagtcaatagtccagggtggggcctggcctccctgccctgattggggactcaggaggtgaggcctgcggggcttcctgccccctccttgcccacctgcctgcccccgggcagcacgggagggagagcagggtgagcacgcttgttggtttcagatgcactttctgcttgccattgmccgtatctgtgcgttccttcatcctggtcctggctttatggaacaccatgtttttagcatgtttttaaataaaaacggataaagtgtcaaaaaaaaaaaaaaaaaaaaaaaaa

SEQ ID NO: 258 - DNA, 833 bp, Homo sapiens
  misc_feature (793)..(793): n equals a,t,g, or c
  misc_feature (798)..(798): n equals a,t,g, or c
gggcctgcagggaattgggcagagcagccatcaggtaggctgcgttgaggatctttgctcttccatccgcctttgatcgtcttcctcttcagccatcaggtaagccaagatgggtgcatacaagtacatccaggagctatggagaaagaagcagtctgatgtcatgcgctttcttctgagggtccgctgctggcagtaccgccagctctctgctctccacagggctccccgccccacccggcctgataaagcgcgccgactgggctacaaggccaagcaaggttacgttatatataggattcgtgttcgccgtggtggccgaaaacgcccagttcctaagggtgcaacttacggcaagcctgtccatcatggtgttaaccagctaaagtttgctcgaagccttcagtccgttgcagaggagcgagctggacgccactgtggggctctgagagtcctgaattcttactgggttggtgaagattccacatacaaattttttgaggttatcctcattgatccattccataaagctatcagaagaaatcctgacacccagtggatcaccaaaccagtccacaagcacagggagatgcgtgggctgacatctgcaggccgaaagagccgtggccttggaaagggccacaagttccaccacactattggtggctctcgccgggcagcttggagaaggcgcaatactctccagctccaccgttaccgctaatataagtaaagtttgtaaaattcatacttaataaacaatttaggacagtcaaaaaaaaaaaaaaaaaanctcgnggggggggcccggtmcccatttscccccaaaaggg

SEQ ID NO: 259 - DNA, 2927 bp, Homo sapiens
gctttttcataatctttccagagtcatcttagtgggatttggggaagcaacagggctgtgtggggtaacctgccacctttaagtggaarkcagaaatggagcaagagccacaaaatggagaacctgctgaaattaagatcatcagagaagcatataagaaggcctttttatttgttaacaaaggtctgaatacagatgaattaggtcagaaggaagaagcaaagaactactataagcaaggaataggacacctgctcagagggatcagcatttcatcaaaagagtctgaacacacaggtcctgggtgggaatctgctagacagatgcaacagaaaatgaaagaaactctacagaatgtacgcaccaggctggaaattctagagaagggtcttgccacttctctgcagaatgatcttcaggaggtgcccaagttatatccagaatttccacctaaagacatgtgtgaaaaattaccagagcctcagtcttttagttcagctcctcagcatgctgaagtaaatggaaacacctcaactccaagtgcaggggcagttgctgcacctgcttctctgtctttaccatcacaaagttgtccagcagaagctcctcctgcttatactcctcaagctgctgaaggtcactacactgtatcctatggaacagattctggggagttttcatcagttggagaggagttttataggaatcattctcagccaccgcctcttgagaccttagggctggatgcagatgaattgattttgataccaaatggagtacagattttttttgtaaatcctgcaggggaggttagtgcaccttcgtatcctgggtaccttcgaattgtgaggtttttggataattctctcgatacggttctaaaccgtcctcccgggtttcttcaggtttgtgactggttatatcctctagttcctgatagatctccggttctgaaatgtactgcgggagcctacatgtttcctgatacaatgctacaagcagcaggatgctttgtgggggtcgtcctgtcctctgagttaccagaggatgatagagagctctttgaggatctgttaaggcaaatgtctgaccttcggctccaggccaactggaacagagcagaagaagaaaatgaattccaaatccctggaagaactagaccctcctctgaccaactaaaagaagcctctggcactgatgtgaaacagttggaccaaggcaataaggatgtacgtcataaaggaaaacgtggaaaaagggctaaagatacttcaagtgaagaagttaacctgagtcacattgtaccatgtgagccagttccagaagaaaagccaaaagaattacctgaatggagtgaaaaagtggctcacaacattttgtcaggtgcttcctgggtgagttggggtttagtcaaaggtgctgagattactggtaaggcaatccagaaaggtgcttctaaactccgagagcggattcaaccagaagaaaaacccgtggaagttagtccagctgtcaccaagggactttatatagcgaagcaagctacaggaggagcagcaaaagtcagtcagttcctggttgatggagtttgcactgtagcaaattgcgttggaaaagaactagctccacatgtcaagaagcatggaagcaaacttgttccagaatctcttaaaaaagacaaagatgggaaatctcctctggatggtgctatggttgtagcagcaagtagtgttcaaggattttcaactgtctggcaaggattggaatgtgcagctaaatgcatcgttaacaatgtttcagcagaaactgtacaaactgtcagatacaaatacggatataatgcaggagaagctacccaccatgcggtggattctgcggtcaatgttggcgtaactgcctacaatattaacaacattggtatcaaagcaatggtgaagaaaactgcaacacaaacaggacacactctccttgaggactatcagatagttgataattctcagagggaaaatcaagaaggagcagcaaatgtcaacgtgagaggggagaaggatgagcagacgaaggaagtaaaggaggcaaagaagaaagataaatgatgaagtgctgggaatcacttataccaaagccttatgaaatggatgaaattttgttaaataggcaaatgtggaattcctcacagattaaccagtattttttaaatgtattcattcctacaaattaactttcataaattttatggcatgtcttctatttaaaaggaaaagaataagtattcttgcatctggccttagaaatgtgaagttatattctcaagtttatttttttccaagtgtagctaaaatatttttgcaggtaaaataaagctgatagtacatgtgttgttcaaaccttgttaaacctaatattgaactatttttatatctgctgtctttcagaaggcaaataggaaactatatatttgcttaaaaattggcatttagtaaccttaattctttttatagaaggaatgacttaaagtattgtcccctctttttgcactaattgtggatttttttagatgcttctcaaaattttcagtgtgtaagctaaacaaaaactaaaactaagaattctcaaaaaaacttgttcaaaacagggaaagactgatgaaaagtaaaatggactacttttgtaacttacctgtttgttaggaaatggaatggtctctttgatttaaaatgaataaaaatagattattacgtcttttgtattgagactgtattgttatgagcctaggaaatttgggaacatgattgtattgtattaaaattcgaagtgattattatcagcttaattggattaaaaaagtacttcaagaaattaaaaaaaaaaaaaaaaaaaaaaaaaaaaaaaaaaaaaaaaaaaaaaaaaaaaaaaagggggggggc

SEQ ID NO: 260 - DNA, 1249 bp, Homo sapiens
  misc_feature (1138)..(1138): n equals a,t,g, or c
  misc_feature (1196)..(1196): n equals a,t,g, or c
  misc_feature (1202)..(1202): n equals a,t,g, or c
  misc_feature (1225)..(1225): n equals a,t,g, or c
acgtcccgcgcgtcggcggccgcggagcagcgcagggagccaggcgggctgccggcgggtgtgaagaaaaaaatgacactccaatgggctgcagtggcaacctttctttatgccgaaataggactcattttaatcttctgcctaccttttattcctcctcagagatggcagaagattttttcatttaatgtctggggtaaaattgcaactttttggaacaaggctttccttaccattatcatcctattgattgttctatttctagatgctgtgagagaagtaaggaaatattcctcagttcataccattgagaagagctccaccagcagacctgatgcctatgaacacacacagatgaaactttttaggtctcaaagaaatctttacatttctggattttccctatttttttggctagttttgagacgtctggttacgcttattactcaactggcaaaagaactgtcaaacaaaggtgtacttaaaactcaagcagaaaatactaacaaggctgccaaaaaatttatggaagaaaacgaaaaactaaaaaggattttgaaaagccatggtaaagatgaagaatgtgttttggaagcagaaaataaaaaactagtagaagaccaggagaaactgaaaactgaattaaggaagacttcagatgccctttctaaggcacaaaatgatgtgatggaaatgaagatgcagtcagagagactttcgaaagaatatgatcaactcctgaaagaacactctgaacttcaggatcgtttagaaagaggcaacaagaaaagactgtgaactttataaaagacacttgcaatatactgtgtcaaaatgataattttgttatgttagcctctagaaaatttaagttcagaaaaatgcactatgaccggttcgtaatttttttaatgccacacataggttgtattgtaatggcattatcaaaatatttgatgatgtttcagatatattgcaaagtctgtattccagctcttaagaaaaatataagcatgttaaataccatatttacatattgataatgtcattggtatatggtggctgtttaccaataaaaggaaaaaattcattaaccggttgcttccaaaattaggaagwtytamgttgcatgaaaccnttaataggccttggaaagctttggattaaggttttccaggtaattaataacccctttnaattcnggatggatggtgtgtttggaaanaggtgttccatttccggccaattt

SEQ ID NO: 261 - DNA, 1129 bp, Homo sapiens
  misc_feature (564)..(564): n equals a,t,g, or c
gggtcgacccacgcgtccgcaaaggttcatgctattcgatagatgctttcaaaatgatgagtgggaaatgtaactttgtcatcttgcagagcctacaatgcaaacattttttccgccccatgtacagtttcatttacatagtgttgtcaaggaataagtgatttgtttcacttaagtgatttttccaggtaattgaagcttacctctttgtgcacacattattctttgcttaaactttctttgatgaaaacatggcacakggttctttcctttttttttgcttggtacatataaatgtggctacatcttttcttgacttggggttatcatgataaagattgctttgttctgtgccgtaatcctgttattgacagctgaattgtgtgggattgagagcctgtatgtgaatagtcacagatccatattcttttagagttaccattattactaataatatagcycctctgagtcattagcaaatcccaggcaggatgctaagaattcatatacattataatcttggctaaaccatccaccccactccaagaaatgatcattattatncctcctactttacaggtaaaaattgaagtttaagggataagtagtaagtggtagagttgagatttgcatccatgtctctctaactgcaagatgcctgttgccagttatacttcttctatttctcctctctgcccctctttgggtatttctgtctgtccggttgctttaaaagcctttgcccaggtaagggcccgagattaggtctgtgcctattttgtggaaattattggtatgtttttcgttaagtggagttctgaaggcatttttgctgatttctgggttcccagacatctgcacggttgccgtttctagaagtctaacctgtgaattcatcactgtgtatgctaaggctttgggagggattataggattttctgcattatgattaagcagcataatcaagaaacttgcagtcagaggaaagcgtggcaattctgtaatgcagaagttggcagaycttttctgtggagggccagatactaaacgtcttagttcattttgtgttgctataaaggtatacctgaggctgggtaatttattaaaaaaaaaaaaaaagggcggccgc

SEQ ID NO: 262 - DNA, 3097 bp, Homo sapiens
ccagcttgctcgcactcggctgtgcggcggggcaggcatgggagccgcgcgctctctcccggcgcccacacctgtctgagcggcgcagcgagccgcggcccgggcgggctgctcggcgcggaacagtgctcggcatggcagggattccagggctcctcttccttctcttctttctgctctgtgctgttgggcaagtgagcccttacagtgccccctggaaacccacttggcctgcataccgcctccctgtcgtcttgccccagtctaccctcaatttagccaagccagactttggagccgaagccaaattagaagtatcttcttcatgtggaccccagtgtcataagggaactccactgcccacttacgaagaggccaagcaatatctgtcttatgaaacttgctctaccagcaatgcgatgcccagccaggggccagcgggtctggggtctatgtgaggatgtggaagagacagcagcagaagtgggagcgaaaaattattggcattttttcagggcaccagtgggtggacatgaatggttccccacaggatttcaacgtggctgtcagaatcactcctctcaaatatgcccagatttgctattggattaaaggaaactacctggattgtagggaggggtgacacagtgttccctcctggcagcaattaagggtcttcatgttcttattttaggagaggccaaattgttttttgtcattggcgtgcacacgtgtgtgtgtgtgtgtgtgtgtgtgtaaggtgtcttataatcttttacctatttcttacaattgcaagatgactggctttactatttgaaaactggtttgtgtatcatatcatatatcatttaagcagtttgaaggcatacttttgcatagaaataaaaaaaatactgatttggggcaatgaggaatatttgacaattaagttaatcttcacgtttttgcaaactttgatttttatttcatctgaacttgtttcaaagatttatattaaatatttggcatacaagagatatgaattcttatatgtgtgcatgtgtgttttcttctgagattcatcttggtggtgggtttttttgtttttttaattcagtgcctgatctttaatgcttccataaggcagtgttcccatttaggaactttgacagcatttgttaggcagaatattttggatttggaggcatttgcatggtagtctttgaacagtaaaatgatgtgttgactatactgatacacatataaaactataccttatagtaaaccagtatcccaagctgcttttagttccaaaaatagtttcttttccaaaggttgttgctctactttgtaggaagtctttgcatatggccctcccaactttaaagtcataccagagtggccaagagtgtttatcccaacccttccatttaacaggatttcactcacatttctggaactagctatttttcagaagacaataatcagggcttaattagaacaggctgtatttcctcccagcaaacagttgtggccacactaaaaacaatcatagcattttacccctggattatagcacatctcatgttttatcatttggatggagtaatttaaaatgaattaaattccagagaacaatggaagcattgcctgtcagatgtcacaacagaataaccacttgtttggagcctggcacagtcctccagcctgatcaaaaattattctgcatagttttcagtgtgctttctgggagctatgtacttcttcaatttggaaacttttctctctcatttatagtgaaaatacttggaagttactttaagaaaaccagtgtggcctttttccctctagctttaaaagggccgcttttgctggaatgctctaggttatagataaacaattaggtataatagcaaaaatgaaaattggaagaatgcaaaatggatcagaatcatgccttccaataaaggcctttacacatgttttatcaatatgattatcaaatcacagcatatacagaaaatacttggacttattgtatgtttttattttatggctctcggcctaagcacttttttctaaatgtatcggagaaaaaatcaaatggactacaagcacgtgtttgctgtgcttgcaccccaggtaaacctgcattgtagcaatttgtaaggatattcagatggagcactgtcacttagacattctctgggggattttctgcttgtctttcttgagctttttggaaggataattctgataaggcactcaagaaacgtacaaccacagtgctttcttcaaatcatatgagaaatactatgcatagcaaggagatgcagagccgccaggaaaattctgagttccagcacaattttctttggaatctaacaggaatctagcctgaggaagaagggaggtctccatttctatgtctggtatttgggggttttgtttgtttttgctttagcttggtgaaaaaaagttcactgaacaccaagaccagaatggatttttttaaaaaaatagatgttccttttgtgaagcaccttgattccttgattttgattttttgcaaagttagacaatggcacaaagtcaaaatgaaatcaatgtttagttcacaagtagatgtaatttactaaagaatgatacacccatatgctatatacagcttaactcacagaactgtaaaagaaaattataaaataattcaacatgtccatctttttagtgataataaaagaaagcatggtattaaactatcatagaagtagacagaaaaagaaaaaaggactcatggcattattaatataattagtgctttacatgtgttagttatacatattagaagcatatttgcctagtaaggctagtagaaccacatttcccaaagtgtgctccttaaacactcatgccttatgattttctaccaaaagtaaaaagggttgtattaagtcagaggaagatgcctctccattttccctctctttatcagaggttcacatgcctgtctgcacattaaaagctctgggaagacctgttgtaaagggacaagttgaggttgtaaaatctgcatttaaataaacatctttgatcacaaaaaaaaaaaaaaaaaaaa

SEQ ID NO: 263 - DNA, 1160 bp, Homo sapiens
ttaagtggtctgcccttccactgaaagtgtagctttttgacagtctcagccatataaacaggatctcagtttcatccttccatccatccattagaggcacaaggtctcatctcttttccttttgggcattaaaaccaaagttcatacattattgagacaggccgactctgctaaggcagcctgtttggcctttaagttttattgcttattttttgagtatgtatttatttttttgattattattatttttttttttgagctttaagccttcaagtttcctttttattcttgacccctagacatttcctttgcttgtggactcgggtatttgtttttaggtaatatttttwttccctatgacacagccctcaggagatcctgagaacatgtgccctcatttttaggtaattttaattaggaagggttttaggttgtctgatctgccttgttgctagaaacagaaattctcctatkgattgatttttcaaaccacttcttagtggcctctacaactactccagtcaggtcaagaatggctctcacattgccaagtcagtgggtatttttagtcttcatcttagatgacctttatgcacatttgtctttgtctaggaacttctgttggaaacatcttctattttaatgttattttaaatttttttgcttttgtaacattatgcttagcatgtgtgtccaactctttgacaatttctttttagttttctggtggcttccctttatccaaatttagtattgaaattcctcgagccgctgcttttctcactccataattctggccagaatttggtacttaaaatattttgtctaaaatattacaatagctacttaagtcatctccctgactccactctgttgtctttcagggcgtcgtccacactgtagccaaagtgatcttataaaaacataattctaatcatggcactcttctgcttaaaaatgttttaatggctttccgttaggttaaaatttaaaagtcctttgtagcctgtgagactctacatgagttgactccctagcttcatctttgagcatcttatttctttacttattataccatcagttagagttgattgttatataatccacagaagtgaattctgtccgatttaagcaaaaaaaaaaaaaaaaaaaaactcgag

SEQ ID NO: 264 - DNA, 835 bp, Homo sapiens
ccaccagggacgaccgctactgaggaactagtggaycccccgggrctkgmagggaatycggcagaggtttattgagaggttttagcatgaaggctgttgaatatagttgaaggccttttctgcatctattgagataaacgtggtttttgtcattggttctgcttgtgtgatggattacgtttattgatttgcatatgtttaaccagccttgcatccctgggatgaaactgacttgatcgtggtggataagctttttgatgtgctgctggattcggtttgccagtattttattgaggattttcacaccaatgttcatcagggatattggcctgaaattttgtttttttgttgtgtctctgccaagttttgttatcaggatgatgctggcctcatgagttaaggaggattccctctttttctatcgtttggaatagtttcagaaggaatggtacaatctcctctttgtacctctggtggaattcagctgtgaatctgtctggtcctggactttttttggttggtaagctattaattgctgcctcaatttcagaacttgttactggtctattcagggattcaacttcttcctgctttagtcttgggtgtatgtgtccaggaacttatccatttattctggattttctagtttatttgcatagaggtgtttatggcattctctgatgatagtttgtatttctgtgggatcagtggtggtatcccctttatcattttttttattgcacctatttgattcttctttcttttcttctgtattagtctggctagtggtctattttgttgatcttttccaaaaaaaaaaaaaaaaaaactcgag

SEQ ID NO: 265 - DNA, 879 bp, Homo sapiens
ggcacgagaaactacaaattttaaatagtatatttccagggataggttgtcctgttcctcgaattccagctgaggccaatcctttagcagatcatgtctctgctactcgaatcttgtgtggagcccttgtctttcctactattgctacaatagttggtaaattgatgttcagtagtgttaactctaatttacaaaggacaatcttgggtggaattgcgtttgttgccataaaaggagcatttaaagtttacttcaaacagcagcaatatttacgacaggcacaccgcaaaattctgaattatccagaacaagaagaagcataaaactgacttctggttgttctgcagttctctcatccttatgaatctgttgtgttgttttgattccatcattaatgcacttgtggagacttgtgataagctgctgctcctatattttttaagaaatataataaagcacttagggcaggggaaatcatctcggtaatcatggaacctaaggatgtgatttgttttcattgtttgtatgtactacttttatggcagtcatatgaaccattatcttagcatggtaaacctgggttttgttcatattttctccagacagaaatgcaaagatcaaactgtgcaaatattaaaaaaatgcacatgctgttttattcaaatgcctcttttgtacatgttcatgtttagtgttttctcagaatcagcaactcaaggtactatgaggatttttctcactgacataatttgattacatactaaataagaggatatgttaatatgaggaaatgtaaattaaattagttataaataaataaccaaaaatgtatgtaaacattcaaatgattatctgaaaaaaaaaaaaaaaaaaaaaaaa

SEQ ID NO: 266 - DNA, 575 bp, Homo sapiens
ggcacgaggcttttttagctcaagagtttgttattaccccccttctgaagcttacttccatcaattcctcaaactcattctgtgtccatttttgtgcccttactagagaggatctgggataatttggaggagaagaggcattctggttttttaaattttcagcatttttgcacggttttttcctcatcttagtggatttatctacctttgtactttgaggctgatgacctgtggatgagattctgtgtgggggtcctttttgtcgatgttgatgttattgctttctgtttgttaggtattctaacaggcaggcccctctgctgcaggtctgctgcagtttgctggaggtccactgcagaccctatttgcctgggtatcaccagcagaggctgcagaacagcaaagattgctgcctgctccttcctctggaagtttcgtcccagaggggcatggacctgatgccagctggagctctcctgtataggtgtctgtcaactcctgttgggaggtctctcccaatcaggaggcatggaggtcagggacccacttgaggagcagtctgtctcttagcagag

SEQ ID NO: 267 - DNA, 454 bp, Homo sapiens
ggcacgaggcttgtgagctcaccaaacaaggatttcagtgtagattttgtctttcttgaacttaaagaaacaaatgacaaagtttgaatggaaaagcctgctgttgttccacatctcgttgctgtttacattcctttgtggagcctacatcttcctaagctttttagcaggtatatgttgaacacttctgtttcatggttgagacagaatcagaggccatggatactgacaactgatttgtctgttttttttctctgtctttttccatgactcttatatactgcctcatcttgatttataagcaaaacctggaaaacctacaaaataagtgttgtggtttatctagaaaaatatggaaaatattgctgttatttttggtgaagaaaatcaattttgtatagtttatttcaatctaaataaaatgtgaattttgtttaaaaaaaaaaaaaaaaaa

SEQ ID NO: 268 - DNA, 788 bp, Homo sapiens
ggcacgagccttcatccaggtgagaatgtgctgcagctggtttctttgggaagcctgtgggttaaagtaagcgatagtctatatgccgtgtggccatctacgaataagggctgggattgctggtggctctggtgcagcacagtcactgctttttccatacttggagagcctatgggagtgcgattttgatagggcttgaattgcaggaagagcccatggctcccaaggtggggcttgcatttctatcaagtagctgttaataatggggcagttgctgggcaactgtgtgctcagcagctgggcttttccctcagcccctctactaacctgctgtgaggcaagacaagggcaggacactaacgttcctgtctcctgattctttttctttaccattccttaagagaaggaaagcagagacggtccagtcctgtgatttctcagtgcttgttctaatcatatgtgctgatttcctgttgaatgaagatgaaggccgggtgcggtggctcaggcctgtaagcccagcactttgggaggccaaggtgggtggatcacctgaggtttggagtttgagaccagcctggccaacatggtgaaaccccatctctactaaaaatacaaaaattagctgggcatggtaagtgggcgcctgtaatcccagctacttgagaggctgaggcaggagaattgcttgaacccaggaggcagaggctgcagtgagccgagatcgcgccatcgcactccagcctgggcgacaacactgtctcaaaaaaaaaaaaaaaaaaaaaaaa

SEQ ID NO: 269 - DNA, 908 bp, Homo sapiens
ggcacgaggtaatggctgaggcacaaggagcgagtattttaaatcaggcttatgaatgtgctctgtggatacggtttgcccatagggaggtggttttgggggttgcgaatcatactcaagctgtccctgaccgactcaccagtattctacaaacttactacaaacctctcaaaggaccatcttggaagacactagcaagggcgtgcacaatcccctctgacgttgctggctggtggtggaggccacggagcctccctgtgtgagactgtactatgtggtcactagaatgttttgaaagacagttctctgcaggcccggcaccgtggctcacgtctgtaatcccagcattttgggaggctgaggcgggtggatcacgaggtcaagagatcgagatcaccctggccaacatggtgaaaccctgtctctactaaaaatacaaaaattagccgggcgtggtggcgggcacctgtagtcctagctactcaggaggctgaggcaggagaatggcgtgaacccgggaggcggagcttgcagtgagctgagattgcgcaactgcacttcagcctggcgatagagcgagactccatctcaaaaaaaaaaaaaaaaaaaaatagggacttactgggccggtcggggagggggaggcgggatgggacacccaacactttttccatttcttcagagggaaactcagatgtccaaactaattttaacaaacgcattaagaggtttatttgggtacatggcccgcagtggcttttgccccagaaaggggaaaggaacacgcgggtagatgatttctagcaggcaggaagtcctgtgcggtgtcaccatgagcacctccagctgtactagtgccattggaataataaatttgataaggtggtgaaaaaaaaaaaaaaaaaaaa

SEQ ID NO: 270 - DNA, 1891 bp, Homo sapiens
ggcacgagtgcacctgcaagcatgggggtggcaggagccacagagctggctgctgagaggagctgcagatctggagaagacagcctaggtaaaggtggacagtgtgagagctgctgatgagatagctgctgaataaaactacattttacctgcctatggcccgccaggttttctttcagctatcgcccatccacccagtcccctcgaacctcagcatgggctggaacctgaccctgggcatgacatttggcatagttgtggacctgacacctgtgtttgtcctagtcctgtttctccctgccttcctgttcctctcgctgccctcatggtcactcccaagggatccaacccatgttaagtatgggctggaggactgcatgaatgcctcatgatcttcccagaggcaaaggcacctactgccttccaaggtcagtgggaggttgggatcaacactgtttattatgcttaggacaaaaaagatagggagaaagatgtgcaccttacagtcatctttctgggatagaacacaatgggtcttctcctgcctcctggatatgttagtcaaggccagtccatgctacacatctagtctgacttctaaaatagaagcaccagatgaattcagccctgagagaattttcagcagctgtgggggcgctggaggaaacactattaaatagttttgcacctgagacagatagcctcactcgcctcaccctagtcctggtggcatttgtctcaggtgcaaaatttaagaaagaaaccttggagtgctcaccctgtggctgggtagatggtcctaaagtggtggttttcaagcctgagtgtgtatcaggatcatcaggggagcttgctaaagagcagttcctgcggtcagaccctcatgcattttgagcaggtgtggggactgggaaactgcatctgtaacctgctgtaatctaacgcttatctaaatactactgtgctcacacagagaacaccgcaaaagtagaggtgttcctccagagggcaggtgagcagatggcacagtctgcttggaattcagtcaggtgatgagagatgagatgaggcactcctagctttgggaagagggagctgaaagatgaacctttgcaggtgcccacggtcaaagtggtggtttaatgccatgccatgcccattttctgttggccttggcagggagttacagccctaccttaggacctggctccttatttctgctgtaggctctttcctgccctggccgagatggagtggaatgagacctagaaacatcaagctaaatacatgtcctcagaaagataaaggtttacattttcacccccatcaaatctgaaagctctctgcctgtgtttttctaagggatagggacatcattactcagtccacaacctggactcatgtagggtcccctgtcagtaaaggagtcagtcaagcccaccaggtataccaaggactcttaccctcagcccctactccttggaaagctgccccttggcctaatattggtgtttagcttgagcctgactccttctcaacactaagagctgatgaagtcctgaagcagaaagagctctgacctgagagtcaaacatccttattctgatctcagctcagcccctgatttgttgtgtgaccctggatatgtcacttcctgtctttttgactttttaaaatgaagggtagactagaggagagcttctaaaactttaatgtggtcaacgaaatggaataggaaattccacaagtctgtccttccacaaaagcagcaaataaggtggcaaaaactcaaatttatgggaactctggaaacgaattgaaagtttacagcaatcaggtgaatacctaagaataaaagctggatttagtaagaaaaaaaaaaaaaaaaaaa

SEQ ID NO: 271 - DNA, 434 bp, Homo sapiens
tatagcattgtacatatgacaagtcttttgcaaaactgtgtgatctttgtgaaagtagtacagtatatgacctttaatttctttttttttttttttttttttttttttttttttttttggtagttgataataagcgaaggctttaaaattttttatttgaaagaatttgttaaattctactatgggtcttggaaataacccatagtagaatttaaaactaagagcatactttccaaaatatggtctgaagaaaacctctatcatatggcaaatgaagcaaactgagaaagcatgaaaatagaaatcacagaataagaatgatttgcacacaccaagagtttgagaaacatgctctaatgatggaggctggcttaataagatttggggttttcaatgctatagaattcgatatcaagcttatcgataccgtcgac

SEQ ID NO: 272 - DNA, 1760 bp, Homo sapiens
ggaggagctcaacagcgggaaggtgatgtacgccttctgcagagtgaaggaccccaactctggactgcccaaatttgtcctcatcaactggacaggcgaggacgtgggaccccaggccccagtgggctctgtgtaccagaagaccaatgccgtgtctgagattaaaagggttggtaaagacagcttctgggccaaagcagagaaggaggaggagaaccgtcggctggaggaaaagcggcgggccgaggaggcacagcggcagctggagcaggagcgccgggagcgtgagctgcgtgaggctgcacgccgggagcagcgctatcaggagcagggtggcgaggccagcccccagaggacgtgggagcagcagcaagaagtggtttcaaggaaccgaaatgagcaggagtctgccgtgcacccgagggagattttcaagcagaaggagagggccatgtccaccacctccatctccagtcctcagcctggcaagctgaggagccccttcctgcagaagcagctcacccaaccagagacccactttggcagagagccagctgctgccatctcaaggcccagggcagatctccctgctgaggagccggcgcccagcactcctccatgtctggtgcaggcagaagaggaggctgtgtatgaggaacctccagagcaggagaccttctacgagcagcccccactggtgcagcagcaaggtgctggctctgagcacattgaccaccacattcagggccaggggctcagtgggcaagggctctgtgcccgtgccctgtacgactaccaggcagccgacgacacagagatctcctttgaccccgagaacctcatcacgggcatcgaggtgatcgacgaaggctggtggcgtggctatgggccggatggccattttggcatgttccctgccaactacgtggagctcattgagtgaggctgagggcacatcttgcccttcccctctcagacatggcttccttattgctggaagaggaggcctgggagttgacattcagcactcttccaggaataggacccccagtgaggatgaggcctcagggctccctccggcttggcagactcagcctgtcaccccaaatgcagcaatggcctggtgattcccacacatccttcctgcatcccccgaccctcccagacagcttggctcttgcccctgacaggatactgagccaagccctgcctgtggccaagccctgagtggccactgccaagctgcggggaagggtcctgagcaggggcatctgggaggctctggctgccttctgcatttatttgccttttttctttttctcttgcttctaaggggtggtggccaccactgtttagaatgacccttgggaacagtgaacgtagagaattgtttttagcagagtttgtgaccaaagtcagagtggatcatggtggtttggcagcagggaatttgtcttgttggagcctgctctgtgctccccactccatttctctgtccctctgcctgggctatgggaagtggggatgcagatggccaagctcccaccctgggtattcaaaaacggcagacacaacatgttcctccacgcggctcactcgatgcctgcaggccccagtgtgtgcctcaactgattctgacttcaggaaaagtaacacagagtggccttggcctgttgtcttcccctattttctgtcccagctcatccgtgtctctgaagaacaaatatgcttttggaccacgaaaaaaaaaaaaaaaaaaa

SEQ ID NO: 273 - DNA, 325 bp, Homo sapiens
gcacgggaactattgatacatgcaataacctaggtggatctcaaagtcattctgctgagtgaatgattccagttacatagcattctggaaaaggcaaaactgtggtgaccaggtaacaagcatgattgccaggggttggtggtggggaaagcgtgtgactaccatggggtagtatgaggtgatttttgaggagatgaaactgttctgtgtcctcattgtggtagtggttacatgagttagtacatgtgttaaaactcatagataatacgcttccccaaggaatccatttactatacattaatttgttaaaaaaaaaaaaaaaaaa

SEQ ID NO: 274 - DNA, 878 bp, Homo sapiens
  misc_feature (219)..(219): n equals a,t,g, or c
  misc_feature (222)..(222): n equals a,t,g, or c
  misc_feature (862)..(862): n equals a,t,g, or c
ctattatatcgcggcctctcgacttttgagactcgcgtttccttggccagyggtaacacaggacgtgtgtgcgcatgtgcaagtgtggatgtatgtgtgtgcgtgtgttttgctcatttctttagggaacttgggagtcggggttggaggtgctgggcaatggaacttcaaattcaatgtcgcccagcagtgaggggagtcgggaggtgaggcctgtangcnaaccaattggtggagtctcagcgatacccaggtgagaagtggttcacccagagggcagggtgggggcctcgggcagatctgtccctcttggcccctctgtcctcaaatgtccaaaatgttggaggacctctgttcatatcccacgcctgggctcttgccagcagtggagttactgtagagggatgtcccaagcttgttttccaatcagtgttaagctgtttgaaactctcctgtgtctgtgttttgtttgtgcgtgtgtgtgagagcacatcagtgtgtgcaggctgtgtttccccatttctctcctcccttcagacccatcattgagaacaaatgtaagaaatcccttcccaccaccctccctgcctcccaggccctctgcgggggaaacaagatcacccagcatccttccccaccccagctgtgtatttatatagatggaaatatactttatattttgtatcatcgtgcctatagccgctgccaccgtgtataaatcctggtgtmtgctccttatcctggacatgaatgtattgtacactgacgcgtccccactcctgtacagctgctttgtttctttgcaatgcattgtatggctttataaatgataaagttaaagaaaaaaaaaaaaaaaaagggnggccgctctaaggggt

SEQ ID NO: 275 - DNA, 1135 bp, Homo sapiens
ccacgcgtccgcttttgtatctcaagaattgagggttttgttttctgatctcaggttttattattggtgggagcctgtgtttcttcctgggtagaattgaataagattttccaggaaaggcatttgtgtagctaattacagattatggtgcaaagtatgtctcatattcctccccctaaccccagctaattgctgtatacttgacagtttatttcaatattgtattaagacattggttttgtgctggacagagtaaaagggagatggtatttttttttaaaagaacaatttatttcataattaagtatctaaatacttggttgggaataaatgactaattagaacagtacctttaggtattctgatacctctacttagaaatgccttttcttttcttgcaaaaattacttggcagatttgatgaaaaagaaaatgtgtccaactgcatccagttgaaaacttcagttattaagggtattaagaatcaattgatagagcaatttccaggtattgaaccatggcttaatcaaatcatgcctaagaaagatcctgtcaaaatagtccgatgccatgaacatatagaaatccttacagtaaatggagaatactctttttagacaaagagaagggctttttatccaaccctaagattacttcacaaatatcctttatcctgccacaccagcaggttgataaaggagccatcaaatttgtactcagtggagcaaatatcatgtgtccaggcttaacttctcctggagctaagctttaccctgctgcagtagataccattgttgctatcatggcagaaggaaaacagcatgctctatgtgttggagtcatgaagatgtctgcagaagacattgagaaagtcaacaaaggaattggcattgaaaatatccattatttaaatgatgggctgtggcatatgaagacatataaatgagcctcagaaggaatgcacttgggctaaatatggatattggctgtatctgtgtttgtgtctgtgtgtgacagcatgaagataatgcctgtggtatgctgaataaattcaccagatgctaaaattcaaaaaaaaaaaaaaaaaaaaaaaaaaaaaaaaaaaaaaaaaaaaaaaaaaaaaaaaaaaaaaaaa

SEQ ID NO: 276 - DNA, 2704 bp, Homo sapiens
ccacgcgtccgcttcttcagctatgctgaggtgctgaagcgggagccgggggccctgggagcacgctgctggtcactctatggccgctgctacctccgccacttcaacgagctggagcacgagctgcagtcccgcctcaaccgtggctacaagcccgcctccaagtacatgaattgcttcttgtcacctcttttgacactgctggccaagaatggagccttcttcgctggctccatcctggctgtgcttattgccctcaccatttatgacgaagatgtgttggctgtggaacatgtgctgaccaccgtcacactcctgggggtcaccgtgaccgtgtgcaggtcctttatcccggaccagcacatggtgttctgccctgagcagctgctccgcgtgatcctcgctcacatccactacatgcctgaccactggcagggtaatgcccaccgctcgcagacccgggacgagtttgcccagctcttccagtacaaggcagtgttcattttggaagagttgctgagccccattgtcacacccctcatcctcatcttctgcctgcgcccacgggccctggagattatagacttcttccgaaacttcaccgtggaggtcgttggtgtgggagatacctgctcctttgctcagatggatgttcgccagcatggtcatccccagaggctatctgctgggcagacagaggcctcagtgtaccagcaagctgaggatggaaagacagagttgtcactcatgcactttgccatcaccaaccctggctggcagccaccacgtgagagcacagccttcctaggcttctcaaggagcaggttcagcgggatggagcagctgctagcctcgcccaagggggtctgctccctgaaaatgccctctttacgtctatccagtccttacaatctgagtctgagcccctgagccttatcgcaaatgtgggagctggctcatcctgccggggccctccactgcccagagacctgcagggctccaggcacagggctgaagtcgcctctgccctgcgctccttctccccgctgcaacccgggcaggcgcccacaggccgggctcacagcaccatgacaggctctggggtggatgccaggacagccagctccgggagcagcgtgtgggaaggacagctgcagagcctggtgctgtcagaatatgcatccacagagatgagcctgcatgccctctatatgcaccagctccacaagcagcaggcccaggctgaacctgagcggcatgtatggcaccgccgggagagtgatgagagtggagaaagcgcccctgatgaagggggagagggcgcccgggccccccagtctatccctcgctctgctagctatccctgtgcagcaccccggctctggagctcctgagaccaccgccctgcatgggggcttccataggctctacggtggcatcacagatcctggcacagtgcccagggttccctctcatttctctcggctgcctcttggagggtgggcagaagatgggcagtcggcatcaaggcaccctgagcccgtgcccgaagagggctcggaggatgagctaccccctcaggtgcacaaggtatagacaaggctgagcagggttcctgtggcccaggatggaggccaccgctgccctgccatcccgtctgcctgccatgggacggctcctctgagtgttccctggccccacgtgtgtggtgtttgtgtgtctgtgcctggccaagggaggtgccaacactgggcttgccacagccccaggagaggaatttggggcctaggaaccgagggcacacgggactctagcctcatccccaggacccccttggctcagagtgtggtgctagaaactggtccccagcccagccccagtactgccacctttacacctacccctgcaagtccccagagggctgcccacgatagaagctgccaagcagggagaacctgtgccaactgtggagtggggaggttgggcctggaccctcaacccctgcaaccttccctagccccctcaatagatgagcaggtcaggctgtggcccttacctcacccgcagttctcgcccagtgctgcagccggctcacctctctccgcttcttgcacatcactggcctgtgtgtgctgcttgctcctgttctgttcgcttgctcccgttccgttcggcttttgctttgcgttagggtgaagaccctagcgtccagctcccctcaacgctatattttgacactaaaaaagaaggtttctaaattgtaggagcaggatggaaatactttgctgcccttgccatcttttaggatgggcccccaggagactgaggtcttcctgggccctcattgctgcttatcgtaccccccatcacctgcacatgggacagaccgggctggagggtgaccttggctgtgtacgtcccagcaaaagagctctggcccgcatctcgctgtgccctgaagggggatgaagggcgatgcctcgcccgaggctttgggctgctgcactgcatgctgggactgctcctactctctgtcccacccctcacccagctgtggtccggctttgggagagtggtgaattgcgctgcccgaactcggagcggagcagggtagggaccgtgtacagcttgataacccttaataaaaagggagtttgaccagaaaaaaaaaaaaaaaaaaaaaaaaaaaaaaaaaaaaaaaaaa

SEQ ID NO: 277 - DNA, 1225 bp, Homo sapiens
  misc_feature (1214)..(1214): n equals a,t,g, or c
ggcacgagccgggtcggcgctcctgcctccctgcagggagctgcttatgggacaccgcttcctgcgcggcctcttaacgctgctgctgccgccgccacccctgtatacccggcaccgcatgctcggtccagagtccgtcccgcccccaaaacgatcccgcagcaaactcatggcaccgccccgaatcgggacgcacaatggcaccttccactgcgacgaggcactggcatgcgcactgcttcgcctcctgccggagtaccgggatgcagagattgtgcggacccgggatcccgaaaaactcgcttcctgtgacatcgtggtggacgtggggggcgagtacgaccctcggagacaccgatatgaccatcaccagaggtctttcacagagaccatgagctccctgtcccctgggaagccgtggcagaccaagctgagcagtgcgggactcatctatctgcacttcgggcacaagctgctggcccagttgctgggcactagtgaagaggacagcatggtgggcaccctctatgacaagatgtatgagaactttgtggaggaggtggatgctgtggacaatgggatctcccagtgggcagagggggagcctcgatatgcactgaccactaccctgagtgcacgagttgctcgacttaatcctacctggaaccaccccgaccaagacactgaggcagggttcaagcgtgcaatggatctggttcaagaggagtttctgcagagattagatttctaccaacacagctggctgccagcccgggccttggtggaagaggcccttgcccagcgattccaggtggacccaagtggagagattgtggaactggcgaaaggtgcatgtccctggaaggagcatctctaccacctggaatctgggctgtcccctccagtggccatcttctttgttatctacactgaccaggctggacagtggcgaatacagtgtgtgcccaaggagccccactcattccaaagccggctgcccctgccagagccatggcggggtcttcgggacgaggccctggaccaggtcagtgggatccctggctgcatcttcgtccatgcaagcggcttcattggcggtcamcgcacccgagagggtgccttgagcatggcccgtgccaccttggcccagcgctcatacctcccacaaatctcctagtctaataaaaccttccatctcataaaaaaaaaaaaanaaaaaacttga

SEQ ID NO: 278 - DNA, 1324 bp, Homo sapiens
  misc_feature (3)..(4): n equals a,t,g, or c
  misc_feature (1241)..(1241): n equals a,t,g, or c
  misc_feature (1288)..(1288): n equals a,t,g, or c
  misc_feature (1323)..(1323): n equals a,t,g, or c
gcnncccggaattcccgggtcgacccacgcgttcgcccacgcgtccgttcacaggtacagtctctataactataaaatccaggaaatgagagtcccattagggtttaaatcactatttgattaaatgtttcaatcaaacccattttgtaatgttttatatgcacacttacctaaaatgtagtattattcaagagctatgattgctgtatgtaatgtaatttagttaaaatggatgcaaattcatatgattccagttacatatgaacttaaaattagatgtctgctgctttttgtatcattttccagaaaaatgagtcaacaaccaattaggaaactgtaccagtcaactcttgattacaaattgacagaaaccattaataacaaagcaacacagtatgagtataatacaccaaaaggaacataggtagtgtactactgggcttgtttttcagctgaggcctcaatggaactttgtgagtctcctcctctacttcacttcctttgccttcagtttgaatctcactgggtcagagtcagggatttgaacccctcgtggccctcctgaatcaggttgcagtataatttcgttgacactttctcccaatccccaagtatagcaataactctactttcccccaagaggaacaagaaaacacaataacacattaacaacagtgacaatctttttatttccctgkttacttacggcattaaaactccaaactcgtacagccttaatttccaartcaatgcaatattactgtgtctcttggtagagaattccccttttcttggtgctatgctatcagagtccaaaatcaaaaggacagaaagcagacaattagaatgtgtcaataagtgtaatctcaaaggcttgcatcccagtttccagtcctaggactccagacgcatatattttagctaagggggtaaaagaatgccatgtggtagtcacttattcagaacataaactgtattctgcaggacagtacctcaaatttgcaagctattgactctgaatgaagctcatctgagttttcatggagtatgcaatacccacaaatcccttgaacattagctcattgctttgtttctctataaagttatttcctttaaactgaagcaactttgtgtgggataccatgcccttgcatatggtagacaatctatagatagagcaaggacagagaaaaatgatcaaaaaaaaaaaaaaaaaaaaaaaaaaaaaaaaaagggcggcnactatagaggatccctcgaggggcccaagcttacgcgtgcatgcggngtgtttacctcaaatcaactatagagagtgtcccnt

SEQ ID NO: 279 - DNA, 1500 bp, Homo sapiens
atggactgccgtgagcccagaccttaaacgtaaacattcagcttcgcaggtactttgggctgcacacgcttctccggacccaaaagatgcacatgcttttcagaaaccgtaagtttacctggggctgtaaaaccgcacatcgcgactttgcaccgtgcacacgcttgccccgatgtgagatttcccctgggttcgcgctcgggtccgcttcttaaatacactgcctcagcggtgtggatggcacagagctgtggcagccctactgaaaccttaaacaggcttcctggggtcataaacatggataccgagacttagatcacctcccacaacttaaacgtaccccttcactccactgccttcgccccttcctgcagcattcgcatctagttgttcaaaagtgctttccgggtcctcagacatgcaccccaaggttttaaacctcacgtgcaagtactagatgggcttccctgtgcaatagggatgtcaggcgcgcagttttgcacacgattgccaagatgtgagatttactttaggttgcaccttaaccgtcgtttttaaatatgatcgtcccatcttgatgtgctgctcctgctgtggaaggtatccctgggttttaggcaagcatatgtgttctttactatggctccagatcccagcatatttgaagtcctgagtcaacctgctctcctagacaagcagacattaagtatgtcgcttgggctcttaagtgcgttctcctgacttttacccatctttgtggcagtaaatgcatacgtgtcactgtatatgcggactagatacctcaggtcccagcgccataaacaacttgtatgttgtaagtgtaccctcatctcgaaagtcacctccagctgtgcgttttaactcatctcagatgctggatgtccggtgtggtgcctgaagcccccggggcaacatccactctctgtccaactcattctaacgccaagatactcaggttttctatctgatcttctgacgactgcccaaaagtcagaatcacctgcgtgggtgaagaatcacctgcgtgggtggagaatcacctgcgtgggtggagagcaagtttgttcaggtttttctctttttaagcactcacaaaataaaattttttgtgtttgctagtattctggaaggaaagatctccttgtgcttcatagaaaatttggaaaatacctgtttgtaataagataaaaataaatcacccttataatttgttttcccccgcctggaggcgcctattacggggaaactctcgtgggtttcctgctgccaggctgtttgcggagctttcccttgtttgctttgagatgtttttggttttaaaaaacaataagtgaggtcaggcttggtggccctcgtctgtaatcccagcactttgggaggccgaggcgggcggatcacttgaggtcaggagttcgagaccagtctggccaacatggtgaaaccccatctctactaaaaaaaaaaaaaaaaaaaactcga

SEQ ID NO: 280 - DNA, 776 bp, Homo sapiens
ggcacgagtgaagtagaacatgcatgagaaagaatgcagaaatcatgaataaacagctccagaaagggatcacgcccaactaaccagcacccgaattcagagcccaccagcccccgggatcccggccacgtccactctgaccccatgcctgcaaggatagggtctctatcgtgacttctaaccccaccaggtacttttgcctctttttagaaatggaatcatacagtctgtactcttttgtgcctggtttgttttggttaacattgcgtctgggagttttatctctgtccagggttggcgaaccccagcttacaagccaaatctggtcctttgcctgttttcatatggcctgtgagctaaggatggattttatgtttttaaatagttgcgggggggggcgggggggggaggaaagaatgatattttgtgacgcgtgaaaattatatgaaattcaaatttgtgtccacaaattgactgggcatggtggctcatgcctgtaatcccagcactttgtggggccgaggtgggtgggtcacttggggccagaagtttgctaccagcctgaccaacatggttgaaaccccatctctactaaaaggtacaaaaaaatagctgggtgtggtggttgatgcctgtaatcccagctactcaggtggctgaggcaggagaatcacttgaacccgggaggcagagattgcactgagccaagattgtgccactgtacttcagcctggatgacagagtaacactgtatctcaaaaaaaaaaaaaaaaaaa

SEQ ID NO: 281 - DNA, 543 bp, Homo sapiens
ggcacgagctaagccctgcatccatgatgaggccggggcaggtctccctcctgggtcctgatgctgtttctgtgctcggctctggcttgggcctcagccctggcaccagctctggccgcaaccctgaccctggctctgggccgggcactctgccggatcccagctccaaacccctccccggctccagatccacccccagccctactcctgtggaatcttctgacccaaaggctgggcacgacgctggtcccgaccttgtgcccagcccagaccttgatcctgtgcccagcccagaccctgatcctgtgcccagccctgatcccaaccctgtgtcctgccctgacccctgttctcccactcgtggcactgtcagcccagccctccctaccggcgagagtccagagtgggtacaggagcaaggggcactgctggggcctgatggctgaaggagacgccggcatcctcgggggcctggggaagttgtgtgttgtgcagtcagtaaaatcctcccactgccaaaaaaaaaaaaaaaaaaaaaaaaaa

SEQ ID NO: 282 - DNA, 728 bp, Homo sapiens
ggcacgagaataaaaaaaaattagtcgtggtgccacttgcctgtggtccccactgcttgggaggctgaggtgggagaattgcttaagcctgagagttggaggctcagtgagccatgatcatgccactgcactccagcctgggtggccattgaattctgcgtggattgcctcagtttgccttgtcagccaacttccactggctgccttggcactgccatgacagcacagctccacaccagagctggggtttctcttcagtcctgggtaccccttggcagagggatttgctgaggaaaattaggtatccttcctagccctccacacacttccaaaccagggctgcggatctgatggatgccaggaagacagccttgggctgagagtgacatcactgcaagagttgagagccagcgtctaaagtgtccacggcatcctgggaggttttatccttggtgactctaatggtagatttttgtccaccttgttctatttgcttttgtttgtttttgatttttctgttttaaaattttaaggagagatggggtttcaccgtgttgcccaggctggtctcaaactcctgagctcaagcgatctgcccaccttggcctcccaaagtgctgggattataggtgtgagccaccgcatccagcccacattgttctatttgtatttcatgaaagcagttctgaatgagagtaaatcaaaaaaaaaaaaaaaaaaaaaaaaaa

SEQ ID NO: 283 - DNA, 2301 bp, Homo sapiens
  misc_feature (36)..(36): n equals a,t,g, or c
  misc_feature (237)..(237): n equals a,t,g, or c
  misc_feature (250)..(250): n equals a,t,g, or c
aattcggcacagagaatagccaggcaggacagaggnaaactccaccagtattgagcccaggcttctgtgggagaragtggagaagctggtgcccagacctggcagtggcagctcctcagggtccagcaactcaggatcccagcccgggtctcaccctgggtctcaragtggctccggggaacgcttcaaagtgagatcatcatccaagtctgaaggctctccatctcagcgcctggnaaaatgcagtganaaaaacctgaagataaaaaggaagttttcagacccctcaagcctgctggcgaagtggatctgaccgcactggccaaagagcttcgagcagtggaagatgtacggccacctcacaawgtaacggactaytcctcatccagtgaggagtcggggacgacggatgaggaggacgacgatgtggagcaggaaggggctgacgagtccacctcaggaccagaggacaccagagcagcgtcatctctgaatttgagcaatggtgaaacggaatctgtgaaaaccatgattgtccatgaygatgtagaaagtgagccggccatgaccccatccaaggagggcactctaatcgtccgccagagtacagttgaccaaaagcgtgccagccatcatgagagcaatggctttgccggtcgcattcacctcttgccagatctcttacagcaaagccattcctcctccacttcctccacctcctcctccccatcctccagccagccgacacccaccatgtccccacagacaccccaggacaagctcactgctaatgagactcagtccgctagtagcacactccagaaacacaaatcttcctcctcctttacaccttttatagaccccagattactacagatttctccatctagcggaacaacagtgacatctgtggtgggattttcctgtgatgggatgagaccagaagccataaggcaagatcctacccggaaaggctcagtggtcaatgtgaatcctaccaacactaggccacagagtgacaccccggagattcgtaaatacaagaagaggtttaactctgagattctgtgtgctgccttatggggagtgaatttgctagtgggtacagagagtggcctgatgctgctggacagaagtggccaagggaaggtctatcctcttatcaaccgaagacgatttcaacaaatggacgtacttgagggcttgaatgtcttggtgacaatatctggcaaaaaggataagttacgtgtctactatttgtcctggttaagaaataaaatacttcacaatgatccagaagttgagaagaagcagggatggacaaccgtaggggatttggaaggatgtgtacattataaagttgtaaaatatgaaagaatcaaatttctggtgattgctttgaagagttctgtggaagtctatgcgtgggcaccaaagccatatcacaaatttatggcctttaagtcatttggagaattggtacataagccattactggtggatctcactgttgaggaaggccagaggttgaaagtgatctatggatcctgtgctggattccatgctgttgatgtggattcaggatcagtctatgacatttatctaccaacacatgtaagaaagaacccacactctatgatccagtgtagcatcaaaccccatgcaatcatcatcctccccaatacagatggaatggagcttctggtgtgctatgaagatgagggggtttatgtaaacacatatggaaggatcaccaaggatgtagttctacagtggggagagatgcctacatcagtagcatatattcgatccaatcagacaatgggctggggagagaaggccatagagatccgatctgtggaaactggtcacttggatggtgtgttcatgcacaaaagggctcaaagactaaaattcttgtgtgaacgcaatgacaaggtgttctttgcctctgttcggtctggtggcagcagtcaggtttatttcatgaccttaggcaggacttctcttctgagctggtagaagcagtgtgatccagggattactggcctccagagtcttcaagatcctgagaacttggaattccttgtaactggagctcggagctgcaccgagggcaaccaggacagctgtgtgtgcagacctcatgtgttgggttctctcccctccttcctgttcctcttatataccagtttatccccattctttttttttttcttactccaaaataaatcaaggstgcaatgcagctggtgctgttcagattctaaaaaaaaaaaaaaaaaaaaaaaaaaaaaaaaa

SEQ ID NO: 284 - DNA, 1061 bp, Homo sapiens
ggcacgagggacattgcccccccgcctgctgaggctgttccttcctgctgcacttgagcagcctcatcttccttcatctcctctcatgttcacttctctttgcctggaccaatggggaaaaaagtgcacagaatgagattatgtgactacagcaattctgagttagctttgattgctctgcagtaaaattaagggaccatatctttctcatgcacatgatatatagtttcaaatatagatctgtacatacgtgatgatgaaaagttcttcaggatgaggatgtatcagagagtgtgaattgaggccagtcttctgtttcctcccaaactcttaacagattgcatatcttcatgcaaatcttttcatgtattccttgtatactacctatagaaaggtgggacttgggagggtcacttacaactcctgtgatcttattttctcctccaggggctccttgaatagagttttcccccattttactggccaaggctgcagttagagctgtggtttgtcctgcaggggatatttgtcagtgtctggagaaatttaggttaacgcgactggagaagtgctattggcatctagtgagtggaggccagggatgctgctaaacaccccgcggtacacagcagaccaaagaatgatctagccccagatgccagtagtgctgargttggaaaactcttaagttagtaaatatacaactgataggaaaaacatgaagtttcaataattaaaaagctttgcacgaaagtttattacagggctgggcatggtggcttaggcctgtaaatcccarcactttggggggccgaggtgagaggatcacttgagcttaggaatttgagacctgtgttggcaacatagtgagaccccatctctaatatatatatatctgggcatggtggctcctgcctgtagtcccagctacttgggagggttgaagtgggagaatggcttgagtccaggaggttgaggctgcagtgagccatgattgcatcactgtactccagcctgggcgacagagcaagaccctgtctccaaaaaaaaaaaaaaaaaaa

SEQ ID NO: 285 - DNA, 349 bp, Homo sapiens
ggcacgaggtcaaaactaagaaattactactgctgtaagactgctaactaaactatgcatattcgaattgcaccagtttttccattaatgtccttttgctgttctaggacagcatattgagtttagtgcaacttgcctttatgctttattttaatgcccttgaattctcatctgttattagtgagtctcttatttatctctttgttttgagcttccttctctgctgttggtatgttgctttaatggagaggttgcatcaaccttcatttttttttttgagacagcctgggcaacagagggagacttcatctcaaaaaaaaaaaaaaaaaaaaaaaaaaaaaaactcgag

SEQ ID NO: 286 - DNA, 1019 bp, Homo sapiens
  misc_feature (1)..(1): n equals a,t,g, or c
ntggtgggatttttgtataaagtaagagataaggatccagtttcattcttctacatgtggcttgccagttttcctagcaccatttattgaatagggtgtcctttccccactgtatgtttttgtatgctttgtcaaagatcagttggctataagtatttggctttatttctgggttgtctgttctgttccattggtctatgtacctgttgttatactagccccatgctattttggtaactatagcattgtagtatattttgaagttgaataatgtgatgcccccagatttgtyctttttgcttagtactgctttggctatttgggctcttttttggtgccatatggattttaggattgtttctgattgacaaaggtattttgatgggagttctgtgaagagtgatggtggtatcttgataagaactgcattgaatctgtagcttgctttaggcagtatggtcattttcacaatattgattctacccatccatgagcatgggatatgtttccatttgttkgtgtcatctatgatttctttcaatagtgttttatagtttttcttgtagagctattttacctccttggttaagtataaccataagtattttattttattttttttgcagctgttataaaaggaatggaattgttgatttgattcttagcttggccgttgttggtgtatagcagtgctactgatttgtgtacattgattttctatctggagaatttactgaattcatttattagatctaagagctttttggatgagtctttagagttttctaggtaaatggtcatatcattggtggacagtgacagtttgacctccttttttccaatttggatgccctttcttttctgtctgattgctgtggctaggacttccattactatgttgaatagaagtggtgaaagtgggtaaccttgtcttgttccagttttcaggggcgtaggcaaagaattcatgactaagaacccaaaagcaaatgcaacaaaaaaaaaaaaaaaaaactcga

SEQ ID NO: 287 - DNA, 554 bp, Homo sapiens
  misc_feature (16)..(16): n equals a,t,g, or c
  misc_feature (26)..(26): n equals a,t,g, or c
  misc_feature (94)..(94): n equals a,t,g, or c
aggtcactcattaggnacccccaggntttacattttatgcttccggctggaatggtgtgggaattgtgagcggataacaatttcacacaggaancagctatgaccatgattacgccaaagctcgaaattaaccctcactaaagggaacaaaagctggagctccaccgcggtggcggccagctctagaactagtggatcccccgggctgcaggaattcggcacgagctactaataattattacattttgactaccacaactcaacggctacatagaaaaatccaccccttacgagtgcggcttcgaccctatatcccccgcccgcgtccctttctccataaaattcttcttagtagctattaccttcttattatttgatctagaaattgccctccttttacccctaccatgagccctacaaacaactaacctgccactaatagttatgtcatccctcttattaatcatcatcctagccctaagtctggcctataaaaaaaaaaaaaaaaaactcgagggggggcccggkacccattsgccaaakgggggggttta

SEQ ID NO: 288 - DNA, 1287 bp, Homo sapiens
  misc_feature (1287)..(1287): n equals a,t,g, or c
ggcacgaggcamgatggccaccaccaagcgcgtcttgtacgtgggtggactggcagaggaagtggacgacaaagttcttcatgctgcgttcattccttttggagacatcacagatattcagattcctctggattatgaaacagaaaagcaccgaggatttgcttttgttgaatttgagttggcagaggatgctgcagcagctatcgacaacatgaatgaatctgagctttttggacgtacaattcgtgtcaatttggccaaaccaatgagaattaaggaaggctcttccaggccagtttggtcagatgatgactggttgaagaagttttctgggaagacgcttgaagagaataaagaggaagaagggtcagagcctcccaaagcagagacccaggagggagagcccattgctaaaaaggcccgctcaaatcctcaggtgtacatggacatcaagattgggaacaagccggctggccgcatccagatgctcctgcgttctgatgtcgtgcccatgacagcagagaatttccgctgcctgtgcactcatgaaaagggctttggctttaagggaagcagcttccaccgcatcatcccccagttcatgtgccagggcggtgatttcacaaaccacaatggcactgggggcaagtccatctatgggaagaagttcgatgatgaaaactttatcctcaagcatacgggaccaggtctactatccatggccaactctggcccaaacaccaatggctctcagttcttcctgacatgtgacaagacagactggctggatggcaagcatgtggtgtttggagaggtcaccgaaggcctagatgtcttgcggcaaattgaggcccagggcagcaaggacgggaagccaaagcagaaggtgatcatcgccgactgtggggagtacgtgtgaggcggcactctctctgcttccccctccgctcttgaccctgcatatccaggaaggaactgccagcctcagaggaggcagcaccgagggtgcctgtttgaagcaagcagcatttgggatatgtgcccttcctcagggtctgcttggagcagctcctctgcaggcacagcctggactattcccaggcacagctgtgggcccaggagccagctcaggtgctcccctccaccatgggcaggctgtgcaaaaagcactggcttttctcagcatttgctgctgggcctctcctgggactaccagtgtggctcttacgtgttttctttgctaaaataaaccctagttcttawaaaaaaaaaaaaaaaaggcggccn

SEQ ID NO: 289 - DNA, 1273 bp, Homo sapiens
  misc_feature (37)..(37): n equals a,t,g, or c
  misc_feature (45)..(45): n equals a,t,g, or c
  misc_feature (338)..(338): n equals a,t,g, or c
  misc_feature (820)..(820): n equals a,t,g, or c
ctcgagttttttttttttttttttgttattgcaggtnagcatgtnacattatttgtgtgttgccttccctactagaacatcagctccacaagggcaggaatttttgcctgttgtcaccacgatgtccctggcacccagtatgttcttggtgtctccattgatgatgcagggatgtgtggatatggggcagtggactgtgagcatgtgatgagcatgtgacccagcccctagtgaccgcaccacatggcacaggttgcttataaaaaccattttaaattaaaaaagggaggaagcatcagtgcacacagatggggacacaggggcagagggccagcccnaagtacagtgtggtcaccccacagcccagtggrcccagggcagactcccctcgcagcacagacagctgaggcccgggtgctggttcctctaggtacagctttggtccttgtgggctcagaggtctgcctttcggaaacttgctctgttcaaggagttcctgaggccgggtggggtgggtgccatcagctggggcaggcgctgggtaagcaggggctgcagagcctcccgcaggcggcagtagttgcgctccagctcacggtggtactccttctggtccggcccaatcagggcyttatttttccgcagcgcatcctcacatttcttgcagaagtccttgaagcagagccgcaatttgttgtgatgccggaagarcttggggtcttccgggatctctgctaaaaacacctgggccacctccactggcgtyagcaccgtctcctcccggtggcacacacggatgcgagtcttgatgtaggggaangcktggtcggtgctgaagcagcgtcttacgcttgtgttgctcgggcagctccccgtgtgcgcgcccatccggcgtgaacggcgtgcagaacaggaatgtgcgaagcccatagttgcggtcaaagtaggtcacccggtccttgagctcgtaggtatcaaagtacggttccacatacgtgatctggatgtaggccttttgtgagtcaagcttggacttgtccacagggttagagtctttgataatctcaacgacgtcgtcgccaaatctctccgtgtagaactcctccagccggtgtgagatctctgccagcttcgtgatcgatggctccttgtacacaaactcctgctcatccaggtcaccgaagtgggcgccgtagaagcccacgcggaaatacgtcccgaacacgcgctcccagccggaactctggtgcatgatcttggtgaaggctgtgcc

SEQ ID NO: 290 - DNA, 762 bp, Homo sapiens
ggcacgaggtgacttcgctcatcacggtcagtcattccttctcctttccagggtgctgggggctggggttccctggcccaagggtccagcctcctctcaccccattccaggtggcatactgcagtctggctctttctcccctccctccccacccaagcctcacctccccaccccttgaacccccatgcaatgagcttctaactcagagctgatgaacaaaagcccccccacccccaatgcctgcctcctcactcctccgtcgctgcccttcacaccttttggtgctacccctccccagagttaagcatggatgtctcctgatcccaggctgggacccctacccccaccccctttgatcctttctacttccacggtgaaaggactgaggtcggactacagagggaagagggacttcccttgactgggttgtgtttcttttcctgcctcagcccagctctgcaaatcccctccccctgcccctcacctccccaggctcaccttgccatgccaggtggtttggggaccaagatgttgggggggtgaatcaggatcctaatggtgctgccctatttatacctgggtctgtattaaaagggaaagtcccccctgttgtagatttcatctgcttcctccttagggaaggctgggatatgatgagagattccagcccaagcccggccccccaccgccaggccatagggcataatttgcatctcaaatctgagaataaactgatgaactgtgaaaaaaaaaaaaaaaaaa

SEQ ID NO: 291 - DNA, 1474 bp, Homo sapiens
  misc_feature (1452)..(1453): n equals a,t,g, or c
  misc_feature (1460)..(1460): n equals a,t,g, or c
  misc_feature (1463)..(1463): n equals a,t,g, or c
gggttcgacccacgcgtccgggtttccaaattatgtttactttgatttgattatatgttggtatctcccaaatataggttaacttagctatttaaatggtatcttttgacatttaaaaagaattaagtacctgtcaaatctwgcattgaggttgcagttgaataagataaaagcttaggatgtcaaaaaataatatagagaaatattataagattttatgattattcttgamgtttttgatgcaaaaggaaaatatgctgaatagttcttccaaaaaatattatttccctcaatattttatttgtagccatgtaatttaaagagaacagaaaataactgcaatcaaaagtatggtttaatatcaatcaaagtggcacaacagaattgataagatctttataacaatcaattggctgatattaaaatattgattttaattgatcttttcaattaaaatctttagggcctgtaactcataaaatcagcatccaccacaatatatggtcattattggtttgtaagcatagatcaccattgactcctacctggagagacatgtctatttctaaaaatccagtagtttctttgcattctcagtagtacacgttgtatatatatatatgtaacaaatttggtagttttcagtatgtgtgatgtcctttgggggttatttatcttgctggtccataggaggggtacactaccccaagaatcaagacatctgagttctagttctagttctagctctgccactgaagagccaccttacctggggcaagttagccattgtctcccagtcatgtttaccacccatgaaaggactcgtcggtttgatgtttccattaagctcaatgagtaactctaatagttactcttgaatctggattgaaaaacaccatgcatctgatgagataattcataaatgttgccccttttttaaatgatacaaccctaaaagtgactgaattgcccaagtgcttgaacatggcagaggtagttactcytattttgcagtttgtgcacttaaaaattcctacagtgattgttactttactggggaaaaaagatgaggtgaaacttcctcccaaggaattaaaatatctgtagaagccatggcttgcttttataatgtggaaatcatttgatttgctgtaattcacgcagatccctccttttgtcagggggaaatgatttgcatcatgttcttttttcataatgcttttacttcctgtttggatcagttgtatgtaaatgtacatttttgttactttgctgtgcccgttagaatttatcttccataaagtatttctcccattgagtctaatgatgtatactttgcctaggtctttccaaaattaaatttatgtaaatgtctattttatataaaatatgattaaaataaaaaaaaaaaaaaaaaaaaaaactcgagggggggcccggtacccaattcgnnctatagncanacggggttaca

SEQ ID NO: 292 - DNA, 655 bp, Homo sapiens
  misc_feature (16)..(16): n equals a,t,g, or c
  misc_feature (20)..(20): n equals a,t,g, or c
  misc_feature (100)..(100): n equals a,t,g, or c
  misc_feature (142)..(142): n equals a,t,g, or c
ctgaaaacggccagtnagcncaacgcaattaatgtgagtagctcactcattaggcaccccaggctttacactttatgcttccggctcgtatgttgtgtgnaattgtgagcggataccaatttcacacaggaaccagctatgnccatgattacgccaagctcgaaattaaccctcactaaagggaacaaaagctggagctccaccgcggtggcggccgctctagaactagtggatcccccgggctgcaggaattcggcacgagggattgtttttgaacatcacaaatttgttcttggatagaattttatacattgcttttcatcatatatttgctcagttactctaagaagcaaggaactgatcactagttgggaatctatatgggcctaaacttgagtgtattgatttattattacatctactaccaacattttcttaagcatagccttctaaattttttcaggagattagaataaaggtatacatgctactcggtcttctggtaattctagtgataaacctttggatgagacaggtcctaatcagcactgaattcttcaataggaggctgtgttacaggagctacagatttttccctggawtagcttaggtcattgcctttactttaaaaaaaaaaaaaaaaaaactcgagggg

SEQ ID NO: 293 - DNA, 1286 bp, Homo sapiens
  misc_feature (1232)..(1232): n equals a,t,g, or c
  misc_feature (1241)..(1241): n equals a,t,g, or c
  misc_feature (1263)..(1263): n equals a,t,g, or c
tatagtggaggggaggaaaggggggtgataccttgcagtaagtaagtcgaaatagcatgcctgaaaatttgaaacagaccattctaacacccaaggcttgtttataaaatacttgagaattacattaatgtggaatcaacagatgcagaagaatataacataacttttaaaagctttcataaataccagcagcaattgtaagcaaatctacaaaggttcttgaacctttctattatatacaaaactgaaaagtcattaaggagttcaactaatcaggaattaaatggtcatttatttcatgcagtatgatttaaggtatttcttgagattctggtcaaatgtcataatcagcaaacgggattaaaaaaaaaactccaaaatcactaaataattatctaaataatggtattggagaacttgtttcctgctatttggaagagattgttgcttcattgctagtttgtatttctaacttctacagttatagactccactgtgctttgtgtctgaatttctcagtatagacattttgtttactgtatgcttgcatatttattttcaactttgyytgtctttaaaattgcttgaggaaaaatggttgtaattaatttctgctacagaaaagccacctggtacgttttgtctcatcaggattgttttaaattctaaactataagtttgttcagaggggcttttgcaatgatagcagaaaactgtacaaatgtacagttagttatagaggttcttgttgaaatgaacttaccatctgatgatatgtatgtacagctgtgtacttgagtcttttttagtttacttagaaagactagcagtttgacctgttaaacaggactagttcaagtcaagaaactaaggttgttgtatacacctggaggcatctgttattcagcttatcctttgagtgggtatttggcacaatgaggataaacttatgtgacccacttgaatggctgatctaataatgttgacattatgcattctgtacttagtgaaatgtcagatgaaaataactgatgaataatttttttgtattaaagggatgggaaaagaacacatgaatttgttaataaagcactatgatctgcaaacgatggaatgtttcataaagatctaaagaaataaaggaaactttaaaacaaaaaaaaaaaaaaaaacycgagggggggcccggtacccaattcgccctatagtgagtcgtattacaattcactggncgtcgtttnacaacgtcgtgactgggaaaancctggcgttacccaacttaatcg

SEQ ID NO: 294 - DNA, 626 bp, Homo sapiens
  misc_feature (15)..(15): n equals a,t,g, or c
  misc_feature (37)..(37): n equals a,t,g, or c
  misc_feature (57)..(58): n equals a,t,g, or c
ccgctctgactgtgntccccggcgcagattcgcacgngggaaaccctgtctctmccnnaaatacaaaaaaattagctgagattacaggtgtgagccaccacccccagcggtcccaatccatttttagttgctaattggattgaggagatcagaccccaacaatggaaaaggcagactctctagaggaaaatactatcaatcatcttaagtctcttttgttcttgtatacacagttggcatacagtcaaacgttatatgaaatgcagagaaactggaagattactgataatcaagggaacaaataggtaataggagcaaactcagatgatccacatgttgcagttagtagtcaaggattttaacataagtattataaatgtcttgaaaaaaagaaaaatgaacagatagaaaattttgacagagaattggagtctataattaaaaggaatcaaatagatattctagaactgaaaaatatatttgaaattaacattggatgggcttaacagcaggctgaacactgaattagtgaactaatgagaagacagaattagtgaacttgaaaaaagatcagtagaaaatattcaaactgaagcacagagaaaaaaaaaaaaaaaaaactcgta

SEQ ID NO: 295 - DNA, 721 bp, Homo sapiens
  misc_feature (673)..(673): n equals a,t,g, or c
gtcctcacccagtatactcctctttttactcagcttgataggaatctttccagtcctctctgcatttatatgtatacatcattcgtattcgtgaccctaataatgatacccagtcagctcacaccagcaagaaaaagtatttttcaagccctctggaagcattggaagctccaagtgagcataagtgaaaataccctaagagatacttccaggttctagatccaggtgtttcattttccccttgttttcccactacattgtcatctctccaaccttatctttagttttgtttttttcatggaagaccagaaagcccctttccccaaagtgttaaaatctggggtgaaggcaactgacctcattgcatactttggcaattcaaagttataaaatgttagccgggcacggtggttcacgcctgtaatcccaacactttgggaggccaaggcgggcggatcacttgaggtcaggagtccgacaccagccggrccaacatggtgaaaccccatctctactaaaaatacgraaattaatcaggkgagatggcgcacacctataatcccagctamttgggaggctgaggcatgagaatcgcttgaacccaggaggcagaggttgcagtgagtgagcagagatcgtgccactgccctccagcctgggtgacagagcaagnctgtctcaaaaaaaaaaaaaaaaaaaaaaaaaaaaaaaaaaactcgag

SEQ ID NO: 296 - DNA, 1024 bp, Homo sapiens
ctgcaggaattcggcacgagcttattttacctgtgagttaactaagatttagaaaaaaattcaaggtcacataatatgtgtgactctcataaagactgtcaagccaaagcatgcttttaacctccatgccttaaatctgaaacaccgttagttgacatctctcactgaaaataatcacaacatcgacttcttagaaagataagatacatttgtctttcctgaatatatgatttgcttttgctgttttgtggagatgttccttgttctttgtatgtgtcttctcatgtgtgtctctgtactcacattgctagctgtgcggtctttgtctcccttcctctcatgccagctagtggcatgatggagagactgtggtctagactgaggattatgacagcatacaaaactgactcaacacttacaggtaaataaaatgagcagtggtttcctttatttatttctgttatccactacatagattccatgtggatttaagaaactcaaattcaagtagaaatatctattaatagctattaaccaatcatgcatctcatgtcttaggagattctatcctgtagataaaatgaggaaatcatttattgactgcctttttgggaaataactctatggtctctagaagacatcttcgtttacttcaagtgccatggctttgagtttcattcaggaagatggtccaaaatatgagaatgtgtttattcttttaagatatgtaaattgtttatatcaatatcaacttatcctttttgggagagaaatacataagtagtacttcactttcattagttatttaacattcaaaatctctcaagtcatttaaccaggtgcaatggctcatgcctataatcccagcactttaggaggctgaggcaggaggattgcttgggcccaggagtacgagaccatcctaggcacacagtgagacctcaatctctacaaaawaaaaaaaaaaaaactcgctcgtgccgaaggggggtcccgtacccaatcgccctcacatgcatcgtat

SEQ ID NO: 297 - DNA, 1445 bp, Homo sapiens
  misc_feature (1017)..(1017): n equals a,t,g, or c
  misc_feature (1441)..(1441): n equals a,t,g, or c
acagttcgcgtgcgtttccttcgcctacttggcctacatgccttctgcccgtgaagcgatgtttcccctcgaaaggccgtaggctacgccgtcagaatcggtttttcagtgagttttgacccctccgacgctccgtcgcctgacagaatcgcggcgttcttcgtaccgcccatcctccgcggacgcccgctgccatggcgactctgctgcgccctgtcctccgtcggctctgcgggctcccgggcctacagcggcctgcggcagaaatgcccctccgggctaggagcgacggcgccggcccgctatactcgcaccacctccccacctccccgctgcagaaagcgctgttggccgccggctccgcggcgatggcgctctataacccctaccgccacgacatggtcgcagttctaggggagaccacaggacaccgcaccctgaaggtcctcagggaccagatgaggagggatccagagggtgcccagatcctgcaggagcgtccccggatttcgacatccaccctcgacctgggcaagctccagagcctgccggaaggctccctcggtcgcgagtatctccgtttcctggatgtgaacagggtctccccagacacccgagcacccacccgcttcgtggatgatgaggagctagcgtatgtrattcagcggtaccgggaggtgcacgacatgcttcacaccctgctggggatgcccaccaacatcctgggggagatcgtggtgaaatggtttgaggctgtccagactggcctgcccatgtgcatcctgggtgcattctttggaccgatccgacttggcgctcagagcctgcaagtgctggtctcggagttgatcccatgggccgttcagaacgggcgcagagccccatgtgtcctcaacctgtactatgagcggcgctgggagcagtccctgagggctctgcgggaggagctgggcattacagcaccacccatgcacgtccagggcttggcctgagctcctgagccagcggggcctggcntacctcccccatcccctgcttcccttggaggcagagggctcccttgactacctttgttcctcttctttgaacactgacccttggacaacatttatcataatttgtcataaccactgctgagtggccttgaggacgaaccccgcagggagcaagcagtacagtggcattcccagggggaccagcagctacccaaggagaaccatgcatgaacagtatcagtcgtctgggctcatgctgggatgtcgcagtgctcctgttgcaactcctcccagccagccaggtttgctgggggccaggctgggtgtcctcacaggagtgagggctacacccaattccaaaagcctgagaagagagaagtggagggggaggcgagtgtgtgaataaaggctcccatcaggtcaaaaaaaaaaaaaaaaaaaaaaanaaaa

SEQ ID NO: 298 - DNA, 1633 bp, Homo sapiens
  misc_feature (1599)..(1599): n equals a,t,g, or c
aattcggcagagcatagtctttcaaatttggacatttaaaaaagaaacttttactgtagtcatgaagtagtatcaaagtttaccacaagtttgtattgagagaagaacaaacaatatatgctaatatgaaaaacagctctacttagaaagctactgcttgggttttcttattaggcatagttctccagactgagttggttttactcatctacatgatttttccttgccttatggaacagaaattcaggcccactcgaattcagttattttagggctctttaaaatccagtatttgtgatttaaatgatgcggagggactttcattacctgtgtctttgcttatttctctctggccctcagaacaccccaccctgacctttaggggaaattgacagaggcagagggtttcacctgcctcaattgtcaccagccctgttacattcttccttccaagccttagcctcacagggaccttctcattattgaacaawtgccttcaaagcagtagaatagcccaattgttatggagattaaagataccgattgcaaaactcctgtaaataaaatcttcactgacaaacccagtttcttttcataggcttttcttctgtaatctctttctggcagaacatctcatgttttgatgttagagattcagttaccaaccacagtaaataaagcaaaataataatagaaaaatagtatagaactcaccctaaaaacaaacattggccaaccatgtttattttttgtctctctttgcactcctgagaattgataggggaagaatgtaccacctctaattcaggtgatttctgattagcaagctatggaaagtcttcaggttgagttttagccagttcacgctcccctaaatggcatggaatagactattttctgttttaagaaaaaatagaacaatggcactaaatgcttgactgaatgtttgactaaatgttgactgaatcatggataggaaagattgggcagaaaagacagccactgcctccagacacaggatgccacaatcctgggcaccatcattattccatacaaccttagggtcatttttagggtttagaactttctcaatagggtttcaagattttgaaaagtgtcttccaattctgatctccgtagatcctgttatgggaattaacctttttggaaggggattcttgttcttaaagatgaaattccctactttctttcctggagggaatcagtatgggcagagggaagaggagatggcgattctgacctgtgtgtctcatgtcacctaacacctatggggtggcatgaaacttgagctttaaaacacaccaggggccaggcacagtggctcatgctggtaatcccagcactttgggagaccgaggtgggtggatcacctgaggtcaggagttcgagaccagcctgccaacatggcaaaaccccgtctctactaaaaatacaaaaatcagctgggtgtggtggcgggcacctgtaatcccagctacttgggaggctgaggcaggagaatcgcttgaacctgggaggcagaggttgcagtgagccgagatcaggccattgtactctagcctgggtgacaagagtganactccatctgaaaaaaaaaaaaaaaaaactcgag

SEQ ID NO: 299 - DNA, 1889 bp, Homo sapiens
  misc_feature (1859)..(1859): n equals a,t,g, or c
  misc_feature (1864)..(1864): n equals a,t,g, or c
gttctgattatgctgccttcacaaaacactctaagtgacctaagtggttatgaagcaaatgcatttatggtgaaaacagtctttgctcattgctttctcttgtttcatttagtgacaaatgatcaagatgacttgattttttttccttcttaacaatgtcttttttatttaaaccaaaggtgaagccagtgtactttctcagtgagttctctgcataaagactaatcagtgggaccaggtaaaaaggtcatataatacattgtggagattgcttacttaatacttctgaaaaatggagtaagggagaaactgtaatgttgcaatatgaacctcccattgggccttccatagggaaagctgtgactactctgaaatggaacctagcattatatccttgtagggtagattataaatcatttccagttcatttctcttagaggtgattacctctagccatcagccttactccatcccatgtttggtatgcaatttgagccacaaggctcgtatcgccaacagctatatacattttgttccatttttctgtcttacagagccatgataraactgtggttagtgagttaaaattcctggagtaactactgtttttctcctttgaaacttaggtttctaaagttgcacctaaggaatctgtcacattttctgttgaatcatggtttttgtttttgtttttaacagatattccttctgatacggacttgaaaattagtgtatggtgacctgtgtttaaaaaaaaaagtacaatacaactacatatagctatatagcttaatgagacttccacccccccccttttttttttttggtttgttgttgttgtagtagtctggtgctggccacatttaagtcttaaaaatttttaaattttgytgttgatgtttgtagacagccctgttgttgaaatcatggctttattcattttatttattttttaaacttgcctgaatttgttctaaaggaatatttaagagacataattttcttctctttaccataacattacacaaaactttttcctaaaacacggttgtgaggtactgatgaggtgtaagtggagctgttaaaaacagcagtgctgtattgyagttatgtatattcgtgtacagtatgtttagatcccaggtaaacatattcttttctgagaggataaatacctgcattcagatattccaggtaaatataattgagtcagggagtagtaaatctgatggagaattcactttggggaggggaaaaagaatagtatgcaagacccttattggcttttaattatacctgaaaccaaaatggatatttttagtctctctgcatgtgagatttggtgtaacaagatagaactataatatatacagtatatggaaggatagatatagtgctttgttcattttaattgcaaagctgccaaaatagttgaagcttaattacttgacttgccttgatttataggactggggcttggagaaaatgagcagatgttcctctaagacatcgattacagaagccttatatacatggatttgattttgtatttgtagctgaaagtcactgttgtctaaaactaacttttctaagttatcaaaacaacctaatttcttttccaacaaggagaacttaatggcatgaaggattgtgtgacacattggaaaagccagcttactgccactctcttcctttggccattagagggaggtgttgcctttcattgacgcttagaagcaaattgttcacttgttaagaaaagtaaatccttaaaaaaaaaaaaaaaataaccaatttttcttaatacccagaagggattttactcaatatttccctaggtaaggaaagggggggttatnttccncttaaaaccccaccgtgtattacaa

SEQ ID NO: 300 - DNA, 1406 bp, Homo sapiens
  misc_feature (294)..(294): n equals a,t,g, or c
  misc_feature (1336)..(1336): n equals a,t,g, or c
gaagaaatgtagattgaaagtagaggttgactccagccaggaccaaaataatatagttattttttaggggaactataaaaagaacaacagtttttcctagcatttggcataagacctaggattttaatgaaagttgaaattcaaatgcctgagactgccccatactgtgagggtcttattagccttgtytttggaaggagacttactgtctctcttcctaaatttaaatggcttgttttccctacctatattatggcaggcagagtgggatatttaaggtattgtctattccanatctctgcccttctcattttctagggrttgccctgcattccatttacactgttacacttagacgtgtgaatttgacctgtctcccgggcatttggaaacggggtatgattctactcctagtctgtctctgaagcaggggaggtgtaaatcctggtgacgtatgaactagaggggttggcctgcagtgagggaagcatgatggagttgggtgcgtggagaagggaaaaaaatcaagagatatgctcaagttcctctgtgtagccctccagttcccagagaccccggtgtacttacaacaaatgaaaagggggtgtgttcatattttccttaaattttctcaaggggttttgggaacgttcaaccaaaggtaccctaatatagtggtaaaaaagaagcctgagatttctagagctgctgtgaagamctattagaaggsggartataagattctaagtacgggactaagttactgaaaatgtggccccatagagaaagctgctctacccttcccttagtgcagacattgaggttggggttcattctgtgacgtcatagccttgctttgaactagaaggagaagcatttgttagataccaggttgggttgggataaaacaaacagaatgttgcttctcagtacagctgcctgtttgcagggctaattctctaagggtctcaggatactcagaggcatagcagacttgggcccagagcacagggataggcaaaacttttctgttaagggctacttagtaaatattttaagctttgcaggtcctatggtctctgacattactactcaactgtcccatggtaagataaaagtcacagacaatatgtaaacaaaatggacatagctgtgttccagtgcaacttttttttttgagacagtcttgctctgcctccaggctagagagcagtggcgtgatcttggctcactgcaacttccgcctcccaagttaagcgattctcctgtagtcccagctactcaggaggctgaggcaggaaaacagcttgaaccagggggtcagaggttgcagtgnactacggtgcactccagcctggcaacagagtgagactccatctcaagaaaaaaaaaaaaaaaaactcgta

SEQ ID NO: 301 - DNA, 1282 bp, Homo sapiens
ggcacgagatttttaatttttgttaatatcaacagcaaaagcctagtgcattgggagatgtgcaacctccctgaaaatcttttctgtttctggagtacttcaggggtggcctctggccccagagcctttgccacagtgctcccaccagcccccacctcatccgtctgtttgcagagcctcatctacaggtccccacgctgccttctttactcactctgcgcttggccgttttgttatttggcttagtctacattgggcggaagtctgtgtgcacagagtgggtgttccttcgagccccttccactcagagggccacacccagcgatgccagtgaaggtggcacagcctctcttcagtttctcctgactgtgatctcactggggtagaattcccctgagagaattccctcactcacggctccctttgccagagtcagttcaatcaggtctgatgtgagcaatttacacacttgtctcagaaagtccctcagggtttgtagaggactgcaggggggcatccgctgcagactcagcctttctctgcagccatcctgcagtgggggtgagcgggcacaggctgagaactgctcttgggtggtggaagcaggtgtcacggtgcaagtctccccctgcacccctcccccagcttgagccgtgtcacccccctctccctccagcatgggcctgtgtctcaggctctctggaaggtggccctgccccggaccctcttgcaggtgtcctggtttgacttggaactagatggccatctttccaggctttggtggcccaagagcagtctgggtggatggaagtggctgtcccctcctctccagcccctgcccacccactggtggaggtgctaactagcagggacgtggcataggatgggagctgggcgtgaggtgcttggggtccattctttgtccctcagcttctcagagtccggccagcccttgtgttcccgtgccccacactttcctcctccccactgcagtgagtcaatagtccagggtggggcctggcctccctgccctgattggggactcaggaggtgaggcctggggggcttcctgccccctccttgcccacctgcctgcccccgggcagcacgggagggagagcagggtgagcacgcttgttggtttcagatgcactttctgcttgcattgccgtatctgtgcgttccttcatcctggtcctggctttatggaacaccatgtttttagcatgtttttaaataaaaacggataaagtgtcaaaagcaaaaaaaaaaaaaaaaaaaa

SEQ ID NO: 302 - DNA, 1053 bp, Homo sapiens
ggcacgagcccggatggaagctccggccgcggagtgatggtggcctcagcgaagatgggccgggcagggaccatggcggtggcagcagagcttcgagagctgtgcccaggagtgaacaaccagccctacctctgtgagagtggtcactgctgcggggagactggctgctgcacctactactatgagctctggtggttctggctgctctggactgtcctcatcctctttagctgctgttgcgccttccgccaccgacgagctaaactcaggctgcaacaacagcagcggcagcgtcgaaatcaacttgttggcctatcatggggcatgccatggggctggtcctttccctaccggttcactgcttgaccttcgcttcctcagcaccttcaagcccccagcctacgaggatgtggttcaccgcccaggcacaccaccccccccttatactgtggccccaggccgccccttgactgcttccagtgaacaaacctgctgttcctcctcatccagctgccctgcccactttgaaggaacaaatgtggaaggtgtttcctcccaccagagtgcccccccccatcaggagggtgagcccggggcaggggtgacccctgcctccacacccccctcctgccgctatcgccgtttaactggcgactccggtattgagctctgcccttgtcctgcctccggtgagggtgagccagtcaaggaggtgagggttagtgccaccctgccagatctggaggactactccccgtgtgcactacccccagagtctgtaccgcagatctttcccatggggctgtcttccagtgaaggggacatcccataagtagttttgagagggtggatgggttacttgcccaccagaaacagccctagtcccaactccttgcgttcctttggcccctccctgcctacctagaatctgcctgaaagggctggagaggggcagtattgggggactgtgctagctttacccccgcaggacatacacaggagcctttgatctcattaaagagatgtgaaccagctaaaaaaaaaaaaaaaaaa

SEQ ID NO: 303 - DNA, 1238 bp, Homo sapiens
  misc_feature (19)..(19): n equals a,t,g, or c
gctgcagaagacgacagangggtacggctgcgagaagacgacagaaggggggattggccggaagcaggcgccgcttcgaggcccgcggaaaacgcgcgccgagacccgctcctgcagtattagttcttgcagctggtggtggcggctgaggcggcatggatctcagcgagctggagagagacaatacaggccgctgtcgcctgagttcgcctgtgcccgcggtgtgccgcaaggagccttgcgtcctgggcgtcgatgaggcgggcaggggccccgtgctgggccccatggtctacgccatctgttattgtcccctgcctcgcctggcagatctggaggcgctgaaagtggcagactcaaagaccctattggagagcgagcgggaaaggctgtttgcgaaaatggaggacacggactttgtcggctgggcgctggatgtgctgtctccaaacctcatctctaccagcatgcttgggcgggtcaaatacaacctgaactccctgtcacatgatacagccactgggcttatacagtatgcattggaccagggcgtgaacgtcacccaggtattcgtggacaccgtaggatgccagagacataccaggcgcggctgcagcaaagttttcccgggattgaggtgacggtcaaggccaaagcagatgccctctacccggtggttagtgctgccagcatctgtgccaaggtggcccgggaccaggccgtgaagaaatggcagttcgtggagaaactgcaggacttggatactgattatggctcaggctaccccaatgatcccaagacaaaagcgtggttgaaggagcacgtggagcctgtgttcggcttcccccagtttgtccggttcagctggcgcacggcccagaccatcctggagaaagaggcggaagatgttatatgggaggactcagcatccgagaatcaggagggactcaggaagatcacatcctacttcctcaatgaagggtcccaagcccgtccccgttcttcccaccgatatttcctggaacgcggcctggagtcagcaaccagcctctagcagctgcctctacgcgctctacctgcttccccaacccagacattaaaattgtttaaggagaaccacacgtaggggatgtacttttgggacagaagcaaggtgggagtgtstctgcagccgggtccagctacttccttttggaaccttaaatagaatgggtgttggttgattaattttaaaaaaa

SEQ ID NO: 304 - DNA, 1954 bp, Homo sapiens
ggcacgagcggcacgagcttgagttagaagaacctcagctctgtagtgatcttattttactgttttcccaggatagaatgcccttggtaccacatactgtatgcagagtatttatgattgcttgagtacagttccttggaaaggacacaaggggtttcataaagcggtactaaaaatctgcttttctccctagcatttaccaacaaccttgcgatccgatggcttgaaataatggtcagagtgcatgttacccaacttctcctggctgctcctactctgtcacactgcacacagatcatgcccgccaccaccctacactccccgacctcacccaccagtcagacagtttaagtcctgctgacgcaccaggcgtgtgttggctcgtggttgtacttttcatgagtagcagggaagatacactccaggaaggygggatacaaattattgaactgtgtgacttaaaagctccagtgagtttcgtcggaagtataggagtttgaaagtgctccccagtcaaacccagaactacatagggtcagccgtggttgagctaatttctgcttacacatgtgtggagggtgtcattttctgactacgcctaggcctgagtggacagccgattaaaagatgtaaattcgtggattgtatcaaggagagcgggttccatctttgtggtcaggagggggcccactcttttgttccgcaaagggtttatctggatgttccttgctggaagttgcttttccagtttggatcaaaccacttaagtggagctccagcctcagtccttgcaataaaaaaaaaaaagtcctggaaagccagaattttgctaatatcttacatagaatctcaatgatgggaattgggagtagaaggcagagagtggtgcttggctgatggaagttaaaagttgggttaataataaactacatttatatatcagttaacagcttgctaagtgcccacatattatttgagcttcatacttgcttgctgagaaagaatggctattattatcattatcatcattaccactttccattttatagataacaaaattgaggctctgagaatttaaagagattttccccaaatcattaaacggtgacttctgaatctggatatatgacaagacctctgtccccagtccccttgctttcacctctataatatatagtagctaagctcagctttctgagaacttccctgkcttatgtcatatttgacattataggagaattgaagatgttttgtaagtacatactttgtttactacctcagtagccagtataacaaatggcactgaagttttatgctttgcttgctaaaaccagcaccatttgtgaaacaggtcttggctccgagttacccttaaatgtaactcctttattataaaatcatttgcaargagctgcagagawcaaggaatasactcttcccacttccctaatgccaggtagtactatgacaggacttcatagtaccacttcttcaacaaaataagtgtctgcagtgaaatatttgttaaaatgcacatttctcagtgaatatatttcttttaaaactgaaaaaaatagtacctaacggaaattttatcattgctttaaaatgtattttaatgaagatattaaaaaatacctttgatggattcttcaatattgtcgaactgctcaaaatgattatactgttatatgaagtctaaaatctttcatgcaacttacaagaatatttttgttgtatgcaacacagttggaaaattctagtgggaccatgtccatgcaattactgattatgtaatgctgtaaatttttgataagcatgttccaagttttcctgttctaaaaacaaaaacattaaaatcacccactgttgaagacaaaagatcattactttattaggagatattattagatatgtttagaactagttaaaaaaaaaaaaaaaaaaactcgag

SEQ ID NO: 305 - DNA, 874 bp, Homo sapiens
  misc_feature (79)..(79): n equals a,t,g, or c
gccttctgaaaaaggtgcttgcttcctcttcaccttctgccacgattgtaagtttcctgaggcctccccagccatgcanaactcacgcactcctggctttaaagtttatacttgcatttgccatacctgataagccacggcatatccagatgaaactagccagactggaatttgagtctttggaggcactcaagcagcagcaaatgaagctcgtgaccgagaacctgaaggaggaaccaatggaaagcgggaaggagaaggcaacctgagtgcccagcgtgcccagctgccctgttggcagaggcctgtgtctgtgccacacctgccacggtggcaggggggtaccggggcagcatcgtggctcctgaacccagacccaatgcttagccaaacgaatggctcccatgtggcaagcacccttctcagtttcgcagtggcttggctcgggatccttggcagttcccccagccccaccctgtctgctccttcccagttccttcccgggccccacacgctgctccagctgccaactttgctgcagagccactgccgcccttgagcctctcaccatgagtgagccaccagctctccacgttcccctcatagcagtgtcactcccaaccccaccatggcccagggacccgtggacaggttggggatggggtgtgtgcccactgtgctcatcacaggagcctcagttgagagtgagcggggtacagtaaggcagtgcttcccacactggacctctttcctggttctcttttgcaatacattaacagaccctttatcaacataaacaatagtaactgagctattaaaggcaacctctctgacwaaaaaaaaaaaaaaaaaaaaaaaaaaaaagggcggccgc

SEQ ID NO: 306 - DNA, 2206 bp, Homo sapiens
ggcacgagctggactccctgagtttgttaaaatagtagaagttgggcctagggatggattgcagaatgaaaaggttatagttcctacagatataaaaattgaatttatcaatcgactttcccaaactggcttgtctgtaatagaagtgactagctttgtgtcttccagatgggtaccacagatggctgatcacactgaagtaatgaaaggcattcatcaatatccaggagttcgctatcctgtccttactcctaatcttcagggttttcaccatgctgttgctgctggagctactgagatatcagtttttggagctgcatctgaatcctttagcaagaagaatattaactgttccattgaagaaagtatgggaaaatttgaggaggttgttaagtctgcaagacacatgaatattccagcacgagggtatgtgtcttgtgctctgggctgtccatatgaaggaagtattacaccgcaaaaagtgacagaagtgtctaagaaattgtacggcatgggttgttatgagatctctctaggagacacaattggagtgggaactccaggaagtatgaaaagaatgttggaaagtgtgatgaaagaaatcccaccaggtgctcttgctgttcactgtcatgacacatacggacaagccttagcaaatatccttacggcccttcagatgggaattaatgtggtggactccgcagtatccggattaggtggctgcccttatgcaaaaggtgcttctgggaatgtagccactgaggatttgatatatatgcttaatggcctggggctcaatacaggtgtgaatctatacaaagtgatggaagctggtgactttatttgcaaagctgtgaataaaaccacaaactctaaagtagcacaagcctccttcaatgcttgacttgaatggatttatgacgtaccgttgagaagatcaatttcagctacaatactcatctgaaaatcattaatgccaacttgctctgatatgtgaagtaatggacaagaatgggaaaaaagagatccttttcaaaaagattataactggatagattaagtcaacaaaatgcaatatcagtcatcaggtaaattgcaagctgaggataaataataaaacttgtcataattttgaacttggaaaaaagtttcttttgctctcatagaaataactttttaatttagtagatgggaaaattgacttcgtatttccccaagtatcaaatactgtgttaatacttaatcaagcaggcttaacactgtgtacatattgtcagtagtttatgagctcctgcatagtatgcagagtgtgtggcctcaatattatacattatgcctctggatctcaactactcatttgccaagtcagttatgttatggaccaaaagccaaatctccatctgaccctacataattttagcaatagaacttttatatttcaagtatggctaacatctgttaactatttcagtgactttatctggttccaagaggctgtggccaatggcaagatgccatatcctggaaacatattacgacctcccatgtttgttacatgcatccagtttaccacactttacctgtcatcagttatagtaaaaaccagcatggtgttactcaactattgagaaattgtaagctattttttttgtcctgatgtctaaattgcagtgataagaataggttgatacatgtatcataatctacctttataattttcagatcactttcaaattgcccaaggaaatattgtgatcctaagaatattaagataattttaggttaatgaaatacccattttccttttattcatggtgctttgcttacccacattattttttggtgtattttttagtggttattttagaagttgaagtggctgaaattttgtctattgtcttagaattgattgccagaaattgcaagatgtaatatatcaaagtcagggatgaggagcaggaggactattcaagataaacttctgtaacctatgcatattttatgggggcagtattattacaaatggatctgaaatgtcagttctagtatttagagagacttctctaataataccgggtgatattatctttgagtaaatttgaatataaattgaaacataaaaatgagtattgtgaactttctcggaaatattcattaaaaccattgaaataaaaataaattcaagaaaaaaaaaaaaaaaaaa

SEQ ID NO: 307 - DNA, 956 bp, Homo sapiens
aatttcccccaggtccctgcaggtaatccagggaccccatagggagaacaggctgactggggcattaggaatgtttgtacctctctgcttccctggcagcctggggaagggtgcagggctcagtgcgctaaaccatggtaaacatcttcaatagaactaccctagaatttagtgagtgtgagactgagatattgctcagaataaatttattccatagccatttaggattgcatgttctggacaaaccttgtccagtatgttttctgtttgagctttttcattcttttgttaagccaacaagttgagaatttggccctgctgggatccatgtagtgggcactagctgctctttggccaaggccttcataaatgattcagtctctcattatctgtcctctagccccacaccctgatttagaccgtggcaaaggaagaacttgaggtcaagaccaaccaaatctgtgaattaaagctgttatttttttctctgcaagggcgctttgcttcaggtctgggctatgtgcagaacctaagcaggctgtgagagttagaagaggcagtattacatgttaggcccagaacaccatgggaaaaggtttatgtagtgtatcttagtggcctgcctagctgcctctggggccaggctgacttctgatgtccacattagctcgtacctgaaccctgttgctgaatgccagccctgttctcctgtaactattatatacgccatggcctggggggcattgaaggaagtaagctctcagagatcctaacactggctgggaacctctgactcagagcatgtctttaaagagtccacatctggccaggcgcggtggcacatgcctgtaatcccagcactttgggaggccgaggcgggtggatcacgaggtcaggagtttgagaccagcctggcaacatagtgaaaccccatctctaataaaaaaaaaaaaaaa

SEQ ID NO: 308 - DNA, 2174 bp, Homo sapiens
ggaattccccgggggaatgggccactgattcatttcgtggttaactggaatactgctttttaattgatacccagctgtatctaaatcattacaatactggacagatagtgtagtgcagagtatttgaaatgcagtgctttgtttggcaaagatttatttaatggtttcattttctctgcaagaagaaaaaaagcagatcatcgaagctcttattatttgcactgtggcagattcacttgagttcagaagcctagggaaaaggtgggacttttgaaactagggcagtaggtaaatgtggacacaccttcgtttgtatttgattagggatctgacagcgtgcatatgtgtacaggtttgcacgtgtgcatacacacatatacaaatcatagaaaaccataggtgttctgtgagagagaaaattttgctacttaaatacagcgtgaattctcatcctgatagttgcagaaaatatttcttttaaaatggagattaatgtctaattccatataaagaagattataggaaaggtgatttaaactgtaagtagctttgttcactaaaacgctagatttatttgaaacagtgttttatttcttttggaaggcagacaactagtttaatagtgtacatatgaaacgctaatttggcttgttaattggatgcaattaaattgaggttattttatactgcttaattgttagaaaattacatgcgttgccatgcctgtgtaatgtgaagcaaaagcgaagggtatagcaggagtgggggtgggagggacgcaagatctagtcctgtctttgcaattaactttctgtgaaaacttggaaacaagtcatcgaagctctttggacctcatttggaaatggaagagattggaacagatggctcctaaagcttcttccagctcatattctatcagtttataaattctactttgtagttgtagagaatgcaatgtcattatattctgtaattatggtattacaaggatgaactaaacacttaaaaaaatcagcacagtgccaatttagcaaatccgttagaaggaaggcaatttaggcttaaagagcactcacctgtgccaggctccatcccaggctctctctccacattacgtcacttagccctcacaaccaacctgagaagatttagttttttatcttgatgtgtatacttaaagaaacttccattcggaaaggttttgtggggatgctttgctagtcattggtgaagcaggattcgaactcagggttctttggctccgaaaatgctttgtctttttacccatttcacgcagtataagcaattgtttacacatcaaaattatttcaaatatttaaaaaaggccaaccatatttatcacttagcacaatgtttccccttagtagtatatggataaacaggtagcccacgggattaagaacctcgatttgaagtcagacagaatagggcaaattccagctccaccaccacctgggggaatttgggtatgttacttaacctccctgaggttacaaaatgaggataatacccattcaagagtcattgggaaatttttatgagaatgtttgtacccatctcaatgagcacatagtaaacgtttaatacctggtagctatgggttattattaacaaggtattagactataagaaaaacataggacaattcaaattgttgtgacagtaaaatattaaatattttcaaatggtccattaaactcttgactgaaatggtttaagaaacaatgttagaatgacatggtttcacatttaacagttaacaaatggaaatatcaattaaaatctggggtgtttctcactgagctcagccagtgctatgccaatgaagtgaactaaattctctggttctttgtggaaaatcattctgaagtttttgctctaaaaatagcttttggggcctgaattaccccttaccccactcgaacttctgtgcaagagccagaggaccagtgattactcgtggggcccttgggcctacttaagagactcaacttgggtgttcacaggactgttgactttaattctaaaaaaatttattaattcaacagagatttattaagcacctgctctgggaaagggctgttctagacactggagatccatcaatagacaaaaatagtaaaaaaaaaaaaaaaaaactcgagggggggccc

SEQ ID NO: 309 - DNA, 1743 bp, Homo sapiens
ggagaagagagaggcaagggcaggagtgaaggagagagctgaagcctggggctccgagatggtcagaggatgggagacggggcagtgaaacaaggcttcttgtatcttcagcagcagcagacgtttggaaagaaatggcgccgcttcggcgcctcactgtatggagggtcggactgcgccttggcccggctggagctgcaggagggcccggagaagcctcgtcggtgtgaggctgcccggaaggtcatccgcctcagtgactgcctgcgggtggccgaggccggcggagaggccagcagcccccgggacaccagtgccttcttcctggagaccaaggagcgcctgtacctcctggcggcccctgcagcggagcgcggcgactgggtgcaggccatctgcctcctggccttccccgggcagaggaaggagctctcggggccagagggaaagcagagccggcccttcatggggaaatctaattgtacagcttgcgcagtcacagtcggcccccacaaggaatttgctgtgaccatgagacctacagaagccagtgaaaggtgccacctgcgggggtcctataccctccgggctggggaaagtgccctggagctgtggggtgggcccaagccagggacccagctgtacgactggccctacaggtttctgcggcgctttgggcgggacaaggccgtcgctgcgtctctggagagggcaactttgagttcgaaacccggcaaggcaatgagatcttcttggccctggaagaggccatctctgcccagaagaatgctgcacccgctacaccccaaccgcagccagccacaatccccgcctcgctgccccggcctgatagcccctactctcggccgcatgactcactgccgccgccttcacccaccacaccggtgcctgctccacggcctcggggccaggagggggagtatgccgtgcccttcgatgcggtggcccgttccttggggaagaacttcaggggcatcttggcagtccctcctcagctcctggccgacccttctgtacgacagcattgaggagaccctgccccctcgacctgaccacatatacgatgagcccgagggagtggctgccctgtccctctatgacagcccgcaggagccccggggtgaggcatggaggaggcaggcgacagctgacagggaccctgctggcctccagcatgtccagccagctgggcaggatttctctgcttctggctggcagccaggaactgagtatgacaatgttgtactaaagaaaggcccaaagtgacagaggcagcagagggatggtccaccgccccttggcttctgctggtgactcctcctggccactgcatcagaagaacctcctctgccccttctggagcccgaggcctggcctgtcttcgttggggctgataaattgcctctcccagggcctgctgggtgagtcaccatcccaaagcaggaagggtgccctggagagaaccaccctcctcctactctttttccacttcctcctctttctttccccagctgaggaggaacctggggcatttagggcagaggacaaaaggatgtcagcaattgcttgggctgcttggctatgcaagcctcctgcctgctgatggccacttcagggacagcctgggcccaggcacccagggggatggcggcagcttcctgcacctttcagatttcttggtggcaattaaagcattttcagaacaaaaaaaaaaaaaaaaaa

SEQ ID NO: 310 - DNA, 1623 bp, Homo sapiens
ggcacgagctttattatggatgagtagggccttgagtttctggtcagcctagcggggacagtaacaggatcattgctcccctaggtgtgtgaccatgagctccagtgtcaatgtgaggaaggatggatccctcccgactgcgatgactcctcagtggtcttccgtagtaacattacacatctaacctgagaaaattgctctcctcttccaagcctttattttgtattatatgagatttcactgcttcttttctctgttcttgaaatttctgttctgttgatgtgaatccacaatatttatcccccaaatctccttaataccttttaattatattttccgtgtcttcattttcactgcacatgcaaaaaaatttcctcaacctttatatttgtaatcttattttaatttcacaaattttcttactttaggactcttccattttcatagcagcctcaagttaatggaaaaatgtaatatcctcaaaactctctaagaatatgacctattattttgtatgttcagttctattctttgaattatctgtttcttttgagttggtttgttctgttgtcaccacgtcacttgtattctgttgtactagttttcttcaggatatgtgatccttagttcaatgtggaattggtagagctggattagttcacacgggatgtctctgcatttgtgtgtgctgttgtacctactgatatttctcttgatgggggaatctggctgggagctctatgggcaggtaggcaggtctgcctataggtcttcagggtgggaaggagccagagtggggacccacctccagttgttacgaggaacattttaccctgaggagggagctcatcaccacattttctcctgagagagctgctttttctcatcatcatctcattgacgctcccctctctgtctgatatagtgtaggtatctagaggaagcctctgtcctcctgttcatgttcctgcatcctctgtttgcagaaacggagaaattcttaggattttgatctcaggtgatgagccaatcttgttctatatacacaggagatgaagtagacctcagtgagatatctgccccaaattcagattgttagacttttcaagagagaacatttatttctgatgtttagtctatatttattgtttccatccacataaatcccttaacttcctatctttctgaagatttttaaaattattttttctagtgccctatgattttattatatacacatgtatttgtcatgtattttgaaaggggcatgaacataatcaactgttttaattagaaaactctttaatggtttcaatgctcactaaaaatccttttaaactatgactttcttgactgctttattttgacatatctattgatttgctaagtcacctctatgactaatttcttcctggtgtaacaatgcatccacataaaactttctaagttgtacttatgagaatgtatttctgttgccaaatatttttaatatttcaattaatattctatatcatagcatgcatagcaggtttgattgaatttgattttttaaatcataattttgcattcataactctgttaaagtagatgtttatatttaatgtcaaaaaaaaaaaaaaaaaa

SEQ ID NO: 311 - DNA, 825 bp, Homo sapiens
ccacgcgtccgtgctgaggtagaggcagcgcaagaagaggcctttgccgctggtcgggattgggatgtcgaagaacacagtgtgcgtcggcccgcttccggaaggtggacgtggatgaatatgacgagaacaagttcgtggacgaagaagatgggggcgacggccaggccgggcccgacgaggggtaggtgggactcctgcctgcggcaatgatccttgcattcaccgccctccccaccccagcccagcccagcccgcccttctcctggggacccgggagcctgcaggatccgcggggcaccggcgcggagctgccctctcaacctgcggcttaacctgtctctttgggatcgcccgctctgaaaaggcaagggggaatcccccgtttcctacccagtcggcaggaaacgcgaaggtcccactcttggaaacctgccctcccccgcgcgccttccacgcccccagattcctcaggttggacccgaatgcctgcctgcctcgggaactggtcccgccggccgcgccctcgcggcgctttggggaagcggtcccttgctggtggggaaggctggtgccgaacgccttagtttttcttcctagaactctgatttcctggggtcacattagctccagaaatttctgattgtggggaacctgcatctttccttagtggttttgttttttgttgtgtttttgttattggtagcgttaacgtagtttattccttaccggggggcggggggagatgggactgttcgaaaattgagggtccctgtgctttcagcccattggcctttttaaaaaaaaaaaaaaaaaaaaaaaaaa

SEQ ID NO: 312 - DNA, 1662 bp, Homo sapiens
  misc_feature (382)..(382): n equals a,t,g, or c
gcgcgttcctgcaaaggtagaggcacgggctgggggcgaccaggacggtgcccgcccacaagtacgtcttggctgtcggcagctccgtcttctatgccatgttctacggagacctggcggaagtcaaatctgaaattcacattccagacgtggagcccgcagcctttctgatcctcttaaagtacatgtacagtgatgagatcgatctggaagccgacacggtgctggccactctgtacgctgctaagaagtacatcgtcccagcattggcaaaagcctgtgtcaactttctggagacaagtttggaagccaagaacgcctgcttcctgctgtcccagagccggctgtttgaggagcccgagctgacgcagcgctgctgggnaggtcattgacgcacaggccgagatggccctacggtccgaagcttctgtgagatagaccggcagacgctggagatcattgtcactcgggaggccctcaacaccaaagaggcggtggtcttcgaggccgtcctgaactgggccgaggcggagtgcaagaggcaggggctgccaatyaccccacgaaacaagaggcatgttctggggcgagccctctatctggtccgaattccaaccatgaccctagaggagtttgccaacggsgctgcccagtcagacatcctgactctggaggagacccacagcatcttcctgtggtacacggccaccaacaagccccgcctggactttcccctgaccaagaggaagggcctcgccccgcagaggtgccaccgattccagtcttctgcctaccgcagcaaccagtggcggtaccgcgggcgctgcgacagcatccagtttgcagtggacagaagggtatttattgcagggctgggcctgtatggctccagctctgggaaggctgagtacagcgtgaagattgagctcaagcggctcggggtggttctggctcagaacttgaccaagttcatgtcagacggatccagtaacaccttcccggtctggtttgaacacccggtccaggttgaacaagacaccttctacacggccagtgccgtcctggacggcagcgaactcagctactttgggcaggaggggatgacggaagtgcagtgtggaaaggtggccttccagttccagtgctcctcggacagcaccaacgggactggggtccagggtgggcagatccctgagctcattttctatgcctgaggtgcccggggaggctgcagcaggtcagcgagtgagtggaggggaagtcaagatgctaactgcttcttgacaccatgaaaggctgctcttaactttgtctctctttgacatgtagtcagctgaagcttgactgtgtagagacattttccacacagccagaacccagggattggagtcttaggcatctctggtacagtggggtgcacgtctcaggtggaggaagatttacggctcaagacaggccccagatcccctcccagtggcacccaygccacctgctttgaggggttggatcttcctgctaccctcttggattctaagtggttccaagcttaacttgagaccttcccttcaaatctaaaattggcaaaaagtcacttaaaatagtggacttctgtaataaaggttgcctaaaataaaaaaaaaaaaaaaaaaactcgaggggggg

SEQ ID NO: 313 - DNA, 829 bp, Homo sapiens
  misc_feature (8)..(8): n equals a,t,g, or c
cggggctncaggaattcggcacgaggcaaacttgagtttcccatgctctgtggctgagcaagtcacttcaccattctcaggatggaagtggggatggaggtggcatcggcctcatttgaaccacatggactaagaggggctatgggagtattccccaaaggaagactgaggggcgttactagaaaatgggagaatggaagcagagtgggcaaaaccaacagatgttccctatagtaaataaaaaatttggacaattattagtgagcaagtacttataacatatatggcacatgggattgtgactcaccagtgtgttagcacaatatggtcaaaaacctctgatccaattcaacctactcatcttaacgattttatcagcatttaataagtttgttttggccatcatgtgttatagttttgtttgtggttttgacacctcattagaggtttcatcagtgtaaggagccaacctaagagctcttctcacaagtttcccaagagagaaattgcccctccaaatgtgaggagtctcactttatatagatagcatccacacttcttgcagtggaaaacaaaccttataaaatgtaatacgtttggtttcctaactttttcatgaccctggggtggtagaaggaagtgcaagttttatcacttggatttagagacaaggaaattgaaatggagagagaattgggctcacatgcaggcagcatgtctagctgcctccatcgtgtgatctgaggcaccccatgaggcctatgattactgtaaacctctaaaataaataaaaaataaaacaataaaaaaaaaaaaaaaaaaactcgag

SEQ ID NO: 314 - DNA, 1247 bp, Homo sapiens
aattcggcacgagagtccacacagcaatctcctttcctcttcagtgagaacacctctcctttgatcaacattatttattcggcttagtttaaaattcctcttgaggagaagtttctgggactaaacatttgaaaatatttgaaataaaaaaattacctgtttttaagtgacaaaaattattaatttataagttacttaggaatgttctcaggtgcaagtaacagatgacacaaacacagcagattgaatcggcgatggtacaattttctcatgtaacataaatgcagcagctgcatttgttgggtggctcagtggccttttgggcttttccttcatggttgcaagatggcactactccaactcaagcatcatgtttgtattcaagacagaaggaaagggagacggtttgtatcagtcactctgacccttttatcagaattgcataagtgctcttagaagcagtctgcttctccctaagatctttgctcagatgttattgggcagagcttttttgtgtgtgtagtgtctaatggttgcaagggaggttgggaaaaatgattcttttttttctggcttttatagtggaagcaggcaaaagattagttgggtgtagttgttgggttagccggtcatcatgctctgcccctaagtgctcagaatactgaagactaaagatgcaatgacaaacaagatagtccttattgtttttgtttgtttgtttgttttttgtttttagatacagctataattttattacaaaactgttcttttggcattagttagttacagtgatagcaagataatgtgagtgtgcagactggctctgatggaaccactgtattccctgcttactgaaccaaacttcagctacctcatatccattacatacaagtgacctgcagttattactgctacaaatcttgacgcgtgtaccgctgagggaggagctgatgctaagggatttgattacatgttgataagactacaaaagttcgtttatgggactttttcttcctcttcccatgcaatgactttgctttagaacaatcacatggcttagagctagtctgagtagcagcagcacccaaggagcgtcagttcttgttaaaaagcaatacctgtgtgatgcatttttacgccacaggcaaagggaaggatcaccctcattttaaactcctgcagagtcccttaataaaatatcaaagcattccaaaaaaaaaaaaaaaaaaaaactcgagggggggccc

SEQ ID NO: 315 - DNA, 1282 bp, Homo sapiens
  misc_feature (907)..(907): n equals a,t,g, or c
ggcacgagccttacccctctgctggcaagaggggacctgattcatcctcacgctaaacactcattctacccaactgattgagacagaacagaagataaactgaaacttctctgccttcccgctgcaagagtgaatgagcgatccctctcaactgactcaaaatgtttgcctcacccaggagatggagctctcgaaggccttctctggccagcggacactcctatctgccatcctcagcatgctatcactcagcttctccacaacatccctgctcagcaactactggtttgtgggcacacagaaggtgcccaagcccctgtgcgagaaaggtctggcagccaagtgctttgacatgccagtgtccctggatggagataccaacacatccacccaggaggtggtacaatacaactgggagactggggatgaccggttctccttccggagcttccggagtggcatgtggctatcctgtgaggaaactgtggaagaaccaggggagaggtgccgaagtttcattgaacttacaccaccagccaagagagaaaatcctatggttatccctgggaacgcagatcacctacatcggacttcaattcatcagcttcctcctgctactaacagacttgctactcactgggaaccctgcctgtgggctcaaactgagcgcctttgctgctgtttcctctgtcctgtcaggtctcctggggatgtggcccacatgatgtattcacaagtcttccaagcgactgtcaayttgggtccagaagactggagaccacatgtttggaattatggctgggccttctacatggcytgctctccttcamctgctgcatggcgtcggctgtcaccamcttcaacamgtacaccaggatggtgctggagttcaagtgcaagcatagtnaagagcttcaaggaaaacccgaactgcctaccacatcaccatcagtgtttccctcggcggctgtcaagtgcagcccccaccgtgggtcctttgaccagctaccaccagtatcataatcagcccatccactctgtctctgagggagtcgacttctactccgagctgcggaacaagggatttcaaagaggggccagccaggagctgaaagaagcagttaggtcatctgtagaggaagagcagtgttaggagttaagcgggtttggggagtaggcttgagccctaccttacacgtctgctgattatcaacatgtgcttaagccaaaaaaaaaaaaaaaaaaaaaaaaaaaaaactcgagggggggcccggtacccaat

SEQ ID NO: 316 - DNA, 806 bp, Homo sapiens
  misc_feature (25)..(25): n equals a,t,g, or c
  misc_feature (29)..(29): n equals a,t,g, or c
  misc_feature (37)..(37): n equals a,t,g, or c
  misc_feature (44)..(44): n equals a,t,g, or c
  misc_feature (143)..(143): n equals a,t,g, or c
ttttgacccggattaacaaattttnaccnccaggaancaggctnttgaccaatgatttaccgccaagctcgaaatttaccccttcactaaggggaacaaaagctggagttccaccgcgttggcggccgctctagaactagtgnatcccccgggctgcaggaattcggcacgagcggcacgagcgcaaagccatcgtggacaagtttggcggggcagcttccggccccacggccttgttccgcaacactaaggcagccggggcagccattggtggtgtcaagaacatgctcttggagtggtgccgagccatgacaaaaaaatacgagcatgtggacatccagaacttctcctccagctggagcagtggtatggccttctgtgccctcatccacaagttcttccctgacgcctttgactacgcagagctggatcccgcaaagcgccggcacaacttcaccctggccttctccacagcagagaaactggctgactgtgctcagctgctggacgtggatgacatggtgcggttggctgtgcccgactccaagtgcgtctacacatacatccaggaactgtaccgcagccttgtgcagaaaggactggtgaagaccaagaagaagtgaggaggtgactggctctgtgggcagagatgggcagggtgcccagctcagcagccacggcccgggggttcccttctgctccatggaggcaccagagccaggggcttaggcaagggtgtgtggcgttggttttaactgcattaaaagtacttttgtaaaaaaaaaaaaaaaaaaaaaaaactcgag

SEQ ID NO: 317 - DNA, 981 bp, Homo sapiens
ggcacgagctcgtgccggtgctctccagacctcctctctaaactgcttcattgacctaagtcactctcttcaatcccacctttgttacgttgaaatccctcatttattttcttctcaaaatgcccattatccaaatgcagaacctctgcatctccaagccagttatgctgaatttgtcaaacttagacacccttgacaactgcactcctactgtaggctcctgtgcatactgtcgtcttctgtgggggatggagaggttagtgtgatgaggtggtgtctgcccaggaggtttctttcaaacatcatggcctcccatccaatcaacatcatcaaattacatgtgtaatcaaggctctgtgccatgggggaaatgaatcatttagctaggccaggatctagtgaaagccacagagtttaaaaccatgaaagaagttgaaggcagcattcctcagctctgtgacttgtgaccctatttgaagtttcaggatttgggtgtcacaaaggattgtccctaatccttggccctggggtcttccgagtgagctggtttaatactctgagaatgagcagggagatccagagaatgaatccctgaccgcatcacctaaactgtcttccaaacatgagacaaagctgactgttcacactgattgcccagcacataccgtcttgccagtttcttcttttctcccagtctcctgttcatccattctgttctcccttggggtgggaatctatgatggaggttactggggaaacagctcagcagatttttggagaccaaaccaaaggtctcactaggaaatttatctgttttaaaacattgcttccttcctggctctgctaaattgaatgctcattgtttgttgttgttgttttttaattctaatgttcaaaatcctgcgtgctgtatgaatctagaaagccttaatttactaccaagaaataaagcaatatgttcgtaaaaaaaaaaaaaaaaaa

SEQ ID NO: 318 - DNA, 1523 bp, Homo sapiens
ggcacgaggttgtcttccatggcctgtttctcctgctgtctgggtgagtgagcctgcaacgcaatgcccatgagagtaaatgcctcctgacctaccctgctcagcactgttctagtgtcttggccttgaaagaaaagcctgacttcctgctgacacatgtggtaggggcatggcagctatgaggcacctcctacgtctgttttctggctgtggtgacttgggatttttaaccttatatatctttttcctttactcaaaacaaaacaatttttagcacactgaaaaaaaaaaaaagccaaatgttttgtgcctttctaaggcagcactgtatcccaggctgcattttaggacttaatatggaaataccagagtctgagctcctctaccttgagtttcattagtccttagtgtctaggagacaggaaagaatgctctctgtgactggagaggtgacatgcaggtgcagtgtgtctggagtccctttcccctgctgtgagacttcagtggaggagagaagcattgtaccctgggatcatttggttggttccaatcacaagcttagttatcaggttgcatgccttgtctcctgcaaaagacagaatgtttcacaattcccaggtaaactctggaccattccaagtgtcctagccttctgatgacattaattacctagttgtgtcgaggagtataggatggactctcctgagaaggggaggttggtggctttgtcttttctttttgctggatcctgaactggtctagacctcctgcccccaccccccagcccccatcagatgtggctggcctttcatttgaaggcttcagacttaaagcattaagcagctagtgccctctgcagggcctggtttccccagggaagggcagcaaggaacatgggaccagaagcctgtcctcagtaatgtgactatagtgagctttagcaaaagtttttctatataatgacatcttacttatcttttaccctttcctcagttttcccctgcctttaactaataaagaattgggagacagaaattttaaagtcctccttattcaagattttgaaattcttagcctgggagtgctggagagaacctgatgctttctccagaatgaagagtcccaatttgtatatcagtgttaagaagaaaacaaaacaaacacataggtgagattttcgtggactattttaaaaatgtgtcattaatataaaaaatttatattagcagtatttaatcattctcacctgtaaagaataagaaaaacagaaggtaaatattcttacagagaatagcagagctttaagattcattttcattttaagtccattttattttgccagtgtattaatgtttagaagtctgttttactaatgttatttattaattttttttcatttccatacacagttagttaactaaagagctttttcaagcacccatgtctgtaaaaaaatatttttaaataaagtttcttttgttgtagcagaaaaaaaaaaaaaaaaaaaaaaaaaaaaaaaaaaa

SEQ ID NO: 319 - DNA, 2116 bp, Homo sapiens
ggcacgagcctgattctacactgggaagttaggggtagaagcacacaggagcccagcacttacagccagtggccctgggggtctcctccagctccacctcatgacaccccgtgctgctgcgtgactgctcctggtgccaaggccaccgctgccatgagtctgaatggctaatgctgagattagcagggcctcccttctactggcctgtcctcctggctctcctcccttttgcctcttctggatttcaggtcagtttgaaagtgggtggctgtctcagctccctgtgagcttccatttccagtctacgctacggaagtcagagagctcagacacaaatccctcccaatggcaaaggtgctatagctgcaacttcctctgcagtgacccggtgggcagtaatctgtattagcagaattcctctcatgccagcaccagctgggggaggagagggtagtgcctgggcattctgctttgggaagaaaaaggacaatcaaaaccaagtgaaatccaaccaccatggtgtacccaacaggtggagtgggctgcaaagtccttaaacatctcaacaggagaagtagctccattttgcgggcaattattttctgcttgaaattagctgttctcaccaagaatggactgcatactaaatcaattgctccactgaggctgccataagcttcatgaagcaaagaatgattcattcttctaaagctgtgatttcctatttgctcacaagccattgcaggggaaatcctcatctttcccactcactgctacactcactgtgatgtgtttatagaccttcggggaccacacctcctccagctgtctgccttactcgaaaattagacccagcttgtccctgacttctagtagccagaaagtcttccacaagatccagccgcatgatacggagtacacacataaatgtgaaaacaaacccctccatcctttcccactgtaaatcaacagcacatgccctctgtgtctgacaattcctctcaaagacagtggctccagcagaggaaattaaggctggtgcaggtgccccagaagctgagtcatccgggatgactggtggccctgaagtcccgcccacagaaggacggccatgggagcctggcacactgccccttggtggcacaaatcctgagcaagccatgccctaaccttaaacaaggacctaggactgttttctctcccacagcctctgagaacttgccctttctctcccaatgtgatttgtaaacaattctcctacccagcctcaagtaaatatcagagttaagctggtttcatacaccatgttgacagtaaacatcttagaggacactttcaatccacccacactgcagctcagtccatctgcacaaagagaagaccccccccccacccccatcgcggtccaacttgggggtacatagatggaaaggcagcagtagtcagcaggtcaactctgtctgaaagaggtccatggcaatgtaaataccaatctactggcaaccacaaagcacccacatagacaggcactgcaaggaatggagggtttgaagaagcaggtcttgatggagttttaaagacacaaaacctccttcctttcagggtcaagggtttgttgattccgctactctgatgtggaattcaaagagatggataattatcatcctttctaagtgctgttttccataatcaggtccccgtgcttatccacatccacactccccttctctcacaaagtcctacttgtctcctgggagcccctgcacgcctcccctctctgaatctctgcgaattttcacttataaaacagtaacaactctctcaaggtcatcaaaaatggcagaacagtgttcccccatctctgaaaaatatgaatgtgagaaacggtttcatactgctgagagaatttataagacttaagcagaagaatcttcagatcccccatcccccagagatttttgcaaatgagccagcccagccacaaaaatgtatgcaaacttgaagataaaatggaattaaaatatgttttaaagagaagcaggctttggaaaaatgaggattttaataaaaacagaaattacgacaatatttctaccacaaaaaaaaaaaaaaaaaa

SEQ ID NO: 320 - DNA, 1768 bp, Homo sapiens
cgcggtcccaacccttccccatggccgaccctgaggagttgcaggtttcttcgccgcccccgccgcctccctcttctccctcctcttcagacgcctctgcagcatcttccccgggcggcccagtgagtttgggctggccagttccgagcaggagcagcggcccaacggtggaccagctggaggaagtggagctgcagatcggagacgcagccttttcattaaccaaacttcttgaagccacatctgcagtatcagctcaagtggaagaacttgccttcaaatgtacagaaaatgcacgtttccttaaaacgtggcgggacctcttgaaagaaggctatgattctttgaaacctgatgactgatttggcatacttcgttgtttaataatgactgcaataattcatacttcttatgtcatattttgtacatgtaccacacatataggatgacctctgtccagcagttctgtatatactcagaatgaaatttttcttggttttcttggtttttgtgaaagcagaataccgatgctatttttgttgcggaccagtacttgtttgtccttaaatactttatgcctctgaactttcatagaatcctttatgaaagttaacttcatcaatagacggttaatattaatagagccacagtgctaccagtagcaaactaggtagaccattatttgttttgcaacaagatgctaagcatggcagactttgaagttgcgtttcatcttaaggaccaagggaggtaactttaaggttgccagtggtggatccagctccgttaggctaagttgtctacagctaatgattgtgtctttattctatatccccagcacctaaaacagggtcacacaacattcactaaatgtttgttgaataaaagagttaacaaacataattgaaagctttttttcttcctatatttagcatgaagactgtcattgtttctctaggaaatgtatgaatctgaacttttttgacttgaagaaaaacattctttttttacagagatttggactttgatgataggttttaaaaatatatgataaatattttttgtacttgtttgatttttttttaaagactttacttcagaaagggaaagactgtttagaaagaatgcatattttttccctatttatttctgtggttactgcttttgcagtttaacagtgtttgtatttgatatttgtatatgtttgattgctatctttaaagtgccttatcagatttatggctctgtgctattactttttgagctttgcaagttgtgtacataataattctaaagaagttactttgtttgcaatgcatcaaatttaaatgatgtgattttttttgtattatttgatcttagtgacagtgttctattttgcatcctgtatcttatgttgcttttggtgttttgtgttgtgtgtcaacgattaagccaactaattctctaccatatataacttctggacatttttgatacaacatcttaattctttgtagatatggagataggtacagaactatattctaatgccccacaatggggctatgagaggggacagatggatgggcaaagaatagttttgtttaacatattaggtcatagttcttgattagtttttttagttaaagataaacacatagggtgtgatttctataccaaagatatgcttatttcagtattagaaaaatattcttcttacatctcctgaaaattgcaatttttaaaatgtgtaaaaataaattattattaaaagcaaaaaaaaaaa

SEQ ID NO: 321 - DNA, 1131 bp, Homo sapiens
gcaggatcacagctcacggcagcctcaacctccctggctcaagcgatccctcccctcagcctcctgagtagctgagactacaggtgagtgccaccacactcagctaatttttaaattttttgtagacagggtctccctatgttgcccaggctggtcttgaactcctagactcaagtgatcctcctgtcttggcctcccaaagtgctgagattacaggtgtgagccactgtgcccagcagtttcccagaatatatttaaatgcaaagttacatgaggggaaaacatgtatgtttgctcctgttgttactgggtaggttctgaacagcagaaacccatgtgcagggtgggctggtgaaggcccctctccgcaaggtggtagcaggaaaaggtccttgacttgatgaatttggtctgcctctgagccactggaggaagctgttttgagccagggttttttggcctaaagccagcatttcctcagtctccctttgtggttcgaaggatatggactattgcaatacatttcttccttcaaatcctgccactgttttgttggcccacaactaataggacctcaaaataagccatgctgctttgcacacacactagccttcttttgtacttttcattctggatgggcttggccaaaacaggctcaggccaaagacctcccaagctgtatgtacttccagtatcctgaaacagtgtttggtgacataatgccaagggtaaacaagcctgatttaggcactgctttatccaggggcttcacccatgaaattaataaaacttatctgagtcacttgaaacttggttcccagaaaacacatttctggtttataatctccttttatgctcacctgacattaattatctatccttgatgatgtgtttaaactgagtagcagaaaacagaggccacactttctgggaaattttaaaggaagaaaccatttttaatgagatgaaaatatttaacgaatttaaaaagctaatgacaattttgagaaaaggtttgggatgtatattgctatgtaatttaataaactgattttatggatataaaaaaaaaaaaaaaaaaaaaaaaaaaaaaaaaaaaaaaaaaaaaaaaaaaaaaaaaaaaaaaggtgc

SEQ ID NO: 322 - DNA, 1092 bp, Homo sapiens
ggcacgaggccgctttccccaccattgtctctttagggcctggtgtctgcccccgccctgggtgcacccatttactagcacggggccacctggttggtggggggcagaaacaaggcatggaaaaacatgacacaaatcacgtctggtaccatgctgaacctgtccatccaaaatgcctcaggcttctactcacattaaagctccccctcctcccagcccagagcctggcaattaaagtgaacatcacgtacgaagaaacatgcacgtgcgggcagctgataaatcaggaccggctctgccaattaactggtcttacatcttctgctgagagttcagaatatgtccgtgtcagccaagccccagcccaggccacagcatgtggctcgggttcacgagaaggaggggatactgctccttggggacctaagcaaatacaagaagccatcttaacttgctaatgattactaagtgctccaaagctaagaggcagaaagagcagaccagaggagagggaagagaagagggaggaggagtgaggatggcacccgaatctggaaccctttagtgagtaaaatcagtcaggtacacttggctcttgcagaccctttgtgtgtaaataaatctggatgtgggcaggcgccaagtatgatctgaaacaggcccaatcccaccctgcgagggaggtgtatgcaccctgatccctggccgcagagcgcaggggctggcggggagagtggcactgcgtgcgccgtagccggcctgcaggaggattgccttacacagctctgaactttgcgtcttttaaaataccaaggggcagtcgtttacacgtgaggctgactgcccagaatgggagattcaccttgactatatggaggtgattctgctagttttccgaggcaaggggaacccaaaatgacagtttaaagcacaaacatggccatttgtcacagcttcgggaagaaatggggaaaggtgctgagagaaaatccgtttcttacaggagacaaacaccgtttggggatgccaagcatggtttcccaggggcttcccctttctagaagagttcaccttgtacctaaaaaaaaaaaa

SEQ ID NO: 323 - DNA, 2101 bp, Homo sapiens
agccggcctcgcacttccggtggggagattccggcctggagctcccagggccgagcagaccttgggacctgtgagcgctgcatccaattaaccatgggaagggtcagcaccagccaccagccccttaggtgaggactctgcctggggctctgctgatggttccgaatcatggagctgcagagagctcctccagcctggagacgttcttggtgaaagctgtggtctaactccaccggctcttcctgcacattgtattcaagaggggtgcctgcccccgctgactcaggagctccggtgctgcagccgccacgaatggggaggtgggccctcgatgtggcctttttgtggaaggcggtgttgaccctggggctggtgcttctctactactgcttctccatcggcatcaccttctacaacaagtggctgacaaagagcttccatttccccctcttcatgacgatgctgcacctggccgtgatcttcctcttctccgccctgtccagggcgctggttcagtgctccagccacagggcccgtgtggtgctgagctgggccgactacctcagaagagtggctcccacagctctggcgacggcgcttgacgtgggcttgtccaactggagcttcctgtatgtcaccgtctcgctgtacacaatgaccaaatcctcagctgtcctcttcatcttgatcttctctctgatcttcaagctggaggagctgcgcgcggcactggtcctggtggtcctcctcatcgccgggggtctcttcatgttcacctacaagtccacacagttcaacgtggagggcttcgcttggtgctgggggcctcgttcatcggtggcattcgctggaccctcacccagatgctcctgcagaaggctgaactcggcctccagaatcccatcgacaccatgttccacctgcagccactcatgttcctggggctcttccctctctttgctgtatttgaaggtctccatttgtccacatctgagaaaatcttccgtttccaggacacagggctgctcctgcgggtacttgggagcctcttccttggcgggattctcgcctttggtttgggcttctctgagttcctcctggtctccagaacctccagcctcactctctccattgccggcatttttaaggaagtctgcactttgctgttggcagctcatctgctgggcgatcagatcagcctcctgaactggctgggcttcgcctctgcctctcgggaatatccctccacgttgccctcaaagccctgcattccagargtgatggtggccccaaggccttgaaggggctgggctccagccccgacctggagctgctgctccggagcagccagcgggaggaaggtgacaatgaggaggaggagtactttgtggcccaggggcagcagtgaccagccagggcaaatggcttagaagcaggccactccccagcctgctgccagcactcactgtgctcaagccgccagggctcatcatggtagctgggagctgtggacgggagtcaccaggtggtggggccaagccagggactcatgacttttgcccctcccttcagagcctggtcacacaaggggcgagcaccaggccagcctgggactggccagagctgggcccaagctgcgctggaatcgcagcaggagaggggagtgggctggttcttcccaccacttcccaggctctgacagccgagactcatttccaaggcacagcagctttctaaagggactgagtttggactgggttttggacctccaggggctggagcttcatcacctgggcagtgtcttttctcagagagcaggtttctttatagtttggaaataaatggttcacggtccactggccgccttgtgttgctggagacgtgggggcagggaggggacagtgtgggcctggcctctcctttcctttccctgcctggagccttcttcaaatgtctggtcttaagccaggcctccttcattttctcgctcctgttagaacaccagtcccctycccagtggggccccactgcacctgctggcaggaaataaatgaatgtttactgagwaaaaaaaaaaaaaaaaaaaaaaaaaaaaaaaaaa

SEQ ID NO: 324 - DNA, 1444 bp, Homo sapiens
  misc_feature (444)..(444): n equals a,t,g, or c
  misc_feature (739)..(739): n equals a,t,g, or c
  misc_feature (758)..(758): n equals a,t,g, or c
  misc_feature (949)..(949): n equals a,t,g, or c
  misc_feature (959)..(959): n equals a,t,g, or c
ggcacgaggtggcttggagccagcccaccctcttatgaagtaccagtttcctcatcttcaagacagaaacagtaataggacttagcccatgaggttgctgttgattcggtgaaatgatattcataaaggtctgagcacagtggctgggacataagcactcaaacatcagctgctatcactatcgtgtccttccagtaccttttgaaaccttgtgctgatgaattcagaaagcagccctaaggctccctttccctgtgctgctctagccagtcccctcccaggcaggcaaggaagcttctccaccaatgagcctctttatgcactcatggttccatgtccaggcaggcttgggcagctggagtacagagaagcgtarggtgccttcacatacctgggatgcaaaccctgggggccagcatctcgggccgcagtggagagctgcangggccgaccctgtgactgykcacagygtwkatggggttccgcaggatggagctcacagtggtgctgggggtcaaactccggggaacagtgcctagaaatgggcttggtgagaaaagacgccccaaaggacccagccagcccaggactwacacaagcctttcccctgtatcccaggacscasccgcagtcttttgggaaaaggacttgggagatgagttttaaccaccaattcacaatgtggctgtggctcctggcctgtctccatttgtaaaaaggggggaagtctctttcatgnttcctatttcccaggttgntatggggagaaagcatgttgacaagctaagacatgtcatggatataagacaaaccatcccagacaggacagcatttcccarttctctggacctcagggctgaaaacacatggcagctctctgaaatgctgcctcccctctccctggagaytaggcatcccgaktttacaccgaccttcagcccccagcccntggctggctnactcacccacagacggcctgctagggtatagcggggggttgctgtgccggctggaatgcccaggcgagtaaggtgcccactcctggagctccggggagagttctccactggccgggacacacttctgttcctgcagatgcaagggcaagagtgtctgctagaaagagtggagtgtggccaggcgcagtggctcacacctataatcccagcactctgggaggccgaggcgggcagatcacctaaggtcaggagttcaagaccaccctggccaacatggcgaaatcccgtctctaccaaaaatacaaaaattagctgggcatggtagtgggtgcctgtaatcccagctacttgggaggctgaggcaggagaatcgcttgaactcgggaggcagaagttgcagtgagccaagactgcaccactgtactccagcctgggtgacagagtgagactccatcttagggaaaaaaaaaaaaaaaaaactcgag

SEQ ID NO: 325 - DNA, 1374 bp, Homo sapiens
aggaattcggcacgagtgtggtcgatttgcttcaggaattaacagatatagacaccctccatgagagtgaagagggagcagaagtgctcatcgatgctctggtggatgggcaggtggtagcactgctggtacagaatctggagcgcctggatgagtctgtgaaagaggaggcagatggcgtccacaacactctggctattgtggaaaacatggctgagttccggcctgagatgtgtacagagggtgcccagcagggtcttctacagtggctgttgaagaggctgaaggcaaagatgccttttgatgccaacaaactgtattgcagtgaagtgctggccatattgctccaggacaatgatgaaaacagggaattgcttggggagctggatggaatcgatgtgcttcttcagcagttatccgtgtttaaaagacacaatcccagcacggctgaggagcaggagatgatggagaatctgtttgattccctctgctcctgtctaatgcttagttccaatcgtgagcgcttcctgaagggcgagggtcttcagctgatgaatctcatgctcagggaaaagaagatctcccggagcagtgccctgaaagtgctggaccatgccatgattggccccgaaggcacagacaactgccataagtttgttgacattcttggcttacgaaccatctttcccctctttatgaaatctcccaggaagatcaagaaagtgggaaccactgagaaggaacatgaagagcatgtctgttcgatcctggcttccctcctgcggaacctgagagggcagcagcggacccggcttctgaataaattcactgaaaatgacagtgagaaggttgacagactaatggagttgcattttaaatatctgggtgcaatgcaggtggcggacaagaagattgaaggggaaaaacacgacatggtccggcgaggagagatcatcgacaatgacaccgaggaggagttctacctccggcgcctggatgcggggctctttgttctccagcacatctgctacatcatggccgagatctgcaatgccaatgtcccccagattcgccagagggttcaccagatcctaaacatgcgaggaagctccatcaaaattgtcaggcatatcatcaaggagtatgcagagaacatcggggacggccggagcccggagttccgggagaacgagcaaaagcgcatcctgggcttgctggagaacttctagaggcaccttggccctgcgcatcatggactctctcagcttccctcccaggatcagtttctacacaactctgtgtggcttttggacaaattaaagctagttttggtaaaaaaaaaaaaaaaaaaaaaaaaaaaaaaaaaaaaaaaaa

SEQ ID NO: 326 - DNA, 1318 bp, Homo sapiens
  misc_feature (557)..(557): n equals a,t,g, or c
ggcacgagaattaattgccagccttggttcacactgatgagtgtgctcattggagagactcagcatgcaaaagaaaagactcatcaatttgcagttatttaatttcacgaactgccggatggtggagtcagtagcagcggctgggccgcaacatggcgcctcccacctagacttccggtcaggaaacttccaccttcctccgatttacgtgggcctgcatgagcctacttctcttcttattctagtgccagtggcctctgggagtcttggtccttcttactggaatagccctcctctcctgttacagaggcaataattctccagccttccggtcgccgccaaagcctcctgcctaatcacttcctgtattgtctccctgcggctctttgcacagaccttgggctccgtcgtctctggattcttactgatctcttcctcttctcccaaccgccttgtcatgtctctttgagctatgtcaggaggaacggaagggcactttcttactacttttgttagccaaacggacaaactgtcccctcccctttgttgtaaccacncattcaaggcttccttcagtccagccccatctcccttttcgttgcctccctttcactactccaaatgagcttgccatactttaaacgggtcttgtactttcttatcccttctctggaatgtcatttctactgaagaaaatcctactcttccctcaagacccttctttaatcccctcttgccatggaaacttgagattttcattgaggagctaagttggaaaatataaactagagctgagtctctaccctggcactattgacatttggggccagattattcttggttggggagactgttctgtgcactgtaggatgtggaacagcctcccaggcctctacctgccaaaagcacactcccctttccccaagtggtgacaaccaactgtttccagacattgccagatgtcctgaggtgggagtgagggtgaacagaattgcctcccagctgggggctgctggactaatcaacaagaagtggcaaggactgcaggcaaattgcctcagcacttagatttagcactgcaaggccacttcgacaggtggtagtgatttgtgcgtctcatttcctattcttgattgtgacaaggttctggaggatggagacagctacccctgccacagttcccacaggctatgttgtacatagggcttcatatttaacatgtgagtgaatgaaacacatgagcccgagtgctcttcaggacggcaaggcctacatcaagatggtaaaccttcagttcttaaaaaaaaaaaaaaaaaaa

SEQ ID NO: 327 - DNA, 1260 bp, Homo sapiens
  misc_feature (1203)..(1203): n equals a,t,g, or c
  misc_feature (1235)..(1235): n equals a,t,g, or c
  misc_feature (1241)..(1241): n equals a,t,g, or c
  misc_feature (1246)..(1246): n equals a,t,g, or c
ggcacgaggggaagatggggcaaggaggggtgggaaaataggtaattcatggctgcttctctaagatgtgcctgcctagccccagtaaacctacctccctccatccctgccaggccatggtggcgtgttacccaggcaacgggctcgggtacgtaaggcacgttgacaatccccacggcgatgggcgctgcatcacctgtatctattacctgaatcagaactgggacgttaaggtgcatggcggcctgctgcagatcttccctgagggccggcccgtggtagccaacatcgagccactctttgaccggttgctcattttctggtctgaccggcggaacccccacgaggtgaagccagcctatgccaccaggtacgccatcactgtctggtattttgatgccaaggagcgggcagcagccaaagacaagtatcagctagcatcaggacagaaaggtgtccaagtacctgtatcacagccgcctacgcccacctagtggccagtcccagagccgcatggcagacagcttaaatgacttcaggagagccctgggcctgtgctggctgctccttccctgccaccgctgctgcttctgactttgcctctgtcctgcctggtgtggagggctctgtctgttgctgaggaccaaggaggagaagagacctttgctgccccatcatgggggctggggttgtcacctggacagggggcagccgtggaggccaccgttaccaactgaagctgggggcctgggtcctaccctgtctggtcatgaccccattaggtatggagagctgggaggaggcattgtcacttcccaccaggatgcaggacttggggttgaggtgagtcatggcctcttgctggcaatggggtgggaggagtacccccaagtcctctcactcctccagcctggaatgtgaagtgactccccaacccctttggccatggcaggcaccttttggactgggctgccactgcttgggcagagtaaaaggtgccaggaggagcatgggtgtggaagtcctgtcagccaagaaataaaagtttacctcagagctgcamaaaaaaaaaaaaaaaaaaaaaaaaaaaaaaaaaaaaaaagggcggccgctcttagaggatccctcgagggggcccaagctttacgcgtggcatgcgacgttcatagctcttcttcccttaaagttgaattcgttatttanaaagcttaggcattgggccgtcctttttttanaacgtncgtgnactgggggaaattt

SEQ ID NO: 328 - DNA, 1915 bp, Homo sapiens
  misc_feature (490)..(490): n equals a,t,g, or c
  misc_feature (1899)..(1899): n equals a,t,g, or c
ggcgaagaggggcgsaackcrttgcgttttgagtctcgggacccctgttggagagactatggcgctcaacaagaatcactcggagggcggcggagtgatcgtcaataacaccgagagcatcctaatgtcctatgatcacgtggaactcacattcaatgacatgaagaacgtgccagaagccttcaaagggaccaagaaaggcactgtctaccttaccccttaccgggtcatctttctgtccaagggcaaggatgccatgcagtccttcatgatgccattttatctcatgaaagactgtgagatcaagcagcccgtatttggtgcaaactacatcaagggaacagtgaaggcggaagcgggaggtggctgggaaggctctgcttcctacaagttgactttcacggcagggggcgccattgagttcggacagcggatgctccaggtggcatctcaagcctccagaggtgaagtccccagtggagcctatggntactcttacatgcccagcgggscytatgtctatcccccgccagtcgccaatggaatgtacccctgccctcctggctacccctatccaccgcccccacctgagttctatccaggaccccccatgatggacggggccatgggatacgtgcagcccccaccaccgccctaccctgggcccatggaacctccggtcagcggccccgatgtcccctccactcctgcagccgaagccaaggccgcagaagcagccgccagcgcctattacaacccaggcaatcctcacaacgtctacatgcccacgagccagccgccgccacctccctactacccaccggaagataagaagacccagtaggccctcctgcctccctgcctcccaccctcatctctctaccctacccctcccatcggggctgtgctggggcttggggaggggagggggcgccttgttctccctccaggtctgatcataaacaattaccaggaactagcattgtgggacattagggcccccggcctcgggagaggtgccgcccagcttcccatgccagcccggagcccacagtgctgcccagcgtacctccctcaccgtctggggctcttctgggagcacggagcatcccctgttcctgtttcactctcagcttctcccctcgaagggactctctggccacctcctccaccgcagtccagctccctcagtctggcacccactgctacactcagcctcatgagccacttcagaccagccaggtgtcttcccgggccctgccagaccctgctcacattccctctgctggtctgtgctggtctcagaaggccaccgcgcccgcattccactcagccagggtccagctgcagcccccgccacccttccttcccttccctgtcctgggtcatgttgttgccaccctgtgtgacttttgaagctgtaaaatgagcttccagggcttgggtggcgtcggggcagggccgccgaggctgggaggaagcccttctgccttttgctggtgtttctggaatttgctttccctcacctctcacttccttctagaaggagcttcctgactggaaccagagaatgcatgtctgtccacttggtggctgctgggtggggccgggaacaagggcccctgaccctgtgtgctggccgggacctgccaccagccccccagcctgcttcttccccttaagctttgtgcccctggatgcgctaacattcactcttgtttgtccctggactggccatgaagtgaggagatggttatttaaagagaattccctatttatttgacaaaaaatccagttaatatattaatgtgaaataaaccctgtttgcacctcgatttgtttgctgaaaatgtgaaatagtaaaaatgaaataactggaaaaaaaaaaaaaaaaaaacncaagggggggcccggt

SEQ ID NO: 329 - DNA, 1070 bp, Homo sapiens
ggcacgagcagtgacgagggaaacctctcgctgagggttggggcaaagtcacccctggaaatcgaaggggccgctggtggtctcttgaggtccaccagcctcaaatgcatctcttcagacggtgttgggggcacaaccctactccccgaaaagtcgaaaacccgattcagttcctgcgagtccctcttagaatccagaccgagcatggggagaaaactgagctctccgaccacacccagggacatgctgttgtcgcccacactgcgtcctcggaggcggtgtctggagtcctctgtggacgatgcgggctgtccagaccttggaaaggagccgcttgttttccagaaccgccagtttgcccacctgatggaggaacctctaggcagtgacccattcagctggaaactcccaagcctcgactacgaacgcaagaccaaagtggacttcgatgacttcctcccagctatccggaagccccagacacctacctccttggctggatcagccaaaggtgggcaagacggttcacagcgttcaagcatccactttgaaacggaagargctaaccgttcctttctctcggggatcaagaccattttgaagaagagcccggagcccaaggaggatcccgctcacctgtctgactcgtcctcatcctccggctccatcgtgtccttcaaaagtgctgacagcatcaaaagtcgaccaggaatcccacgacttgcgggtgacggtggcgagcgaacgtcccccgagcggagagagccagggacggggaggaaagacgacgatgttgcgagcataatgaagaaatacctccagaagtaggaaccagttcagcctccttgaagctgcccttgaagacttcccgactctacaataacttggagacagagagactggccaggcctccccggtggccakagccagccagcatggccaccctcaagaggcgagatgagcccacagaggcatatcctgcggggatgctgggctcccagtgtggttggcctgaacaaaataaagtgttgactcctgggaaaaaaaaaaaaaaaaaaaaaaaactcgta

SEQ ID NO: 330 - DNA, 1159 bp, Homo sapiens
  misc_feature (584)..(584): n equals a,t,g, or c
ggtgctggccgctctagaactagtggatcccccgggctgcaggaattcggcacgagctgaagccggggacccggggggctgaggaatgctgaggcaaagtctgagcggctgcccatgccctgccctcccgtcctgcctgctgcccctatgtcagtgccctcctgggttaggagacccggaccggagacaagccaggccctgcagaccccagagcggctgggaacagtgtctggaatggggccttttgcactcgcccggccaagcctctccaaaatggattccactggtgtgggctgggacctggagcaaggtgccgccggacgcccccacagggttcccatgtttcaggctcctgccctggcctttctttctggactgcagctcagctttgttgcctgttcaatctactgatttgtttctctggaatttggggtccaaggccctgactatgaccaggatgccccagtcccttgctctaacccggctacagaagtgaaccacaggsccacaagaaccacagacagggacccttcamccccacggttagcccaggggctctagagctcactagcccaatagagggnctagacaagattcttttccaaatatcaaaactcctggcagttcctcagggacaggctctgagcagcagtgaatcagatgggggaatttggggggctcacaaagggacaggtacaaacaattcgcctgggggtcagaggaggcaattctcagctgagcccaggcctgagacccttggtgtcttaactccaccactcaaggcttttcgtgatctgacttctctcttcctcccatcttctcactgctccctgaacaagcaaaacacattcctgtctccaagctttgccctgtgttctccagcaccctccctgcttctgtctgcctatcaaacaccccacttttaaagtccccgttcaaaaaatctcctacccacgtggtttcctcattctcttccaccaacctctgtcttgccactttcaggcagggctgaagtcttccttttcacaaaacaattattaaaccatcttaagtctactgaacgttgcccctgctctagtgtctagcaccagaccagtaggtgcttaataaatgttaatggattcaatttaaaaaaaaaaaaaaaaaactcgtagggggg

SEQ ID NO: 331 - DNA, 1006 bp, Homo sapiens
ggcacgaggcgatctgtccacctcggcctccaaaatgctggggttacaggcatgagccactgtgcctggcctttgtatttttgtcatacattttatttcccagtattatagactccagaatatgttgttgttattgttttaaaagtcagttatcttcttagttttctttcagaaaaattaaatggtgagtttttttgtttgtttgtttgtttgttttgcatggcccatgtatttaccattcctggtgctcttccttcttttgtgtggattcagttttccatctagtatcattttcgttctggtaaaagcatgtttgacatttcctgtagtatgcttgctggtgacacattcttcctcagcttttgtctgaaatgcctttatttcaccatcatttttgaaggatgtttttgctgggtatagaattctaggttggtagtttttgttatttttcagcatttttaaggtgacatttggcttgtacatgttgttcttgagaattctgcagttattctttgttccactgtatgtaataatatatgtttttctcctttctctgattttaaggtttttctctttgttgctgatattctgaaactgactatgatgtgtctttgtgtggttttctttgtggtttttttcctgtggaatttattcaacttctgggatctgtaggttatagttttcacaaattggaaatttttgacattacttcttcagacactttttctgtcttcccctccatcattctgggatttgaattacatgtatacagtaactgttgttgtttcataggtgactaactgggtaggggaatgtctggttcccttactatccggtgaagtagcagaaccaccttttgtaggaatcagttatcaggccctttactttcccttgaactctaggctagttccagaacctttggtggactggaaagaggaaatagttatgccacaatttttagtacatgcaaatgtacatgtaatgtttaaaaaaaaaaaaaaaaaaa

SEQ ID NO: 332 - DNA, 1160 bp, Homo sapiens
ggttgggtcaaggtaactctgggctacagagtccttgctgggggttcggggagcgcttggaccccggcttctgggacgcgtcaggagaagggagcactggctttgctttcatcaggccaaagatgcctttytttgggaatacgttcagtccgaagaagacacctcctcggaagtcggcatctctctccaacctgcattctttggatcgatcaacccgggaggtggagctgggcttggaatacggatccccgactatgaacctggcagggcaaagcctgaagtttgaaaatggccagtggatagcagagacaggggttagtggcggtgtggaccggagggaggttcagcgccttcgcaggcggaaccagcagttggaggaagagaacaatctcttgcggctgaaagtggacatcttattagacatgctttcagagtccactgctgaatcccacttaatggagaaggaactggatgaactgaggatcagccggaagagaaaatgaagaccccagagacatttattggggagtaggatgtggctgagtgctttttttttggccagactagcggattcagtcctggaagagagtatcatataatgagacccacaggcactggcacccttgggttggcaatagaaggtgacatggaatggagaaaaccaagattccagatggggatagtaactagaaggtgcttcagatgcactgcctgcgggtgccagtctgaaaaccagaccgcacagaggcctggggctgctgatgagctttttggtgctctccacacacaagctcgcaaacacacatgtcccagaatagctctgttgggttgtgttgggagaagcggctggagttcattctctcacccccttatgttggtgtttggcgtgtgacagcagttctacagagctctgtgttggggtcatggatgagcggctctcttggctcttaaaggcaggcctctctcttcttgcctttaaagaatcctccttcctcacacctggcctcctctggcttcagcttctcagcagcaagcaccagccttccacaacaacactatatttttatgctactttcctgtttgcactactacttttttattaaacgatgttaaataaaaaaaaaaaaaaaaaaaaaaaaaaaaaaaaaaaaaaaaaaaaa

SEQ ID NO: 333 - DNA, 1258 bp, Homo sapiens
  misc_feature (161)..(161): n equals a,t,g, or c
  misc_feature (245)..(245): n equals a,t,g, or c
  misc_feature (364)..(364): n equals a,t,g, or c
  misc_feature (408)..(408): n equals a,t,g, or c
  misc_feature (440)..(440): n equals a,t,g, or c
  misc_feature (1210)..(1210): n equals a,t,g, or c
gttctgggaaggggtgtgatgcattaaggagatggtgtctgcatggtgccaccgcaggscatggccagctggatctgtgtcttctgcaccagcccatctggatgcagtgcaacctgtctggtctgctatcctgcgttcccctaactggcaccctcctgggnccagccagcagcaggacatagaccaaggccaacctcctccacacccagggcctctgccttctaccctctgtggagtctccattnaacttgggcattgacagggctgcttgactcaaaacaaccccagccctgccctgaagccatctcgccagtcagtcagagctcaagaytytctctttctctggagaagagcaggaaagtantcccagctaaccctcatgcagccaccactctgtgtcagaatctnttctaggccattgcattgaataagtcatttantccatataaacctgcaaggagtaggtgatattgttaaccccattttataggcgagaaactgaggcatggtgagttaagtgaccagcaagtggaaatctgaggtttgacccatctcctggtgtggagtccagttctctcagcttcactgatccttcctgatttgtgctgagttaggaccccttgggaacccccatgggcagggggtgctggtgctagcatttcctgtggattatgggagggggatgtgtggaggacctgtgtctactgttcctctagcctctgggggatttggagaacccactctgcccagagatgtaagtcatcttkggawatagatgagacttkttccccctccccctkaatcccrgggcacagctctatggaataagctctagctggaacttgtaaagtttggcccasccctccctgggaggctaggagktgggraagagccaggagactcraagtggtggtggtagttaatgtctatgtggttagacgttaaccagttactctgtggtgccaggcactgtcctaggcacgctatagttatcattgtctcctttggtgcccccagacagcccagggtcaagacaggtagcctcagtttacagatgcagcagtggaggcttgcacaatgagtaggtggctttgttcaaatcacagacctaggccaggtataaaagcctaagtgtggtgtaattccagcactttgggaggccaaggcggggagattgcttgagtccaggagtttgacaccagcctgggcnacatagtgagaccctgtctctacaaaaaaaaaaaaaaaaaaactcgag

SEQ ID NO: 334 - DNA, 1200 bp, Homo sapiens
ggcacgagaaaaaatgtaagctgaaatgatgacgtgttcttttagaaggtttatcatagcaactactataggcagtgattctaagaagatgctattctttttttccattgctttgtctagttttttttttttaaatctgtttttgtgcctttgtaattctagggttattggtatagttctcaccatatcttgaatacagatgctttttcctttggaaataatttctcataaagcacattgcttatagctgcttcccttttcccagagtagtaaaagttgtgatacaagacagtgatatcagctgggcgtggtggcacacgcctgtaatcccagcacgttgggaggccaaggcaggcagatcacttgaggccaggagttcgagaccagcctggccaacatggtgaatccccgtctctactaaaaatacacacaaaaaattagctgggtgtggtggtttgtgcctgtagtcccagctactcgggaggctgaggcacgagaattgcttgaaccagggaggtggaggttgcagtaagctgagattgcaccactacactccagcctgggtgacagaacgagactctgtctcagaaaaaaaaaaaaagagacaatgatatgaaaaggtcttacatgaatgagttttacgcatgattcaatctgtaagtcctataaattatttttgatggatggtatctattttcttcctattagtagttttgggcaaaaataaatttaactgaatgtaaaaatattcagctctatggggagctgagaagaactaaatattttcagacacttgttatgtgcaggttgtttggcatatatttttaaaaatctttataataccattttgaattaaattctatccccatttaacaaatgaggaggtggtttctattcttaagtaactttcccaaaatcactcaattaagtggcaagggtgggatttaaatcgaagcctatactctttcacttgtttccaaagatgccaaactcaaaatgtggctaaacagtaaatcttgagcaaagaaatgatttactaggaagcagcacaatagaacatactggatgtaggaaatgttatatatcttgatctcattggtggtaacacaagtatatacatatgaaaaagttagttttatccttactgttagtactcagtgctcttattattcctcaaaaatgaaaaaaaaaaaaaaaaaa

SEQ ID NO: 335 - DNA, 1652 bp, Homo sapiens
aaaaaaagaaaatacagtaagtagccacataaaccgcttctagctgggtccactggtccccctgcttcttgtttattaacggaatctgttcaggggctctagggctcagagctttaggggagtctgagcccttctccagccctggggtgatgggtcttgattgatccaggtcaaattctccacagatttaattctggccaatgaatatgagaagaaatgagaaggtggaaaggtgtcttagtctactttttgctgctataataaaaataccaatacatggggtaaattataatgaagagaaatttatctcatggagttctggaggctggggagtcccaaaatcaaggtgttggcatctggtgaggagcttcttgctgtccaccccatggtggagggtggaagggcagaaagagagagagggctggaggccaataggtggctgaactcatttttttatgaggaacccactcccataataacagcattaatccactcatgagagcagagcccccatgacccaaccatttcccattaggtcctacctccccacacccactgcactggggatcaagtttccaacacatggaactttgggagacacattcacgacatagcagaggaccactggagaaaggaaggtttttaaagattttttttaggacactatggaagtgatagccattggacatggatggtgtttttgtttttggcatgggaaaaggcttatacaactctggtcaacttggcaacactaatcaaaagtcaaaatctcctttgaccctagggatcccctactattaacagtattatatcttatagaacctaggtatttaggaaagaaaaaaatgttcaaagatgtattgacatttaataaaagcaaataactggacataacccagctatccaaatacaggctatcaggaaacactgtgaaggactttgaaataggtcttgcccactgcccccacccctgcctccaattactgagtgttctgtctaatctagcccaccyttctgagttgattccctttcatttcactgcctttgagctactttacaattacgtaaattaagggaaactgataatgcagatgattctkgttcatagaaatgcaaattgtgaccaatggaatataactgattattgttctgcaggtatcagccaattttgccagttttgtaactacgaagcaaactcatttcagcattcctgctaggcttataattatttgttctttggattctcctttgagccaattaaagtgtcctactggttctctcaataattaacaagttaaatacaatcatctttaacatgttacttttatatttgtatgagtcataattttaacttctaaaaaaattatcctttaacaaggtagttaagtaaatttaatgttcatgtggtataatttacttagcagccctcttaaaacagttataaaaaccatatggcaacagggacaaatactcctgataaaaatggcaagtggggaaaaaagcagaaatgcaaaatttgtactacgttgtgattaaagctaaacgttgtaagtgcttagggcaagaaataggaaggagaaaaaaaattgaagttggatttgtttgttagggtggtaggatcctggattaaaaaaaaaaaaaaaaaactcgag

SEQ ID NO: 336 - DNA, 1981 bp, Homo sapiens
ggcacgagtcacccaacaatgtttttttcatgttgatcactttactaaagcgaacaattggggttttaccaaaattgtgaaggattttattcttccatacttatgtctgtgttcagggtcatacagattctactttttccttttagtttaaggtattctcttggagatttaatgtacttaaatttgaccacaatttattgagagcatattctgtgtcagacattgcactctgcactagatattcaggaatttctaaaaagaatgttaacattgctgttacatagtcagttactgatcacattcttttcctctcaacttttttcaaaataggaatctgcggtatgttttcacgtatggagttcaggtcaggcttaggggtccctgacaatgtgaatagttttaagctgggcctcaattcgtggtacccttatactaatttaacaagccgtggactctaggttccaccaaaaatattttgttccatcctctctggtttcagtccatggtggtacagaaagaaaactaaggaacttcagccccaaattgtcaaattttgctacttaagaaacagaagatttaaatctatcattttgtcttatattccagagttgactggttcctcctgtctttaacttcttgtccttgaagggtattctaattttcattcagaaatatgacttctcatagggtttgtgttagatattttcagggccagatggatatgatgttcccatttctgttttattgttaaactactattccttttgagctgtaatgaacaattcattctgagaggcaatatatgttttccagtaattgacttgaataaaagtaaatgttaaacatggagttactaaagttaatacagtgggtattagtactaatttgttcaaattaagatagaattcttaatttgataaatagaattcttatattacagcatcagtccaattggattgatagtttgtaaaaggtaatttcttacatgaagaaagacaggttttctttctcttagcaaggtattaatgcaaaaatgaactcttcatttcctaccagcttccgaaggaaatgctggttaggagtaaattcaatttactctaccaaccaacttcacatctgttatgctgaagtcagagtttatctttcttgttatgtggaacctagaaatataccatgaggaatactgaaaataaactagcagaaattttgcgtgatgctgaggatttttagatggctgcaaaatgggtgaaagtaatataaacttaacaaagaatgttgtcacaactctctggaacttagtactgtttttcaactacaaatggaagatttgtgagactaggtcgacttaatgtgatttcaatgcagtaattactgtgtggcatgggcatggtaagagataggccttttctagaaatattctcatctctgttttttttagttgctcttacttagatttatattaactcagcttcacattttcatttctttttattttattttaaacaatgagaaaaatactccacgatgtcactgatttagttatcagatttgctttatttctgtatataataggtaatgtgagtacaggaaatatatctgaaaaggttacttgtacctaaattttaagttagatcatttaaaaattacttataagtctcttgagtgttttatatagtagggcagatggaaaaacttatttgatattcatttttggtacctcttaggaaaataattgggaatgtattcagttggaaaaaatgttgagaagagtgttttatataatgattatttagtaaaacattaaaaataatttcttattctggaggtttatagacatcaaaattgacaaagattacatggattatacatttgcattcaaggtacctttaagcgattttttaaaaaaaattctgactctaacaatgcatgctcattgtagagcgttaaaaatacaaaaacatgcaaaaaaaaaaaaaaaaaa

SEQ ID NO: 337 - DNA, 1594 bp, Homo sapiens
  misc_feature (1090)..(1090): n equals a,t,g, or c
actcgtgccgaattcggcacragggaaactttggaagttcattcttaaaaattttataagtaatatatgagtacgtttttatgggatattcaaaccacctactgtttttaggtcttactctcttrtgwtgcagctgttgctgatccctgtagagtaaagtacacactgaaggctatggcaatgatctaccgttccagcttcctctaggaagggagtttgacaaataaaatgctagtgaactggagcacagtgagcaagggggaggtggcatgagctgaggacacagtgggcaggccagaacacacaggcctggacatcacctcaggaacttgcatgttatttggagcataatggaaaaccattagaaagttttagggagtggttatgatttcatttatttatattttataaagatctttctggttattcggtgaatagttatggttaaaccagttcaacccagtgacagtacctgtcacatagagttattgtgaggattggttgagatgtatgtgatagattatctggcacaaagtaagggccccctcaatattgtttttctctcaagtgcacccaaattggggtattggaaacacttcctccgtagtttggtagaaggcaccaaatcactagggctgataccgtttgagtggggccccagctgatggggcagggggtaaaggggtgaggggcttaatatgaggcagaaggaagggccaggcctctagaactcatcccaagccggccccattctctggctccctgtacatcctgcctttccatagaggaagccagtcccaggggtggctgcatcttattccatgcttwacatctcatcagccttgctgactttccccagcctgctgtagatcagagtgaaatctgtttttcctgtctagagcaagcgcactttttcctgaggatttccaaatattttgaattcccatatgcagtggaagccgaagaagctggagggagagtggggttgggaggtgcagaggttccatgtcttcttgcctttatgaagcttctggcattgtgctgggtgcaggtgatccatggaataagatggatgtggttctagtgacgnttcacatcacgaaggaccatctgtgtcctcttagggagtctggctttcctgctaagggcaacaggaaggcattgtagggtctgtgccaggataccaagtgaaggaagagatttccttactgtggacttgcagacgataagtaaacttttgggtcataagagaccatctcttggaagctgaagaacttaggccaaggttttcctgagaaatctagttttgcagaatgttgtgaaccttgatgctctggtgacagtgaattaatggtttattttaggaagcactacacaattttacttaagagtgaggctagaaagttgagctgtttctcaccttttataaatgaagtttaagatcagattaatctccatggagtttttagctcaaagcacaattagttttctatagaaagggcttgggctgaaccaaattatgccattgatctgcctggtagacatacaaatcattctgttcttagaaaaaaaaaaaaaaaaaaaaaaactcgag

SEQ ID NO: 338 - DNA, 1640 bp, Homo sapiens
  misc_feature (1639)..(1639): n equals a,t,g, or c
ggcacgagctgacttacagctcttataaactagtggcaatttctgaacccagccggctccatctcagcttctggtttctaagtccatgtgccaaaggctgccaggaaggagacgccttcctgagtcctggatctttcttccttctggaaatctttgactgtgggtagttatttatttctgaataagagcgtccacgcatcatggacctcgcgggactgctgaagtctcagttcctgtgccacctggtcttctgctacgtctttattgcctcagggctaatcatcaacaccattcagctcttcactctcctcctctggcccattaacaagcagctcttccggaagatcaactgcagactgtcctattgcatctcaagccggctccaaggtcctggccaagaaagagctggcctatgtcccaattatcggctggatgtggtacttcaccgagatggtcttctgttcgcgcaagtgggagcaggatcgcaagacggttgccaccagtttgcagcacctccgggactaccccgagaagtattttttcctgattcactgtgagggcacacggttcacggagaagaagcatgagatcagcatgcaggtggcccgggccaaggggctgcctcgcctcaagcatcacctgttgccacgaaccaagggcttcgccatcaccgtgaggagcttgagaaatgtagtttcagctgtatatgactgtacactcaatttcagaaataatgaaaatccaacactgctgggagtcctaaacggaaagaaataccatgcagatttgtatgttaggaggatcccactggaagacatccctgaagacgatgacgagtgctcggcctggctgcacaagctctaccaggagaaggatgcctttcaggaggagtactacaggacgggcaccttcccagagacgcccatggtgcccccccggcggccctggaccctcgtgaactggctgttttgggcctcgctggtgctctaccctttcttccagttcctggtcagcatgatcaggagcgggtcttccctgacgctggccagcttcatcctcgtcttctttgtggcctccgtgggagttcgatggatgattggtgtgacggaaattgacaagggctcttcctacggcaactctgacagcaagcagaaactgaatgactgactcagggaggtgtcaccatccgaagggaaccttggggaactggtggcctctgcatatcctccttagtgggacacggtgacaaaggctgggtgagcccctgctgggcacggcggaagtcacgacctctccagccagggagtctggtctcaaggccggatggggaggaagatgttttgtaatctttttttccccatgtgctttagtgggctttggttttctttttgtgcgagtgtgtgtgagaatggctgtgtggtgagtgtgaactttgttctgtgatcatagaaagggtattttaggctgcaggggagggcagggctggggaccgaaggggacaagttcccctttcatcctttggtgctgagttttctgtaacccttggttgccagagataaagtgaaaagtgctttaggtgagatgactaaattatgcctccaagaaaaaaaaattaaagtgctaaaaaaaaaaaaaaaana

SEQ ID NO: 339 - DNA, 776 bp, Homo sapiens
  misc_feature (501)..(501): n equals a,t,g, or c
  misc_feature (763)..(763): n equals a,t,g, or c
  misc_feature (767)..(767): n equals a,t,g, or c
  misc_feature (772)..(772): n equals a,t,g, or c
gtcatgtttaagtggggataatgacattggcatacctgcttgctagagttaatgtgtgggtcatgagataacgaatataacaaatatttggaaaagtactatgtygaaatattttaaaataaamtttaaatccctcttmattyagaaaggatttgaggcagctaaatgcagaggtgtaagatggttttttggttaggattgtttctgagctgtgactctgtagtcactttcttactcagccctgccactcagctgtattcctctgtagctctgggcagacgactctgaacayggcttcatattggccttccatgagtgggtgaagggcatagtcatctggcagttttacctgctgttctatgcatgtctctccagcgcttgcttattttccccttctgcaaacattccattcatgccatgggcattcagtacagtcctgtaagcaagggtaggggcggcacaccaggtggatttaagcgcaaagacaggacgactgctttnccacaggcgcctttacagccagcagtgaacagttagacatattcaccttcctctaggtggaaaacagtcctcttctcagtagccctctcatgttcttgagacccatttgatataaataacartgttgcaggaaatttcctgaaggaactgaaatgaaccatagaaacgagatcgttcttttcctaccacacagctgggattagactgcttagtttgtacttgcagcacttttgcagtatgggccgtattaaaaaaaaaaaanaaanactcngaag

SEQ ID NO: 340 - DNA, 1860 bp, Homo sapiens
  misc_feature (821)..(821): n equals a,t,g, or c
ggcacgaggtcccccactaaaattaaaactaaactgctacttctgtccattctccctggccggtgttcttgctgctgtgtggcttctgttagaagttcggaaacgaatttttggagaggaaagtcagactaatccttcaagtcttttgagaaacaggtcttctgcattagctgaggggcaggagttctgggcttgccatgtggtgtctgagccatctctctctctctctctctctctctcatctctctttggccaggcgggcaggaagacctatgccatggtgtccagccactcagctggtcattctctggcttcagaactggtggagtcccatgatggacatgaggagatcattaaggtaagcttagttcacctccaacttttctccctgtcctcttcctccctgcacgtatatgagaaggagcagttgatgttgttgccaaagggagcttgtggtttgatggaaggaaccagacctgagctgctagttcctggcaatctcctagaaatatcttaattaataccaggagactacagtctgcctgttagcaactttggtgcagcctggccccaggcaaggggatggactggatgaccttactaggggcctatccactgaccatgttttgctgctaaaggttgtggagacaggtaggaggtgtgtttatggaaaaccatttgagtatgacaactatagcatgaaacatctaaggtttgaaagcattttacaagaaaaaaaaataattcagatcacatgtggagattaccattctcttgcactctcaaaaggtaatttttctgtaatattaatagttttgtanaagtaatacctgtgtgtatatgtggagccagtagaatgtctatatttcacttgtaacaggacagaaatacagttttgaatttgatatggttccgagtacgattcttaaagtaaatacataatgagagaattcttggatctgtaaaatgttcaggtttccaaaattactattcctaaatttggtttcatgtttttatttttcaagtacgaaacagtgaaaattttctgaataatcaaaactgttttctctacatctgatccaggcctggggccacccttttccagaaactgcttcccttttcctaacacctttccaacttccactcttccggctcagaatccccttttgtggccaggctgcagacctctgatacgttttaacattgcttttgaattcaaggatctccctagccctgtagtatttcccattttctatcagacactgtcatggtgggaaatggaagcagtgaatatgaattattttcctaaagaaacttgactatgaggccaggcttggtggctaatgcctataatcccaaagtgctgggattacaggcgtgagccactgcgcccggccacattcagttcttatcaaagaaataacccagacttaatcttgaatgatacgattatgcccaatattaagtaaaaaatataagaaaaggttatcttaaatagatcttaggcaaaataccagctgatgaaggcatctgatgccttcatctgttcagtcatctccaaaaacagtaaaaataaccactttttgttgggcaatatgaaatttttaaaggagtagaataccaaatgatagaaacagactgcctgaattgagaattttgattttttaaagtgtgtttctttctaaattgctgttccttaatttgattaatttaattcatgtattatgattaaatctgaggcagatgagcttacaagtattgaaataattactaattaatcacaaatgtgaagttatgcatgatgtaaaaaatacaaacattctaattaaaggctttgcaacacaaaaaaaaaaaaaaaaa

SEQ ID NO: 341 - DNA, 2078 bp, Homo sapiens
aattcggcacgagcccacacctgctgcccaccaccccggcagcacctttccctgcccaggcttcagagtgccctgttgctgctgccactgccccccacactccagggccatgtcagagctcccatctaccctccaccagcatgccgctcctgaagatgcccccaccattctcggggtgcagccacccctgcagcgggcactgtggtgggcactgcagtgggcctctcctcccacccccgagctctcagccactccctagcactcacagggatcccgggtgcaaggggcacaagtttgcacacagtggcctggcttgccagctgccccagccctgcgaggcagatgaggggctgggtgaggaagaggatagcagctctgagcgaagtcctgcacctcatcctccacccaccagagagatgggaagttctgtgactgctgctactgtgagttcttcggccacaatgcggaaaaggagaaggcccagttggcagcagaagctctaaagcaggcaaatcgtgtttctggaagccgggagccaaggcctgccagggagaggctcttggaagtggcccgaaccgggaactggatcgggtcaacagcttcctgagcagccgtctgcaggagatcaaaaacactgtcaaagactccatccgtgccagcttcagtgtgtgtgagctcagcatggacagcaatggcttctctaaggagggggctgctgagcctgagcctcagagtctacccccctcaaacctcagtggctcctcagagcagcagcctgacatcaaccttgacctgtcccctttgactttgggctcccctcagaaccacacgttacaagctccaggcgagccagccccaccatgggcagaaatgagaggcccccacccaccatggacagaggtgagggggccccctcccggtatcgtccccgagaacgggctcgtgaggagactcaacaccgtgcccaacctatcccgggtgatctgggtcaagacacccaagccgggctaccccagctccgaggagccaagctcaaaggaagttcccagttgcaagcaggagctgcctgagcctgtgtcctcaggtgggaagccacagaagggcaagaggcagggcagtcaggccaagaagagcgaggcaagcccagccccccggcccccagccagcctagaggttcccagtgccaagggccaggtcgctggccccaagcagccaggcagggtcctagagcttcccaaagtaggcagctgtgctgaggcttggaagaggggaagccgggggaagccggccaggaccaggttgggctggcagtcccaaaactgagaaggagaagggcagctcctggcgaaactggccaggcgaggccaaggcacgggcctcaggagcaggagtctgtgcagcccccaggcccagcaaggccacagagcttgccccagggcaagggccgcagccgccggagccgcaacaagcaggagaagccagcctcctccttggacgatgtgttcctgcccaaggacatggacggggtggagatggatgagactgaccgagaggtggagtactttaagaggttctgtttggattctgcaaagcagactcgtcagaaagttgctgtgaactggaccaacttcagcctcaagaaaaccactcctagcacagctcagtgaggccctgcccaggctgagctgcttcagggcatcctgaggccctgactgccagctgaaggcgtataatttttccctccgtgtgccccacctacccgtccaagaccctctgtgctccccaccatcctggaccaaccaaaagctgaacggatgccacactgtgctggggccccttgacctcagcagagccgcttcctggtgctacgcagcctccacactcagagcccgtggactgggctggcctaagggccagggctgatggtactgctggcccaacactgctctctttgtgtttggtttttttgtttttgtttttattttgtttttttccaattctttacttttgatactgtgaagatctttcgtgccgaaagataaagcaacatttggacacagaaaaaaaaaaaaaaaaaa

SEQ ID NO: 342 - DNA, 1257 bp, Homo sapiens
ggcagagtgggggttggcgtataggtgtaggggcccatgttggtttgggagtratgacagttcacgcctgtgggtttgcggacaaagataccatgccccatccctgtctccctgtcagcacgcacttggaagggcgctgggggtgttaatcagctttgctagcctggggtgtgccagcctgggcaggtgtgctctggtgatggacagagcgcctgaggttccatagagggagggtgttgctatgacatctgagatgtcaccagcatgcccctgatgtgtgctccttgcatgtccccaggtgtgctaggcatgttctgtgtgtcctggcatgttaacctggcagtatcagggtgcatgttccatgtgtggcacggtgggcacatgtttgaggattgccctcactgaggtgggccttggcacacccccctgcctcgtgggcccttctcccaggtggtggacatcatgagggtgaacgtggacaagtycttggagcgagaccagaagctgtcggagctggacgaccgtgcacatgcactccaggcgggggcctcccagtttgaaacaagcgcagccaagctcaagcgcaaatactggtggaaaaacctcaaggtaagggtggggacaggaaggaggacaggtgggtgaatggggtatcatagtttgtcttactgatcctcgcctctcacccccagatgatgatcatcttgggagtgatttgcgccatcatcctcatcatcatcataggtgagtagggtgagaatggccggggccctttccctggagaggtttccccagtggattctaggttttgaaggtcattaatctagtttttactcttcagccaaaaacacatatagctgctaatggcaattctgattcatctararccaaaaactttgatgttatttagcctgcattttgcctarttcttggcagtcttgttaacatttggaaataaggaaagctggtgtwtccattgargaccctttaggcctaagagcccagtctgagaaccctggaattgaggagtgggagaaaggaaaggaccaggggcttgagacatgactagccccaagtcccttcatttgcatctgctatgcaatagtccctctcctttccttcttcttccctcagatttagctgatccttcctcccaccctggccttcctttcctctttcctcctcactctccccgtcatgctccctctgccccgccctcaaaaaaaaaaaaaaaaaaaaaaaaaaaaaaaaaaaaaa

SEQ ID NO: 343 - DNA, 1992 bp, Homo sapiens
gcatcctccgccaggacagagtctccaaaggctgctactccttcatccacctcagcttccagcagtttctcactgccctgttctacaccctggagaaggaggaggaagaggatagggacggccacrmctggkacattggggacgtacagaagytgstttccggagtagraagactcaggaaccccgacctgatccaagcaggctactactccttcggcctcgctaacgagaagagagccaaggagttggaggccacttttggctgccsgatgtcaccggacatcaaacaggaattgctgcgatgcgacataagttgtaagggtggacattcaacggtgacagacctgcaggarctgctcggctgtctgtacgagtctcaggaggaggagctggtgaaggaggtgatggctcakttcaaagaaatatccctgcacttaaatgcagtagacgttgtgccatcttcattctgcgtcaagcactgtcgaaacctgcagaaaatgtcactgcaggtaataaaggagaatctcccggagaatgtcactgcgtctgaatmagacgccgaggttkagagatcccaggatgatcagcacawgcttcctttytggacggacctttgttccatatttgggatcaaataasgagatgggtctagcaatcaatgatagctttctcagtgcctccctartaaggatcctgtgtgaacaaatagcctctgacacctgtcatctccagagagtggtgttcaaaaacatttccccagctgatgctcatcggaacctctgcctagctcttcgaggtcacaagactgtaacgtatctgacccttcaaggcaatgaccaggatgatatgtttcccgcattgtgtgaggtcttgagacatccagaatgtaacctgcgatatctcgggttggtgtcttgttccgctaccactcagcagtgggctgatctctccttggcccttgaagtcaaccagtccctgacgtgcgtaaacctctccgacaatgagcttctggatgagggtgctaagttgctgtacacaactttgagacaccccaagtgctttctgcagaggttgtcgttggaaaactgtcaccttacagaagccaattgcaaggaccttgctgctgtgttggttgtcagccgggagctgacacacctgtgcttggccaagaaccccattgggaatacaggggtgaagtttctgtgtgagggcttgaggtaccccgagtgtaaactgcagaccttggtgctttggaactgcgacataactagcgatggctgctgcgatctcacaaagcttctccaagaaaaatcaagcctgttgtgtttggatctggggctgaatcacataggagttaagggaatgaagttcctgtgtgaggctttgaggaaaccactgtgcaacttgagatgtctgtggttgtggggatgttccatccctccgttcagttgtgaagacctctgctctgccctcagctgcaaccagagcctcgtcactctggacctgggtcagaatcccttggggtctagtggagtgaagatgctgtttgaaaccttgacatgttccagtggcaccctccggacactcaggttgaaaatagatgactttaatgatgaactcaataagctgctggaagaaatagaagaaaaaaacccacaactgattattgatactgagaaacatcatccctgggaagaaaggccttcttctcatgacttcatgatctgaatccccccgagtcattcattctccatgaagtcatcgattttccaggtgtgggtgaactgcctgtgactcctctcctcccccgcccctacccctcagggataatgagttcattgctgggctagatgttttagccatgattctgcctctgttttatacctgcacacgtccttatctttgttacatatgaaatatctgtatcacgggtatattgagagaaataaaggtgagagcattcacaaaaaaaaaaaaaaaaaaaaactcgag

SEQ ID NO: 344 - DNA, 1973 bp, Homo sapiens
ggcacgagcgtcacttccggcttccttcagtccgctggtcccgagcacgagctgtgaggggattcacttgtgtgcggaactcctcggaaccatggcgtccctttcccttgcacctgttaacatctttaaggcaggagctgatgaagagagagcagagacagctcgtctgacttcttttattggtgccatcgccattggagacttggtaaagagcaccttgggacccaaaggcatggacaaaattcttctaagcagtggacgagatgcctctcttatggtaaccaatgatggtgccactattctaaaaaacattggtgttgacaatccagcagctaaagttttagttgatatgtcaagggttcaagatgatgaagttggtgatggcactacctctgttaccgttttagcagcagaattattaagggaagcagaatctttaattgcaaaaaagattcatccacagaccatcatagcgggttggagagaagccacgaaggctgcaagagaggcgctgttgagttctgcagttgatcatggttccgatgaagttaaattccgtcaagatttaatgaatattgcgggcacaacattatcctcaaaacttcttactcatcacaaagaccactttacaaagttagctgtagaagcagttctcagactgaaaggctctggcaacctggaggcaattcatattatcaagaagctaggaggaagtttggcagattcctatttagatgaaggcttcctgttggataaaaaaattggagtaaatcaaccaaaacgaattgaaaatgctaaaattcttattgcaaatactggtatggatacagacaaaataaagatatttggttcccgggtaagagttgactctacagcaaaggttgcagaaatagaacatgcggaaaaggaaaaaatgaaggagaaagttgaacgtattcttaagcatggaataaattgctttattaacaggcaattaatttataattatcctgaacagctctttggtgctgctggtgtcatggctattgagcatgcagattttgcaggtgtggaacgcctagctcttgtcacaggtggtgaaattgcctctacctttgatcacccagaactggtgaagcttggaagttgcaaacttatcgaggaagtcatgattggagaagacaaactcattcacttttctggggttgcccttggtgaggcttgtaccattgttttgcgtggtgccactcaacaaattttagatgaagcagaaagatcattgcatgatgctctttgtgttcttgcgcaaactgtaaaggactctagaacagtttatggaggaggctgttctgagatgttgatggctcatgctgtgacacagcttgccaatagaacaccaggcaaagaagctgttgcaatggagtcttatgctaaagcactgagaatgttgccaaccatcatagctgacaatgcaggctatgacagtgcagacctggtggcacagctcagggctgctcacagtgaaggcaataccactgctggattggatatgagggaaggcaccattggagatatggctatcctgggtataacagaaagttttcaagtgaagcgacaggttcttctgagtgcagctgaagcagcagaggtgattctgcgtgtggacaacatcatcaaagcggcacccaggaaacgtgtccctgatcaccacccctgttaagcattcccacgtgctgtcgatctttggaccagtttctagcaaagttgtgtttgaaagatactctattaaagaagactgtggaatctgtttatcggtgcccattatatccttaagtttggatatttagctgaccttcgctttaacataggtctaatttatttgccgtgtcattttccatacaaatcagttgatttaaaaaagttcatttctcatactgtgcattaaaataaaaatttgaacaattaaaaaaaaaaaaaaaaaaaaaaaaaaaaaa

SEQ ID NO: 345 - DNA, 1921 bp, Homo sapiens
  misc_feature (1876)..(1877): n equals a,t,g, or c
  misc_feature (1897)..(1897): n equals a,t,g, or c
  misc_feature (1916)..(1916): n equals a,t,g, or c
  misc_feature (1919)..(1919): n equals a,t,g, or c
  misc_feature (1921)..(1921): n equals a,t,g, or c
ggcacgagagaggagtgggcaccattttcatccagaggcccgtcctgagaggcaagtgaggctgtgctctgtgcctgggctcccccaggtggcacctgtcggtctgtggacctggttgaggcaaggatgcccatctggacatggagccgacacaggtagtcagggggccagcgggacgcttaccaacagctgtcttttccccacctcagaatagcattcctttcgaacaccacggcaagtagctgctcgtctcccatcggaaggcagcactgggtgagtgtgcgcgtggcgggcgccaggcagcagcgccaggtgggtgggagccaccatgccccacccatgggagcttgcaggtgggctgggcttgcatgccaggtgctggaggtagartgaggcttcttctgctctgttcttcttgtggggtgcagagcggcggcagtccgctgcccagtcttggggggargctgtccacagagagctttggaacagagtgaccccaggagaccatcctgttggcctgtsgcctcccsgtgactgcgttccgtgtgccgttgctctcctcctgtcctgggtgcccacccgtgaggcaggagtggcaaggcgggtgccccgagcacttgagttgccttgtctgcggtcggccgtgcctggaggggcgtctgtgtcctgctcagctgggtggctccacgcttggtgttgggggctcctaagctcttgctgcgccacactctgggcagtctctgccatgccagcttttctagtcgcctctctcttcctgtctcatttatctctgtccttgttttgtgtttcttttcacacttggtctctgcccagccgtcttgtccacgcagcttcgtctgtattaactcctccagccgcagcccactcactccccgccgtcggtgcatggccggcgtccacgctgtgctccctcctcggcggccacgcgcgctcggcggctccttccagcaggggcttgcgcttctgtcgggtctgtgccgctgggagacccgctgcagttttcacactgtgcacactctggaaatgtgttgacaggaactgcttttcatgtcttccctgagaggggtacccattttcaaacaccaggttcctttccaggaagggaggcaggagcacccgtctycgctccactcggatccttcgaccctgccgagcccggctccgcgggcaccttgcttgcatgcctcttcctccttcccgtcttcctgtcactcgttctgctgagcacgtgtcccagccacagaggcccctgtgcgtggcgggggacgcaggcgtctagactggggctaggcggtggcggtgcgtcccctccctgcccagcaccgtcactgtggtatctgcctggccggctcccccagccccatgctgaccttctcctgtgctttggctccgacagattcctggtcgggtggcttccagtggtcttcagtctgtcgtgcaccgatgagaactctccttattgctgtgaagggcagacaatgcatggctgatctactctgttaccaatggctttactagtgacacgtcccccggtctaggatcgaaatgttaacaccgggagctctccaggccactcacccagcgacgctcgtgggggaaacatactaaacggacagactccaagagctgccaccgctggggctgcactgcggccccccacgtgaactcggttgtaacggggctgggaagaaaagcagagagagaattgcagagaatcagactccttttccagggcctcagctccctccagtggtggccgccctgtactccctgacgattccactgtaactaccaatcttctacttggttaagacagttttgtatcattttgctaaaaattattggcttaaatctnngaaaaraaaaaaaaaaaaanacgcgagggggggcccggnacnan

SEQ ID NO: 346 - DNA, 1211 bp, Homo sapiens
ggcacgagctcatgcacagaacactatgcattttgaaacttgttcatcctggatttttttaaatcatttttatctcagaacttaaacaaaaattagatgtcgtgcacggactgtgtgaaagaagatgctttgcatatttgctgcactgcatcagtatcttactaaaaatgtgaaatgaaaggactattgtacactgaaatgcttaaatgtatctgaaagcacaaggtgatactcatttttatggtcttcccatttgtgctggtttttgcctctttgacatctgtcatcagtatttagagggtgagaagtgaatgtaacaggtataaataacatttttaaaaacaataactttgctataatcacagttgttccagagcactgtcagatacattctaatgaccagaactggtttaaaaaaagaaaatacaaccatgggaaggaaatcttaaatgaaaaacgcatctcattgtaggcatttttgcctcatattttactgggccatgtttgtttcctggtactcatgtattttttttttccagatctctttccccaagttgctattgtaagagtattctgctgcgtgtggatgcagttatacacattaaagcagatctggagtctgaagtagctataaagcagctataaaacagaaatacatgcatagctgcagaaaccatgataggtagaggacttttcttttggttttgttttgttttgttttgttttgtttttggttttacagagaagagatttttattacaaagaaaaaaattccagtgaattgtgcagaaatgctggtttttacaccatcctaaagaaaaactttacaagggtgttttggagtagaaaaaaggttataaagttggaatcttaaattgtaaaattaaccattgagtgtcaaagttctaaaagcagaactcattttgtgcaatgaacataaggaaagactactgtataggtttttttttttttctccttttaaatgaagaaaagctttgcttaagggttgcatacttttattggagtaaatctgaatgatcctactcctttggagtaaaactagtgcttaccagtttccaattgtatttagcttctggttggaatttgaaaaaaaaagaaaaaaaaaaaaaaaaaacctaaataaaataggtgaaagttccctgactattcaggtgaatacacaaaaaaaaaaaaaaaaaaaaaaaaaaaaa

SEQ ID NO: 347 - DNA, 820 bp, Homo sapiens
ggtctgcgccggaagtgcatgagctgccgatgtggtgcttagtgattgcggtttcggtcgctctcccgtgtttcccgggctgggtatttgcctcgcaccatggcgcccaagggcaaagcgggcacgagagggaagaagcagatatttgaagagaacagagagactctgaagttctacctgcggatcatactgggggccaatgccatttactgccttgtgacgttggtcttcttttactcatctgcctcattttgggcctggttggccctgggctttagtctggcagtgtatggggccagctaccactctatgagctcgatggcacgagcagcgttctctgaggatggggccctgatggatggtggcatggacctcaacatggagcagggcatggcagagcaccttaaggatgtgatcctactgacagccatcgtgcaggtgctcagctgcttctctctctatgtctggtccttctggcttctggctccaggccgggccctttacctcctgtgggtgaatgtgctgggcccctggttcactgcagacagtggcaccccagcaccagagcacaatgagaaacggcagcgccgacaggagcggcggcagatgaagcggttatagccattgacattgtggccacaggccactggccctgggtggctctgtcagggtgcacagcccctcatgcctggagcaatgagggtctagtccaggggccaaaagcagtctgaggtattgggtatacttatactctatagggtcgttgaataaatggcttagaatgtgaaaaaaaaaaaaaaaaaaaaaaaaaaaaaaaaaa

SEQ ID NO: 348 - DNA, 1441 bp, Homo sapiens
  misc_feature (269)..(269): n equals a,t,g, or c
  misc_feature (420)..(421): n equals a,t,g, or c
  misc_feature (1439)..(1439): n equals a,t,g, or c
ccggggtcccagttctaaagtccccaskcacccacccggactcagawtctccycagacgccgagatgcgggtcayggcgccccgaaccstcctcctgctgctctsgggrgcmstggccctgaccgagacctgggccggctcccactccatgaggtatttctacaccgccrtgtcccggcccggccgcggggagccccgcttcatcgcagtgggctacgtggacgacacscagttcgtgmggttcgacagcgacgcgcgagtccgagganggagccscgggcgcctacgacggcaaggattacatcgccctgaacgaggacctgmgctcctggaccgcsgcggacacsgcggctcagatcacccagcgcaagtgggaggcggcccgtgwggcggagcagckgagagcctacctggagggcnngtgcgtggagtggctccgcagatacctggagaacgggaaggagacgctgcagcgcgcggaccccccaaagacacacgtgacccaccaccccrtctctgaccatgaggccaccctgaggtgctgggccctgggcttctaccctgcggagatcacactgacctggcagcgggatggcgaggaccaaactcaggacacygagcttgtggagaccagaccagcaggagatagaaccttccagaagtgggcagctgtggtggtgccttctggagaagagcagagatacacatgccatgtacagcatgaggggctgccgaagcccctcaccctgagatgggagccrtcttcccagtccaccrtccccatcgtgggcattgttgctggcctggctgtcctagcagttgtggtcatcggagctgtggtcgctrctgtgatgtgtaggaggaagagctcaggtggaaaaggagggagctactctcaggctgcgtscagcgacagtgcccagggctctgatgtgtctctcacagcttgaaaagcctgagacagctgtcttgtgagggactgagatgcaggatttcttcacgcctcccctttgtgacttcaagagcctctggcatctctttctgcaaaggcacctgaatgtgtctgcgtycctgttagcataatgtgaggaggtggagagacagcccacccyygtgtccacygtgacccctgtycccayrctgacctgtgttycctccccrrtcatctttcytgttccagagaggtggggctggatgtctccatctctgtctcaactttaygtgcactgagctgcaacttcttacttccctactgaaaataagaatctgaatataaatttgttttctcaaatatttgctatgagaggttgatggattaattaaataagtcaattcctggaakttgagagagcaaataaagacctgagaaccttccagaaaaaaaaaaaaaaaaaactcgggggtwyttttgggggggccgggggccctggtttttcccncc

SEQ ID NO: 349 - DNA, 1140 bp, Homo sapiens
ggcacgagcggactgttcctgcgccatgttcctggatggctgcgcccacttttgcgcccattggcttggctggtgctccgggcaccaagagggggtgcccagacacccctgtattgtgctctacaagagggcatcgagcccctcagtgggagatattttgccaactgccatgtggaagaggtgcctccagctgcccgagacgaccgggcagcccatcggctatgggaggccagcaagaggctggcagggcttgggcctggggaggatgctgaacccgatgaagacccccagtctgaggactcagaggccccatcttctctaagcaccccccaccctgaggagcccacagtttctcaaccttaccccagccctcagagctcaccagatttgtctaagatgacgcaccgaattcaggctaaagttgagcctgagatccagctctcctaaccctcaggccaggatgcttgccatggcacttcatggtccttgaaaacctcggatgtgtgcgaggccatgccctggacactgacgggtttgtgatcttgactccgtggttactttctggggcccccaagctgtgccctggacatctcttttcctggttgaaggaataatgggtgattatttcttcctgagagtgacagtacccccagatggagagataggggtatgctagacactgtgcttctcggaaatttggatgtagtattttcaggccccacccttattgattctgatcagctctggagcagaggcagggagtttgcaatgtgatgcactgccaacattgagaattagtgaactgacccctttgcaaccgtctagctaggtagttaaattacccccatgttaatgaagcggaattaggctcccgagctaagggactcgcctagggtctcacagtgagtaggaggagggcctgggatctgaacccaagggtctgaggccagggccgactgccgtaagatgggtgctgagaagtgagtcagggcagggcagctggtatcgaggtgccccatgggagtaaggggacgccttccgggcggatgcagggctggggtcatctgtatctgaagcccctcggaataaagcgcgttgaccgcccaaaaaaaaaaaaaaaaaaaaaaaaaaaaaaaaaaa

SEQ ID NO: 350 - DNA, 1162 bp, Homo sapiens
  misc_feature (1144)..(1144): n equals a,t,g, or c
ggcacgagcctgcattcctctcctctcttctttcctctctgtcccttctctttcccctctcaaccaggagaccatcatgtctctctgccttcctcctctcccctccaggggagtcaggctgactgtgaaagccatgagcttctctccctctcccactcctcctctcctactttcagatggatttattccttttttaaacaatgaacatcggaaatgagactgtggggtgtggtttctctctctcttttttttttaattttctttgttgggtttttgagcaacctcatgtccccttcccagggagccttttaatttacctcttagaactcaagtggatgggaagtagagcactatgtgtcagtatgctttgttttctgacacgattacacagcgaggctttaatgccatttgggtaggtgagcttctgcacttctgttgtgctgaactgtattttcttctctcatctcctctttgtctttttctcttttcctctccttcctgccttcttctgctggcctccttttctctttctttaccttccttggattatccttccaggttttcataataaatttatattttgtaaaaggattttgttgtaccaggttttgcatcctcactgaatctgactggctttattttcctctccaaaatcaggttttgttctcaacactttcccatcatgtctagtcactgttttggttttggcaccatcagtatcaaatgtacaaacggttcttgctaaccaacaccaggtatatctgatgttcagatgagttccaataaaaataatttttttttttttcaaaaggtgtctttttcttgagtgctggagggcttccaagcaagtccagacagctctgtgtggccccacactagtctagctctcatctggccaaagctgttatctcatttgtgtaatgggagtccttaaggtaaatttggggtccaaacttggagggctttgggggcaagaaagttggtgtgtgagttctgaggttggaaatgagttcaggtgtcttcttccaggggcagcatggtccagtgagcacatgtaagtttgggcagtagatcctctgagcctactttctcttctactcagtgaggatgctgctttctgggcaggtgattgtgatgtgaaggntagtaagtcatagacgtt

SEQ ID NO: 351 - DNA, 989 bp, Homo sapiens
gacctctctgcccccatttccactcctgctcttgggacacaggagactggttagatgagagtagaaagtttatttttgaacacccaggtgtggggtggctgggcgagaccatctgatggctttgggagccaggccgcagggtttagcttggatctgttgagtaggagacccttaaacatggccaccctgagcttaagagctggtcttggattttgctttcttttgggattaaccgagtattttgtgggattccatttgatcccttaactggctgaccagctataactcctggttatgttgttttagtgttgctccaggtgtcgttggaggagaagttgaaggtacaaggagtttgcaggagggaaggtggcagttaatgagccttcctggtgggaccggatggtgagggcaggggcatctggcccagcgtggactcgggccatagatgggaagtggtcatttggaggtcaccatctctctgacaccctgaccatagcacctgcacccctgtgctgagctgccaggtccccggcaccagcgtctgtgcagctcaggtgttgctgagccgtggcctccgcagctctccatcaggatttctcaagcttcattatgaattatctctgtgtgagctcacaacggtgactgcagagtcccaggtcatctctcagatcttctgaatcaaacatatggtctgcagttgccgcgcatgtctttggccgattttctgacaatcaaagtgaagaagttctgagctacgggaagttgggttgaaggcatgatggggaaaacatgattagttgacagcttttcccagagagtttttagacaaactcaaccttggtaaccttctcagtgggcttatgataagaaccttcaatgtgccaaaaaataaaaaaagcagcactccaggtagttaatctttgtttaaaaaacccttccccccacccagtcctgcaaacaaacaaacaaacaaaaaaaaaaaaaaaaaa

SEQ ID NO: 352 - DNA, 1117 bp, Homo sapiens
ggcacgaggagaactaagcattaggagaagcagcatggggctcaacagtgaagtgacttgttccaggcgggtcctcaggagtggctgtgcagccccagtcacttttcatcacaccggagagggacgcacaaccccagtcctgtttagttgcagatataccgagaagggagagcccacaccgaccttaaggtcacttgggccctgaatcctatgcctctcgttccactgcttctcagttgccctcctacctggctggccaggtttggagtctctctcccctgctctggcattccagtcttggcctgaagcacgctatgcctctcatacagtctgccttttctagggtccaagcagcatcccaagttctgttgagatgcagcttgcagtccaggaggacaacggtcacccccatcttcccatgtttttcttgctttaagccctcccctaagctttcacatataatcaccaggggttcagaaattgtcagccagttctccttatgctttaagtagattttcttggggccagatgtcttgaaaaacgctctcctgactcagcagttcctggaatttttggcctatcatttatctcactgttctgagtttacttgtaagcctcttggcttaatgtttgaatcaagatgagcagtaataacagcttcttgtgtaccaattactcagaactcacttaaattgccttaacactttttaaatgttcttacacatttgaaattctttagggagggatttccagaactttcctaaatttctccacccatggcatgacagtacttagaggggcaagaagttcaattttagaataagctcttctgggcgcgatggctcatgcctgtaatcctagcactctgggaggccaaggcgggtagaatgcttgagcccaggagtttgagactagcctgcaatatgcgaaaccctgtctccacaaaaagccagacatagtggtgcatgcctgcagtcccagctacttgggggcgctgagttgtgaggatcacctgagcccaggaggcagaggctatagtgagccacgatcgtgccactgcactccagcctgggtgacagggtgagacgctgtcgtctcaaaaaaaaaaaaaaaaaaa

SEQ ID NO: 353 - DNA, 1187 bp, Homo sapiens
gagatgggtctcctggtattagaaaggagagcagacgcctagagttctgacctcttgggcctcccctaaacaaaaagcatagccccttcactaccctagtaacaagtatgacctgttgcctgttgaggtcaggtgtacctgtgtgtctctctctgtgatgtatgtgggcttggtgtccacatcaatgtgcgtgaatactcctacccacagactgctactgtgccaatatagaggytcataagaaagataaaagagaaccagcagaaccccaggttctgcctctccttcctccctttgcccagataaaggtgtacagtgtttgtggtgaggctgctggacactgctgttttgggctttctagagagaatgcaaacatgcaaaaacagtgtggtagtgtaggcagaacaagatctagaatcagaagacctggagtcgaatctcagctccaacacccactggatgaacgtggacaagctgcttgatctctcagatcctcgatttcttcatctgtaagatggaaacaatatgtgtcttttctaaggggaaagatcaaatgacatcatgtatgtgaaaatgcttagaaatgggtgatgatgatgatgatgatactgattattagggtatctaataaagttggggaaagaacaaaatccccccctcacaccctattgcaccaccagccttctccctccctgctcaattatacccatgttatagggaaggaaatagggaagaaacttgtctaaggtcacatggatgttcgcaacaattgggatgcagaacttgatctgactcccaggccaggtttgattttgatttgcagtggcagagaggactaattttttactaggttctgagccctgtactgaactctggattgccctgtacttggtggtggtatacagttcagcagtttttagcatatacacgaatttgtgcagccayaaccactatctaattctagaacatttttatcacccccaaaagaaatcatgtacccatttgcagtcacttgccattccctcttctccccagccctgggaaaccactgacctaccttatatctctatgaatttgcctaatctggacatttcatataaatgcaattgtacatgtgaaaaaaaaaaaaaaaaaaactcgagggggggcccgagtacccaattggccctacgaagaggcgaacagag

SEQ ID NO: 354 - DNA, 1652 bp, Homo sapiens
gggcagcttctggggacagccacaaggagggtaccaggggtcccccgccgctgcctacagacatgcgccagatcagccaggactttagcgagctaagcacccagctgacgggtgtggcccgggacctgcaggaggagatgctgccaggaagctctgaggattggctggaacccccaggggcagttgggcgaccagccacagagccccccagggagggcacaaccgagggggatgaggaggatgccacggaggcatggcgcctgcaccagaagcatgtctttgtgctgagtgaggcagggaagcctgtgtactcccgctatgggtctgaggaggcactttccagcactatgggtgttatggtggccctggtgtccttcctggaggcagacaagaacgccatccgctccatccatgcagatggctacaaggtagtattcgtgcgccggagcccgctggtgctagtggcggtggctcgtacgcggcagtcggcacaagagctggcgcaggagctgctctacatctactaccagatcctaagccttcttaccggtgcgcagctgagccacatcttccagcagaagcagaactatgatttgcggcgcctactctcgggctcagagcgcatcaccgacaacctgctgcagctcatggcacgagaccccagcttcctgatgggggcggcacggtgcctgcccctggcggcggccgtgcgcgacactgtgagcgccagcctgcagcaggcgcgtgcgcgcagcctggtcttctccatcctgctggcccgcaaccagctcgtggcactcgtgcgccgaaaggaccaatttctgcaccccatcgacctgcacctgctcttcaacctcattagttcctcctcgtcctttcgcgagggcgaggcctggacgcccgtgtgcctgcccaaattcaacgcagccggcttcttccacgcacacatctcttacctagagcctgacactgacctctgcctgctgcttgtctccactgaccgtgaggacttctttgcagtctctgactgccgccgccgcttccaggagcgccttcgcaagcgcggagcccacctggccctgcgagaggcactgcgcacaccctactacagcgttgcccaagtgggcatccctgacctgcgtcacttcctctataagtcaaagagctcgggactcttcaccagccctgagattgaggccccatacaccagtgaagaggagcaggagcggctgctgggcctctaccagtacttgcacagtcgtgcccacaatgcctctcgcccactcaagaccatttactacacgggccccaacgagaacctcctggcctgggtgacaggcgcctttgagctctacatgtgttacagccccctggggaccaaggcgtcagccgtcagtgccatccataagctgatgcgctggatccgcaaagaggaagaccgcctcttcattctcacgcccctcacctattgatgggaatgtgtgcgggctcagccttcctggacacactaggtgtgggaagccataggagcctccagatgggggctggcctctcttgcccagccagcgggcagggactgtgggttggtgaatgcattaaagtgctttggggaagacaaaaaaaaaaaaaaaaaaaaaaaaaaaaaaaaaaaa

SEQ ID NO: 355 - DNA, 1460 bp, Homo sapiens
acgcgtccgcgcagaaccaggaaagtaacggctacagacagtgagaaatagtttcgctcgccggctagaaaaactctgtcggtaccaaccccagagcgttgagagcagcccacctccacgcttccttaacggagaggtgcaggactcagacttcaccagcccactcggtcccagccttgtacgcaaagagacgtcaaggacgcgctctcccgcgtccaggcagccccagcttgctggcttgcctgcccgcctgcgtgcagcactcggccggcgtgcagcatgaccctgtggaacggcgtactgcctttttacccccagccccggcatgccgcaggcttcagcgttccactgctcatcgttattctagtgtttttggctctagcagcaagcttcctgctcatcttgccggggatccgtggccactcgcgctggttttggttggtgagagttcttctcagtctgttcataggcgcagaaattgtggctgtgcacttcagtgcagaatggttcgtgggtacagtgaacaccaacacatcctacaaagccttcagcgcagcgcgcgttacagcccgtgtcggtctgctcgtgggcctggagggcattaatattacactcacagggaccccagtgcatcagctgaacgagaccattgactacaacgagcagttcacctggcgtctgaaagagaattacgccgcggagtacgcgaacgcactggagaaggggctgccggacccagtgctctacctggcggagaagttcacaccgagtagcccttgcggcctgtaccaccagtaccacctggcgggacactacgcctcggccacgctatgggtggcgttctgcttctggctcctctccaacgtgctgctctccacgccggccccgctctacggaggcctggcactgctgaccaccggagccttcgcgctcttcggggtcttcgccttggcctccatctctagcgtgccgctctgcccgctccgcctaggctcctccgcgctcaccactcagtacggcgccgccttctgggtcacgctggcaaccggcgtcctgtgcctcttcctcccaggggccgtggtgagtctccagtatgttcggcccagcgctcttcgcacccttctggaccaaagcgccaaggactgcaagccagaagagggggggctcacctcttatcctggggacccactgcacaagcaggccgctttcccagactttaaaatgtatcaccactaacctgtgagggggacccaatctggactccttccccgccttgggacatcgcaggccgggaagcagtgcccgccaggcctgggccaggagagctccaggaagggcactgagcgctgctggcgcgaggcctcggacatccgcaggcaccagggaaagtctcctggggcgatctgtaaataaacctttttttcttttgttttttaaaaaaaaaaaaaaaaaaaaaaaaa

SEQ ID NO: 356 - DNA, 1105 bp, Homo sapiens
ggcacgagcaaaggttctttgtaatttgaagaaaaattttgttttagttatctgctaagagggcatgggtttctttgtacttctcttccctacgtccagattagcttaagcaatagaaggaactgaaaagagcagaaacagttaagtgttaattaagaagcacttacagtcttaagaagttactcggggacttaacgtaaagttctatgatacatgctattaggaacttattttaaggtgtaccttatattcaagtgtttttacattttcttatataaaagtaggaagatgcatttccatttacaaaaaagctgaccaaaagacataataaaaatcatctcatatgaccataaaccttttaaaattagaatttaaaagagtaactgtttttcagaggtattttggatactttggatagaatttcatgggtaaattctgtgcggagtatccaatggttttaaaaatctagaagagaaggattttccaaaagggtaccagccctgccctccaggatatggtggccaggatatggtgggttggccaaattatccattaggctccaaattccttaaaacctggaattagttttttgggtttgttgccaaaagatttgaccagaggcagaactttcctttggaagaacaaagaacaggttttctgtagctgagtagggaagaggaaatagcaacattgactttactgagacactggaacttgaatagagtgtaagtgtaaaatattaagatgtatttaagaaaataattctcaaggctcgttgcatagagaagagggtaagggcttgggaatcttaaattaatggtcttttaccatcatacttaccgatgtgttccttgatacacacaattgtggacttatttttaaagtttacacactgttagcatttaatcttaggtcctatatctacagataggtatgaggctacatatctgccattgttagtcccaagaatgctctaaagcagggctgtcccaatgttttggcttccctgggccactttggaggaagaataattgtcttgggccacacaaaaattcgctaacacaaacaatatagctaatgaactttaaaaaaaaaaaaaaaaaaa

SEQ ID NO: 357 - DNA, 1435 bp, Homo sapiens
gcaatttatttaacaaatacttatctagtactatgtgcccggcgctgtagacactgccatgttttatctcattcaatattcacagtgactgcccagtgaatggtattgcctccatcctctgagaaggtaaagagcctatcccagaccccacgagtggaggcgtcagggaggggttcttggcaggagatgggtcttgtagaaaggcttctgytttgctttactcacggcctgtggcagtttgctcagacagctcccatcaggacaccattggcagcttttgcatgaccctgcctcccagggtcttcctgcgtttttccttaagttgccttattctttggttgtttccctacttgtttttgttagactgtgggaggaagaaatccatttcaaatctgctgaaacctgttaccaagcaacagcagtgattaaaagcaacctgatgagtgagtaaagaattagggtttcagacctgtagttaatgatggtctctgtctccctgctgccctgcattcccttcccttccgttcactgctgggtgaaggagggcttgctgcattttggaagttaagggaaccaataaggtgactcttttgcagattggaatatggtgctcagccagccatatggaagcactgtcctggcgtgatctgccctgggctgttggctctctgagtgctgtcttgggaggagcactgcccttcagaacagaagagatggcttccagtcccctctcccccttctcccagtctctctgaggctgcttgttgggtattgggcgtgctgtgtactaactcactcccgtctcttgtctcattatctgaaatgcatccccttttgcagaaagggctcaaacggagccttcagttctgctcctctgcatagccgtagctcagatcctagctcargatgtcttgtctgggaagggcaaaacatggtccccagtgtagcattttcactgggttgattatctcagtggtggatcatctatcacccttgtgtggtgactttgtgaattatctgcctgagtgccacttcccttccaccctaatcactgcaggctcagggagcaagaaataaaatcatgaaatgcattccaaataaaattaccttttggctgggtgcagtggctcacacctgtaatctgagcactttgggaggctgaggtgggtggatcgcttgaggtcaggagttcaagaccagcctggccaacatggcaaaaccccatctctacaaaaaatacaacagcaaaaaaatcagccaggctagctggtgtgcgcctataatcccagctacttgggagggaggctgaggcacaagaattgcttgaacccaggaggtggaagttcagtgagccgagatcgcacccctgcactccagcctgagcaacagagtgagactctgtctcaaaaataaaaaaaaaaaaaaaaaactcgag

SEQ ID NO: 358 - DNA, 3342 bp, Homo sapiens
  misc_feature (2005)..(2005): n equals a,t,g, or c
gcggctgtgtgtcgccggagccgaagcgcgcaggcccgtcccggtggccggggagcgggcgggtgggggcgccatgtggttcatgtacctgctgagctggctgtcgctcttcatccaggtggccttcatcacgctggctgtcgcggctggactctattacctggcagaactgatagaagaatacacagtggccaccagcaggatcataaaatacatgatctggttctccaccgctgtactgattggcctctacgtctttgagcgcttccccaccagcatgattggagtgggcctattcaccaacctcgtctactttggcctcctccagaccttccccttcatcatgctgacctcgcctaacttcatcctgtcgtgtggactagtggtggtgaatcattacctagcatttcagttttttgcagaagaatattatcccttctcagaggtcctggcctatttcactttctgcctgtggataattccgtttgcgttttttgtgtcactttcggccggggagaacgtcctgccctctaccatgcagccaggagatgatgtcgtctccaattatttcaccaaaggcaagcggggcaaacgcttagggatcctggttgtcttctccttcatcaaagaggccattctacccagtcgtcagaagatatactgacccccatgcaggcaggatgtggggggcaagatcaggagagtcaggcccctgggcctctatgccaggtggggaccagaagtcgggaaggcacctaccacctgccctggctttcttcccctcaactctggagccccatccccaccctccttggggggctcagcttggctcagatctgatgcttcaagaggctgtaacctcagagggcaccaaggagggtggcagagcctgcttagccaggaggccgaggtccctcagtcctcccctgtcccttccaaggtgggtcaggaggttctggccccgctggggcaggcagggcagggtctgtgaagcttaagagcagatggtgacaagttctctgggcaggtggccatggggaggggccatggcttggcatgtccaacagaaatagtttttgctgttgaacggtgatttctgtccaagtgcagatttccgtttgaataaagcttcgcttctaggtggcactgtttgccttaataccctgacagttcatcttcctttcttcctgctaaccttctgctctggactggactcacttttctgctccagggactccttttctgggtttgggtcttgcccttcccaagggactgttcttgtggcccttaatgggaagggggcaggggtgaggagctgagcctgctcaaggagtgggaagtggggctataggcagcctctctgatgcactctcttccatctctttccccaaggctccgtgactgacaaactgggagtaggagaggggacaatttaggactgggctagattttcagaagaacatctacaatatcctatttataaatcttcctctgggaaaaggagtggtttctggctgaatactatcttaggctcaaggagaaacaaaataaaaattagcttccaggcagcctgtttttaaagaaatgggactaatgggagaagctgtttgtcactctaagagcatccaagccctggcccgtctgtgcactcttggctcctggggagatatatctgccttctaagaaggcaggccaggtcttgggcacagacctgcatttgttgaccttgcactccaactatagtgccttgcaagtgctcaacagtacatatttggaatgaagtccctatgagagccatttctggccatgttctatacctcaaagtgaggctggcaggtacagagatgaactgtacacatgtgatacatttaagccactggaaaaacccctgtgcttgamaatatttcctctatatcatgcctggagttccatcatagcccttcatttccttggctttagcatttaccttctcttaagaataccagctttcccctttccctgaganggaagagcacatgttggtctcctcttagtgtgaacgagattgccaggcccttttctcctatgcacaccaggatagacaaggcaggggatactggcagcctgcatcatcctcccattgggctgacagctggccctactttcctccctctgctgcttggtccctcaccttgatgatgtggcttcgccccctccactctactgccagtgttctcccaggggttgctaaatccagcagacccctttcctgtcttactagatctgggcagcatttgacatggctgatcaccccttgcttcttggatggcacttccctggcacctctgtggctagttgtcctacctccctggctgttcctttcaggcttccgtgcaggcttctccacttgcccatgcacagtagggtctttcagggttctgctgtgggctccctagggaagcccatccatctggatggtttcaaggatggtgaggaatttagagttgacctccagccccaacatccttcctgatcacctgaaccacagttttgctgccctctaggtgcacagacaattcaggtccatggcccagatggtacttgctgtcttctgcaaacctgccccttctgggtacttcccttgaccccgagatcactcaggagccagacaggaaacttattctattcctgttttctctttctgcccaccacatccaatctctcaaaacggtcaggtctaccttaacatctcttgatttgagccactcccactgtcatcagctttcacctggattatcgtgacagcctcctactgcttctctatcatgtggccagagctatcttcctaaaatgcattgcatagttgatcaagtcactctctggcctaaaaccttccttggctccctgctgccctcaggataaagtctggacccctcagcatggcttgtgagactcatggtgtccttgtccctgctcacctctctggtctcatcacttgccttcttgcattctgggtcccagcctcctgtatccagagatgcagtggctctccattgccactctgattcctcctttcttttggtcacagagaaagggtactttctctgtcaaatctcaacttagacttgacttcctccaaggagctttggctatactctctcctcccgacccccaccctggcatactacacagatcactctgggctcacttgcctgcctaatggtcatctccccagtagactgtaagctccttgagggcaaggattgtgttggaatttttgtattaacagtgcctggcttggtgcctggcacctagaaagcactcaataaatgtttgtttaatgaaaaaaaaaaaaaaaaaaaa

SEQ ID NO: 359 - DNA, 1008 bp, Homo sapiens
  misc_feature (21)..(21): n equals a,t,g, or c
  misc_feature (895)..(895): n equals a,t,g, or c
  misc_feature (928)..(928): n equals a,t,g, or c
  misc_feature (960)..(960): n equals a,t,g, or c
gaaaccgacctaaggggattntcccatttggcccgtcctaccctaaagtcaccacctgctgcttttttggagcgcttaccagtgaccaagaggaacagaacacagagcagcctggcagtgtccaagcaacaagcctccgctcctccttcctgcaccctggggctcctgaaactcacatgggtaaaaaagatacagtaaagacataaataccacatttgacaaatggaaaaaaaggagtgtccagaaaagagtagcagcagtgaggaagagctgccgagacgggtatacagggagctaccctgtgtttctgagaccctctgtgacatctcacattttttccaagaagatgatgagacagaggcagagccattattgttccgtgctgttcctgagtgtcaactatctrggggggacattcccagtgtatcagaagagcaggaatcttcagagggacaagattcaggagacatttgctcagaagagaatcaaatagtttcctcttatgcttctaaagtctgttttgagatcgargaagattataaaaatcgtcagtttctggggcctgaaggaaatgtggatgtygagttgattgataagagcacaaacagatacagcgtttggttccccactgctggctggtatctgtggtcagccacaggcctcggcttcctggtaagggatgaggtcacagtgacgattgcgtttggttcctggagtcagcacctggccctggacctgcagcaccatgaacagtggctggtgggcggcccyttgtttgatgtcactgcagagccagaggaggctgtcgccgaaatccacctcccccacttcatctccctccaagcaggtgaggtggacgtctcctggtttctcgttgcccattttaagaatgaanggatggtcctggagcatccagcccgggtggagnctttctatgctgtcctggaaaagccccagctnctctctgatgggcatcctggctgcggatcgccatgggactcggctctc

SEQ ID NO: 360 - DNA, 1054 bp, Homo sapiens
  misc_feature (89)..(89): n equals a,t,g, or c
  misc_feature (149)..(149): n equals a,t,g, or c
cgcaattaatgtgagttagcttcactcattaggcaccccaggcctttacactttatgcttccggctcgtatgttgtgtggaattgtgancggataacaatttcacacaggaaacagctatgaccatgattacgccaagctctaatacgnctcactatagggaaagctggtacgcctgcaggtaccggtccggaattcccgggtcgacccacgcgtccgagtgacactactgacttggctctaccacctgaaatgccgattttgattgatttccatgctctgaaagacatccttgggcccccgatgtatgaaatggaggtgattcattctttttatttctttttgctccagtcaatgaaaggaacactttattgaggccccagggccgtagggcctgggcaggaggctgccctttggggaaggaatagccttattcgaccttctttttgggacgcaggttgttggtgtggccgcacttcttgcagcagttgactgcatgggggcgcaggcgagcacagctcttgtggcacatcatcttcttgcagttgtatttctgggcaaggtggcagagggaaggctccgtaatgccacctcacaggcacagcatcaggcgcagggtggactctttctggatgttgtagtctaagagtgtgtggccatccttcagctgtttgccctcaaatatcagacactgctggtcaggtaagatgccctacctgtcttgaattttggctttgacattctcagtggcatcactgggctcgacctcaagggtgatggtctggcctgtgagggtcttcacaaagatccacatctcagcgtctgcagcttggccagtctcactccattctcatttttttgttggtactcactggtgtactcaggtggttgcttaacagagaagtaaaattggatgtttccagaggctgaattttgccttaagatggaamctttatttctaaaaaaaaaaaaaaaaaaaaaaaaagggcggccgctctagaggatccaagcttacgtacgcgtgcatgcgaagtcataactcgtctataggaatg

SEQ ID NO: 361 - DNA, 876 bp, Homo sapiens
cccgggtcgacccacgcgtccgcccacgcgtccgcggacgcgtgggcttctgttacatggagctcaatggacgtgcccaggaatgcttttggctgttattttgcagttaatacctcctgtaactaaagcatttgtttatgagttgacttgagagaagggctgatctcagagccgctttgagctaagttggattagtcacactaggaagttaattccacacctttcgtctaagtctcagtattgaggcctctccagttctcatgcaccctgatcttagggttagaatacttgaccctgatacctgcaccatgcttcatggttcctgagctctttctcctgtttcatttgagcctccaaactacatatttggtcatattgcctgcctaccccatgcctgctgcagaaatattcatccaggttaaccttgatatacacagagatggtcttggagaattgtgaatgtatgtactgtattgtcatcaaggatactgtcccttatttgaaggcatctaaagagaaactgttttcagatccaagtgctcagatctaaagcctctgcaacaagtcaggtggtggtcatgtttcccttctagttttggctgacaggaagctcagttcagtaccataactacagaacctgtcatctgtattttttgttctcaccccgtttttgttattttgtttctggttttttatattgaggtatgttttagatatagtttacaaaaataaaacgcacagattttaaaaaaaaaaaaaaaaaaaaaaaaaaaaaaaattaaaaaaaaaaaaaaaaaaaaaaaaaaaaaaaaaaaaaaaaaaaaaccaaaaaaaaaaaaaaaaaaaaaaaaaaaaaaaaaaaaaagggcggccgct

SEQ ID NO: 362 - DNA, 1827 bp, Homo sapiens
  misc_feature (601)..(601): n equals a,t,g, or c
  misc_feature (918)..(918): n equals a,t,g, or c
  misc_feature (1825)..(1825): n equals a,t,g, or c
gaattcggcacgagatttattattatttaactcctgcagtgagcaaatgtgagtaacatttgaatgaaaataaattttcagcttatttacatgaggtaataaacttgactttatcaagtaattgtgggagtggggaataaacctcatctggggatgggaaataaacaccactataaagaaaccactaagatttgaatgccttgcttgttttaagtttgttgatgcaggtattgcattgattatgcatcagggaactggaaaccaaggcattcgttcttttaagaaaatagattcttaagcataggagtctcatgttttaagaactatttctaagttcaactaagatcgagtttttctgtctctattggcaaktwtyaagaggcataaactttaaagaaaaagggaaaatgtgataaattaatggaatagactccataggcttttattccaacttttatatgatgcaagtctatgtgcttctgtctgactcacttatttctgtwatcaagatgaactagtgaagggaatttctctctcaatgctaaattaattacatgcattggggatagtcatccagagagagggaaggtgaccttctgangttgtcacycagwaaataattgcctgagctgagaatggcatgtgggtcacagaattggtgtttctggatttaggaaatacttcctattttttttccactcctgctggctaagccaagaatggcaaatatgtgttcatgctgctgcattcccttccaggcccataaggacgttggcaatccttcatagccttctcacaggcggaacctggattaatttaagaacccttttgtgcctggcttttcaggaagccagtaccaatcaattggtgctggcatgaagcatgaaactatttgccatctctgagttatgccagtanaattggcatgcttctggtttccatgcataccactacctttcatgggttttattgtgcacaaactttgcatgcctttagaatgatatacctacgcaggtatataatttgtcaccctgatccaaaaagggkaagawgccmagaccatagtgagcctcttattagaaagctcttggcttcagtttttgacacttccctgactctttatattcacgttatcataagctgccaaattcttgactctataaattgccctttaacagcttattaggaattccaactactgtattctagcaccaactacagcatattcagagcctctgcaattcctaaaagtacacttaaaccaaatacatgggccagcctgcatcttttaaaatacattttatgcctttacacttcgtattaagttgggtgagaattatgttttaatctacactctatcttgaattgtcttacattttattctgcttaccagggttcaggttcttatccaaaatgaagttaaatttttttctcttagatagttgcattcctgaagcaattagaacagcatgatcccttggtgtttattgacattctcatcattgtctcattggctttaggtttaacatgcctcatgatgacaacaacaaatgtaaagaagaaggagttaagagtccccagcatgtcatggctccaacactgaacttctacaccaacccctggatgtggtcaaagtgtagtcgaaaatatatcactgagtttttagagtaagacttgaacattcttttagcacaaacttctagtgcctggcctacatgtagtgaactaattgtgggaaagacaatatgaagtcaaacattccttttgagttatttttgttgacattccttggagaaggcaaaaaaaaaaaaaaaaaaaaactcgnag

SEQ ID NO: 363 - DNA, 3303 bp, Homo sapiens
  misc_feature (2355)..(2355): n equals a,t,g, or c
gggcctggcctctggagctccttttactctggaaagaacatgacagacatcctctgcccttcagcctgtgccccagaatgagagacccatgggacagactcaagctgtaccctgaagcagagctgcccagttgactgcagacctgttagctttatacgtctacgaatatttactgcacgtaggagcacagaaatctgcacagaccttcttatcggagattcgatgggaaaaaaacatcacgttgggagaaccgcctgggtttttgcactcgtggtggtgtgtattttgggacctttactgtgcagctcctgaaaggagagacacttgtgaacattcaagtgaagcaaaagcctttcatgattatagtgcagcagctgccccgagccccgtgcttggcaacattccccccaacgatgggatgccgggaggccccatcccgccaggtttctttcagggtcctccggggtcacagccctcgccgcacgcacagcctccacctcacaatcctagcagcatgatgggaccccacagtcagccttttatgtcaccgcgatacgcaggcggccccaggcccccgatcagaatgggaaaccagcctccgggaggagttcctgggacacagccattgctgcccaattctatggatcccacacgacaacaaggccaccccaacatgggaggatcaatgcagagaatgaaccctccccgaggcatggggcccatgggtcccggcccacagaattacggcagcggcatgagaccaccacccaactccctcggccccgccatgcccgggattaacatgggcccgggagctggcagaccctggcccaatcctaacagtgctaactcaattccatactcctcctcatcacctggtacctatgtgggaccccctggtggtggcggtcctccaggaacacccattatgcccagtcccgcagattcaacaaattccagtgacaacatctacacaatgattaatccagtgccgcctggaggcagccggtccaacttcccgatgggtcccggctcggacggtccgatgggcggcatgggtggcatggagccacaccacatgaatggatcattagggtcaggcgacatagacggacttccaaaaaattctcctaacaacataagtggcattagcaatcctccaggcacccctcgagatgacggcgagctaggagggaacttcctccactcctttcagaacgacaattattctccaagcatgacgatgagtgtgtgatccccccttctccgagacgctgagagagcaggcattgcaggcgggaagatgccagaaattatgcaagaagtgaggtgtcattatccaggagctggtggggagggcatctccctgctcccctcaaccccctcccaccccatccacgccccctacctttcccaattttagtttcatgcaataaaaaggccaaactttttattccataaaacaagaaggacaaaactctcaaaaatgtatttcaagtcagtgaccagaaaaatcccaccccttgccctttccccaaaggaccttttctgtacatgacacttttttgttgttttttgtttggggttttaccattgttgggatttttttatttgttttcaggggggttttttgggggaaaatttttttaaatggaagcttctagcaagccccccaccccaatcaacctctatgctttcttcttaaaaaaaaaaaaaaaggaaaaaggaaaaaaaaaaaaggaaaaccagaagccctgctgtctgtctgtgcccaagcccttccaccagaaaagctagtctaggtgtgagagcccacattgtctgtagccatcaaaaataataataataaactggacagtttacaatcgttggtttctttcaaaaggccttttttggaaagaagaaaaggcagtcaccgttttccacttggggttttggtttgtgcaacaggcaggggaggagtggggacgcgtttgttctagcttgatttccatggcaacagcagcggcacgtttgggaccccagaacccagcaccctcatcctgtggccagaggggccggaccactgacccctttcaggattccaccacagcccagaccgtcaccgtgacccggtggcatgcactgttcccaggacaccytcctcctcctctcctggacctcccttccgtcctggcctccctgcctctccagcccctcctctgcccccaccccagtcttcccagtgagaatcctgccagctgggtggtggcctggcgcagagtgggagaggctgccactgacaggatggctatgacctgggacatggaaacagtgacctccgcgttctggtcccgagatcctcgcatcagcgtncatcgtgtgcaccggcttggggggctggagttccggttttctttgtttttttctttattcgtcctttctcaaagatgggatactgatcagaattgctctgtatatgcttgggactggatggaaagactttggagcagctgtggggggtggggggacaccgacaaccaaacagacgtgctggctccagtcctgtttttactttcaaaaaccaacaagcccgacagtggagcctgtcccctcccgggagggtgctcatggccccactcacctcatcaccccacggaaacctttgtgtcttgccctggaagacacccgaattctttgtacattgacatgcccttctccttcctccctcccctgtagctggtctttgttttactccctccctttctgatccatgtatatcatattatgtgagatatcatctgcctgaaaaaagactttgtgcggattattgggaacattgtagctgtttctgtgttttttcttaccttgtagtctggttctgaattaagagaggaaaaaaaagtaattatgatacattgtagtttgtgtacgatatatgttgataacgttttattaaagggacatcttttttccgcagcccttcctgacatgtttggggaatgtgggttggagtttattacactgattacaaaatgcaaggtgacttcttgggcacagtttttgttcctggtgcataacaagatgttttgtgtttgaggcgtctgcsttcttttcctgggcctgcaagttctgtgttcttgtggagtcgcgatggccttggcggaaggtgggttgggagggaaggtatccatctcactttaaatatttgggggccgtctaaaagccattttccatttcttgtcttgcaaacacattttggtccgctggaatgtcttttatttttctggaagtagaaaaaggttcctcctggtgccctctgtt

SEQ ID NO: 364 - DNA, 1948 bp, Homo sapiens
gatttgtaaccaggctgtcattccatgtttgtttggaagcttagagataacatttatgaactttgtgacacatagtagttgctcaataaatgttaactgtagaaacacattgattagtttcacttcagaaatagacacttagagttcaaaattcccatctgcctagctcctgaggcccactttcttaccagaatctttcctgataccctctcctgcataaaatggttcctcttttgagactttgtagctcttttgtacttctcttattctgttacgttactgcaaaaaaaaaaaaaaagaaagaaaagaaaagtgccaattgtgtacatgctttcctccctgctggaatgtaaactttgtaaaggcatgatccatagcagatacttcttattacaaactacctggcagaatttctttctaaagaacctactcagtaagcctgttggtgaactgagcaacatttggacaattatggcatctcttacaattttcagctattgsttttcacttgtttagaaatgtaaaactttgcaaggacttttataaaagcaaatttcagaatagttattcactaagcttttttatgctaatgatgtcatgctatcaaaaattagctagagtaaatggactgtaatgaggatggtttgtaatctagattatatgttccacatgtaacatcgaaatgaaatataaaattgagttgttggcatgtggttgtggtgagcagaagcagttattatacattacttggtaaaattcatattcatatcttgtcagtttacagtgagccagagattaaaaataacatttgtttctgttttagtaactgcttaaaaatatccaaaatcattttattttctttagcctgacttctagtagtgttttgaatatgtggcctttcaagcagtaatgaaatgcatcaatgcgacttggcagtgcctcacaggacatgcttctaggatcatttttaatgattaaaagtcaaattgagttctaaaaaactgacccaaaatatagatgagccaagtaaaaacggaaggaaatctgaataaaatcttggttcttggtcctctgcatgtatcctccacatctgttttctccagatctcttttttcttgcttgktgatagcacagaggaagatcgcagagagtaatgtactgtatatgkttcacatcccccttcctctttagtgatagtttggagagtatactgcagtcaccatggttttcagtttggagaktacaaggatcagatctgtattttctagasccagcttttgtggcattctggagaggtgattggagaaccatgagagcaggcagacatctgggtgagagggcacgaggggtgagtgacggcagagccagrcttgctggagaggcagaaagggaaggattcaagtagcataaccaggaaatagaattgataggatttggtccctgctgacctgtggaataagggggaaggcagaggagttgattctagtatttctaagttggsccacttagtgatattggggtaccaggaacaggcttagtggacccacagaagtgaccagacccaggagtctctctgagcgcccaccctggcttctctgtgttggcttaccctttcttggttgggggtcatggggtggtcagcttcagtggtgtggtctgaggtgacaggtgctcaggagtgaggacagggagtagacatcaccaatgtgaatgtggaggtaggcaacaagagttattctagaactgacaaatttaatatattttgctgactgctgagttccatttggacaaatacctaatgcatttggggcttaaaacctagatgacgggttgaagggtacaacaaaccaccgtgatacatgtatacttatgtaacaaacctgcacgttctgcacatttgtcccagaacttaaagtaaaaaaaaaaaaaaaaaaaaaagggcggccgc

SEQ ID NO: 365 - DNA, 2731 bp, Homo sapiens
  misc_feature (579)..(579): n equals a,t,g, or c
  misc_feature (1532)..(1532): n equals a,t,g, or c
  misc_feature (2362)..(2362): n equals a,t,g, or c
gctggggaaggtgcagggggcctgggagactgcctctccgaagcggtgaaaccctcacccttccgtccctcccagccaccctccctaaaacttcccctgacagagggtggcagccccaggctctttgcataatcctgtggcttcgctgtcttcacccagcaccagcggacagggaagggcagagaaggccaccatggcgacactcctctcccatccgcagcagcgccctcccttcttgcgccaggccatcaagataaggcgccgcagagtcagagatctacaggatcccccgccccaaatggccccggagatccagcctccatcccaccacttctcccccgagcagcgggccctgctctacgaggacgcactctacactgtcttgcaccgcctgggtcatcctgagcccaaccatgtgacggaggcctctgagctgctgcgatacctgcaggaggccttccacgtggagcccgaggagcaccagcagacactgcagcgggtcagggagcttgagaagccaatattttgtctgaaggcaacagtgaaacaggccaagggcattctgggcaaagatgtcantgggttcagcgacccctactgcctgctgggcattgagcagggggtargtgtgccagggggcagccccgggtcccggcatcggcagaaggctgtggtgaggcacaccatccccgaggaggagacccaccgcacgcaggtcatcacccagacactcaaccccgtctgggacgagaccttcatcctggagtttgaggacatcaccaatgcgagctttcatctggacatgtgggacctggacactgtggagtctgtccgacagaagcttggggagctcacggatctgcatgggcttcgcaggatctttaaagaggcccggaaggacaaaggccakgacgactttctggggaacgtggttctgaggctgcaggttctgacgctcacgggctgggcatccccgcctgtcaggacctgcgctgccgagaggaccagtggtaccccctggaaccccgcactgagacctacccagaccgaggccagtgccacctccagttccaactcatccataagcggagagccacttcggccagccgctcgcagccsagctacaccgtgcacctccacctcctgcagcagcttgtgtcccacgaggtcacccagcacgaggcgggaagcacctcctgggacgggtcgctgagtccccaggctgccaccgtcctctttctgcacgccacacagaaggacctatccgacttccaccagtccatggcgcagtggctggcctacagccgcctctaccagagcctggagttccccagcagctgcctcctgcaccccatcaccagcatcgagtaccagtggatccagggtcggctcaaggcagaacagcaggaggagctggccgcctcattcagctcctgctgacctacggcctctcctcatccggaggttccgctctgtcttccccctctctgtctcggactccccagcccggctgcagtctcttctcagggtcntggtacagatgtgcaagatgaaggcctttggagaactgtgccccaacaccgccccattgccccagctggtgactgaggccctgcagactggcaccactgaatggttccacctgaagcagcagcaccatcaacccatggtgcagggcatcccgraggcaggcaaggccttgctgggcctggtacaggatgtcattggcgacctgcaccagtgccagcgcacatgggacaagatcttccacaataccctcaagatccacctcttctccatggctttccgggagctgcagtggctggtggccaagcgggtgcaggaccacacgacggttgtgggtgatgtagtgtccccagagatgggcgagagtctgttccagctctacatcagcctcaaggagctctgccagctgcgcatgagctcctcagagagggatggagtcctggccctggataatttccaccgctggttccagccggccatcccctcctggctgcagaagacgtacaacgaggccctggcgcgggtgcagcgcgctgtgcagatggatgagctggtgcccctgggtgaactgaccaagcacagcacatcagcggtggatctatccacctgctttgcccagatcagccacactgcccggcagctggactggccagacccagaggaggccttcatgattaccgtcaagtttgtggaggacacctgtcgcctggccctggtgtactgcagccttataaagrmccgggcccgcgagctctcttcaggccagaaggaccaaggccaggcagccaacatgctgtgtgtggtggtgaatgacatggagcagctgcggctggtngatcggcaagttgcccgcccagctggcatgggaggccctggagcagcgggtaggggccgtgctggagcaggggcagctgcagaacacgctgcatgcccagctgcagagcgcgctggccgggctgggccatgagatccgcactggcgtccgcaccctggccgagcagttggaggtgggcatcgccaagcacatccagaaactggtgggcgtcagggagtctgtcctgcctgaggatgccattctgcccctgatgaagttcctggaggtggagctttgctacatgaacaccaacttggtgcaggagaacttcagcagcctcctgaccctgctctggacccacacactcacagtgctggtggaggcggccgc

SEQ ID NO: 366 - DNA, 1008 bp, Homo sapiens
ccacgcgtccgagctatcagagtcatatcaagactgatcagtattaattatctgcatttggaagaagaggaaggaatatagacagtaaaatattatatttctatttgtgcttaggacacgtttagaatagagtttttgtttatcagctttcctaatggtgagatttggatcaaaatgcctttgcttttcctaaggctgcccaaccgtaaagggagctgtccctaaggagacgtcaggccagaagtgaaatttggctgaaagtaatttgtttatggattttaaaagttgactgttgggcaatcatttggggttaaggtttaatcattctttctcgtaatggtaatgacagtacattggactcttagaagacttttaaaatgaatataaaatgctttgttatgtgtggtggcctttatctggccagcatccttgtgacgtggagagagcatggctctcctcactttctggatgaacacacaaatgtgctgagaaaatgcatgattggttcaaagttgcaaaatcacctcccatcaagaatcattcctataatatgtacagcctctccaggagccaatggcttcatccaaagaggatccactgagctctgggttatacgaaggcagtatcctagagtgagagtcttcccttaggatgaaaagacctttagaaggtgataagaaccagaatccactcaatccccttgatgtaagaaatgggaattgtgctcagttctctctgcaggccttgctggacccaggttcagtcatgttctgtctctcaggtcccagtctgaattcctgttctgtgtgtgctctgccaaaaactttgttcaaaagtttgggaaagggctgggtgcagtggctcaggacagtaagcccagcactttggaagacctagagggagaatcgcttgagcccaggagtttaaggctgcagcaagcggtaatcatgccactgcactcctgcctgggtgatagacggacaccctgtttctaaaaaaaaaaaaaaa

SEQ ID NO: 367 - DNA, 2085 bp, Homo sapiens
ccacgcgtccgggggacagagccatcctcctttgacacctggtcttcagttctgtgcccaacgtatatagttttgacaatgaccaggttggactgtttaatgtctttcaacttaccacgtaatcctcttgtagggatcacatctttctttatgatattgtatttctctacctctaacagtaaaaattccattcaacccttaaagctcacttcaaattcttctttgagaagtttttcctttctccgcaaccagatgtacatatttgaactctctttgtacttggagggcacttctttcgtggtagttcttttatttttattaatctctgtatccttagatagtcctccaacaaccaaaggttggggactctgtcttacatatctgggtgccctcatagtgcagtaataagtaagttgattatatacgagctatgtaacttatattttttaatggttggatatcactgagtttttttttttaagaatttttttattgaggtaaacttcacataacataaaattaactattttaaagtgagaagttcagtgccacttagtattgttaacaatgttgcataaccaccacctttatttaaagttccaaaaaaaatgttctcctctaaaaggaaaccccatcccattaagcagatactctccattccttccttcctccagcccccagcaaccaccaatctgctttctgtctctatggttttatctattcttgctattttatataaatcgaattgtatgagaccttttgtgtctggcttctttcacttagtacaagtttttgagatttatttacatagtagcatgtatcaacacttcatttttatggccaaataaaattgtattatgtgtttataacacaatttatttatccactcattcattgatggactttgggttgtttctgacttttggctattgggaatagtgctgctatgaatgtttgtgtacctgtatttgtttgaatgcctattttgcattctcttggatatatatctaggagtggaactgctgggtcatatgttaattctatgtttagctttttgaggaacagacaaactgttttccacagcagttgaaccattccacattcccaccagcaatgtatgagaattccaatttctgtccacttcctcaccaacacttattattttccttttcctttttttaaaaaaaataagttatggccatcttagtgggtgtgaagtggtatctcattgtgttttttatttgcatttcctatgtaatgagctagaaactaaagtacaaactagatgggacatccagtccctttgatagataatgctgagtaaaaaatgagatgaaagacatttgtttgtttttagaacatgagtgacagtttgttaaaaagctttagaggaggaatgaaaacaaagtgaagtacacttagaaaagggccaagtggacatcttggatgtcaagtgcctagttcagtatcttttttttttttttttttttttttgagacagtgcctcactctgtcacccaggctggagtgtagtggcatgatctgggctcactgcaacctcctcctcctggattcaagcaattctcttgcttcagcctcccaagtagctgagactacaagcacccaccaccacacccggctaattttgtatttttcagtagagacggggtttcgccacattggccgtgttggtcttgaactcctggcctcaagcaatccgcctacctcagcctcccaaagtgctaggattacaggcataagccactgagcccagccctagttcagtatcttttatgtaaattataaacatctgcaacattatgtatcatatgcagatacttattgcatttcttttattagtggtgaaagtgttctatgcatttattggctcttgaatttcctcatctatgaattgtcattcacacacctacttttctgcttcgtttttacatatgtctttgcctattaaagatattatccctctgttttatattttctctcattcttgtattgccttttaaattttgttatgatgtttcattaataaacagtgttttgttttcctctataaaaaaaaaaaaaaaa

SEQ ID NO: 368 - DNA, 1497 bp, Homo sapiens
ccacgcgtccggatcctgagaaagtgactttatctctcagagccatcgtttccttatgtgtaaaacagagatgaagaatgaccacctggaaggattgtcccatgtgaaagtgcctgcctcttccagcagctgacaggtagtaggaactcactgtgggtagtagctgatggcggtggcaccagcttatgtaagcccacaagactcaagcaggattctctttttacagaggaaactccaggctacgttcatttcttactgtccctcatgtagaaaggtaaacttgggtcatacctggatactgtctctcatctttttcttttgctctgagcaagtagctcccatgtatccaatatgaatcttggtccataaattcaagcatttgagaaataaaatttcaaatatatacttgaaatgcttcaagtgtatctgagaaattcttggtatgtccacacagtgaaatattactcagtcataaaaaggagtaagtactgtacatactacgacatggatgaacctagaaaacatgcactaagtgaaacaaaccagatgcaaaagaccacatatcataagacttcatttatatgaattgtccagaataagcaaacccataaagacaaaaagtagatgactggttgccagaggataaggggagggagaatggagagtgattgctaataggtatagggtttctttttggagcgatgaaaatattctgggatcagatagttgtgatggttacatacttagtgagtatagtaaaagccgctgaagggtattctttaaaatgttgagtttacgttacatgaattacagctcaagaaaaaaagtaaaaatcactgccaaacctatggacattgaaaagataataaaggaatattatgaacaactctatgcccaccaatttgctaacttagatgaaatggaataatttcttatttctattaaaactcatacaaatagaagaccctatggagctttaatttattaatgcaaacagtacctaacaaacccacaggtcctaaactaccaaactgcattaaaaatttcggttggggcgacctcggagcagaacccaacctccgagcagtacatgctaagacttcaccagtcaaagcgaactactatactcaattgatccaataacttgaccaacggaacaagttaccctagggataacagcgcaatcctattctagagtccatatcaccaatagggtttacgacctcgatgttggatcaggacatcccgatggtgcagccgctattaaaggttcgtttgttcaacgattaaagtcctacgtgatctgagttcagaccggagtaatccaggtcggtttctatctacttcaaattcctccctgtacgaaaggacaagagaaataaggcctacttcacaaagcgccttcccccgtaaatgatatcatctcaacttagtattatacccacacccacccaagaacagggtttaacaaaaaaaaaaaaaaaaaaaaaaaaaaaa

SEQ ID NO: 369 - DNA, 1147 bp, Homo sapiens
  misc_feature (5)..(6): n equals a,t,g, or c
  misc_feature (11)..(12): n equals a,t,g, or c
  misc_feature (19)..(19): n equals a,t,g, or c
  misc_feature (1145)..(1145): n equals a,t,g, or c
cgcannccacnnggtggangccgctctagaatatggatcccccgggactgcagggagtccaaggtacagtcgccgcgtgcggagcttgttactggttacttggcctcatggcggtccgagcttcgttcgagaacaactgtgagatcggctgctttgccaagctcaccaacacctactgtctggtagcgatcggaggctcagagaacttctacagtgtgttcgagggcgagctctccgataccatccccgtggtgcacgcgtctatcgccggctgccgcatcatcgggcgcatgtgtgtggggaacaggcacggtctcctggtacccaacaataccaccgaccaggagctgcaacacattcgcaacagcctcccagacacagtgcagattaggcgggtggaggagcggctctcagccttgggcaatgtcaccacctgcaatgactacgtggccttggtccacccagacttggacagggagacagaagaaattctggcagatgtgctcaaggtggaagtcttcagacagacagtggccgaccaggtgctagtaggaagctactgtgtcttcagcaatcagggagggctggtgcatcccaagacttcaattgaagaccaggatgagctgtcctctcttcttcaagtcccccttgtggcggggactgtgaaccgaggcagtgaggtgattgctgctgggatggtggtgaatgactggtgtgccttctgtggcctggacacaaccagcacagagctgtcagtggtggagagtgtcttcaagctgaatgaagcccagcctagcaccattgccaccagcatgcgggattccctcattgacagcctcacctgagtcaccttccaagttgttccatgggctcctggctctggactgtggccaaccttctccacattccgcccaatctgtaccggatgctggcagggaggtggcagagagctcactgggactgaggggctgggcacccaacccttttccacctgtgcttatcgcctggatctatcattactgcaaaaacctgctctgttgtgctggctggcaggccctgtggctgctggctgagggttctgctgtcctgtgccaccccattaaagtgcagttccctccggaaaaaaaaaaaaaaaaagggcggcnac

SEQ ID NO: 370 - DNA, 781 bp, Homo sapiens
  misc_feature (34)..(34): n equals a,t,g, or c
  misc_feature (751)..(751): n equals a,t,g, or c
  misc_feature (762)..(762): n equals a,t,g, or c
  misc_feature (764)..(764): n equals a,t,g, or c
cccggaattcccgggtcgacccacgcgttcggcncagtgacagaggcacccagggctcagcaagctcatggcccagcttgttggactcagagggcagaagaatcacattctaaacatgataaggtatagccagcaggaggcagattcccagattgattctccagagccttgtaggtcccaagggtgcctatgacaccaatgggaatctgaaccaacacagacagcacagtcttcttaggagaccctagtgcagcagcgctggcctcctcctgagcgtgcacgcttatatggcttctgagctggccaggctacttcatgcatttggtttaatgggtcctcgtaaggcaggagaatcttcttgaacttggagttgggtctgtggtccattggtcagtactttgttcagaggcactgagggtgggaaggctcatggagctggattctgctgctgggaagctgggtgggccttgtttgtgggcctcaggttcaggactgaatgagagtcctcttgttgcgagttgagggtgtactctgggcatgccatgccctttttttgtactaagagggtagaaaagcaaagaccagactagttggcaaattggaacccaactacccagtttatttatttcttargcgtagaaggaataatttagggggaactgaagagccaacctaaaggaaaaaaaaaaaaaaagggcggccctatagaggatccctcgaggggcccaagcttacgcgtgcatgcgggcgngttacctcaantnaaatatagagagttccc

SEQ ID NO: 371 - DNA, 1346 bp, Homo sapiens
  misc_feature (291)..(291): n equals a,t,g, or c
  misc_feature (421)..(421): n equals a,t,g, or c
  misc_feature (423)..(423): n equals a,t,g, or c
  misc_feature (425)..(425): n equals a,t,g, or c
ccacgcgtccgctagaatgggcacgagctctgccctcatcacagtccaaaagtgagcacctgcctggagctgcccagaaacagccttgtggggtggggttggtgtctgacctccctccccgggggccttcgcaggcttctctgctggtgcttctgtgcctgtaggtctggattcctccagggcctgatcctgggtgcagatgcagctggaagccctgaacctgctgcacacactagtctgggcacggagtctctgccgtgccggagctgtgcagacacaggagcggctgtnaggcagtgccagccctgagcaagtgccagctggtgagtgctgtgctctgcaggagtatgaggccgccgttggagcagctcaagagcgagcagatccgggcgcaggctgaggagaggaggaagaccctgancnangagacccggcagcaccaggccagggcccagtatcaagacaagctggcccggcagcgctacgaggaccaactgaagcagcagcaacttctcaatgaggagaatttacggaagcaggaggagtccgtgcagaagcaggaaaccatgcggcgagccaccgtggaaccggagatggagctgcggcacaagaattgagattgctgccgatggagaccgatgcccgggcgcgcgccaaggccgagcgggagaatgcagacatcatccgcgagcagatccgcctgaaggcgtccgagcaccgtcagaccgtcttggagtccatcaggacggctggcaccttgtttggggaaggattccgtgcctttgtgacagaccgggacaaagtgacagccacggtaaacatattcataaaacagggctggcaggtggctgagaggcagcatgtgggggcctcctggagccccaggtcctgtccctgccggctctgcacagccctgtagctctcccagcacagagcaaacccacgttgtacctgctgggctcggctgctcctccctccttgagctgggagaaaaaaatgcagttgccagcctgggccacacggtgagaccccatctctacgaagaataaaacattagctgggtgtgatggtggcgcctgtggtcctgctactcgagaggctgaggtaggaggatcacttaagcccaggaggtttgggctgcagtgagccaacattgcaccactgcactccattcttggcgagagaataagaccttgtctcaagaaaaaaatggccaggcggtagtggctcaggcctgtaatcccagcattttcggaggcggaggtgggcggatcacgaggtccggagatcgagatcatcctggtaagagtgaaaccctgtctctaccaaaaaaaaaaaaaaaaaaa

SEQ ID NO: 372 - DNA, 536 bp, Homo sapiens
gatttgaagagggcttgccttccaacctataggcactatatatgcttttggaaaaagtaattaggttaagatgcagttgttttgttttgctttgtttttcccttagctgggttggggtttctagcagcaatgatgtacaggtggatcttttttcacattaacactaccagctgctccatggctatagtgcttaggaatatctcagaatttcaacagatctatcagctgcaatatctaggagtcttgccaacacagagacacattcacatgctgaaaagagcatgagttgaaggcacagctggggacttttgatgcaggtccagaactggatggttgtgaagccattagagatatttaaattgtccagaatttcaggctctgctttaaaaactaggctacaaaccctcattcagaaagaggtcagtaatatgcctgtgagttagaaagatactggaaacatttcaatgccaaaagtaacatttttttccagaatgctatgactaaattttttaaaaaaaaaaaaaaagggcggccgc

SEQ ID NO: 373 - DNA, 1898 bp, Homo sapiens
  misc_feature (265)..(265): n equals a,t,g, or c
  misc_feature (1854)..(1854): n equals a,t,g, or c
  misc_feature (1859)..(1859): n equals a,t,g, or c
  misc_feature (1888)..(1888): n equals a,t,g, or c
  misc_feature (1897)..(1897): n equals a,t,g, or c
gggtggagagagttcggcgctcagagaggtaccagaccatgaagctcttcacccagatcttcggggtcggtgtgaagactgctgaccggtggtaccgggaaggactgcgaaccttagatgacctccgagagcagccccagaaactaacccaacagcagaaagcggggctccagcaccaccaggacctgagcaccccagtcctgcggtccgatgtagatgccctgcagcaggtggtggaggaagctgtggggcaggccctgctggngccaccgtcacgctgaccggcggcttccgcagggcctcatcctgtaccaccagcaccagcacagctrctgtragtcccctacccgcctggcccaacaragccacatggacgcttttragagaagtttctgcattttccgcctaccacaacctccaggggctgctgtggggggatccacgaggccctgcccatcctggaagccgtgagagtggacttggtagttgcacccgtcagccagttccctttcgccctgctcggttggactggctccaagcttttccagcgggagctgcgccgcttcagccggaaggagaagggcctgtggctgaacagccatgggctgtttgacccggagcagggaagcagcagtggcaagactcctaggtcacggaagtcctgcttctgttgcagaagacatttttccamgmggcttcagaggaagacatcttcagacacctgggccttgagtaccttcctccagagcagagaaacgcctgagcctgcctgtktcccccacttccactcaggaaattgggctgcccccaacctggccactgaatgtctccaggcagatatgctgccccctgacccccaccttcacccctccccgccaaggcctggctcttccggaggtcaattgtgcctgcaggatcagttgagcccctgctggtgtgctgcagggtgtgatgaggtgggagccctcagtgccagcctcatcactgtgtgaccctgggtctgctcttagcctccccatggctcacgttcctgccctggatgggatgtgagtggggcccacatcgtggagctgtggtggggcctgcagtcatgaatggcaagtggtccctgatgtgcagtgtctcattagttgcactgcagttaactgtggctcctgcagggcaccctgcccagaatgcccagaagagaaccatgcatacctgcactgcatttgagagccatgagctggaggctgtggttcgtgccagcaaggagcctactgtctggtgtgctgtaggcatctggagagggagagggcctgggtaggagctgggaggaagataattttcaactatggggcttcagtactgcagcgccccgagccaggctctgtgcttctgcctttaaggcctgttctcagcacaatgtctcaaaaataggtcatatcctgccactcccgtcgcagagccctttaatggttccaaaccctaagtccacacatagcccctggctctggcatctctccagccccactggccccgagctgcttgactcaccggcttcctatttgatgcacccaggcccccttgtggccaactccctccccttctcactgaggcagaagcactgaggtgggctggacatgggtgccctccacgtccctcatatccccaggcacactctggcctcaggttttgccctggccatgtcatctacctggagtgggccctccccttcttcaggccttgaatcaaaagccactttgttaggcgaggatttcccagaccactcatcacattaaaaaatattttgaaaacatgcagtaaaaaaaaaaaaaaaaaaaaagggcggccgctttaaaaggatccttcganggggncccaagcttacgccgggcattgccaacgncataacttnt

SEQ ID NO: 374 - DNA, 1982 bp, Homo sapiens
  misc_feature (35)..(35): n equals a,t,g, or c
cggacgcgtgggcgagcccgggcgccggcgggcgnccgtcgcgtctgacagaccactgcagaccacgggccgaggcccagcgcccgtccgcagcgcgsscggcatggcggcgacaaggagccccacgcgggcaagggagcgggagcggtctggcgctsccgccgcaggaagtgaccaagttcactcctggatgctagctacaagccaagccttagacactgtctggagaatggcaaaaggctttgtgatgttggcagtttcatttctggtggctgccatctgctacttccggaggctacatttatattcagggcacaagctgaaatggtggattggatatctgcagagaaaattcaaaaggaacctcagtgtggaggcagaggttgatttactcagttattgtgcaagagaatggaaaggagagacaccccgtaacaagctgatgaggaaggcttatgaggagctattttggcggcatcacattaaatgtgttcgacaagtaaggagagataactatgatgctctcagatcagtgttatttcagatattcagccagggcatctcttttccatcatggatgaaagaaaaggacattgttaagcttcctgaaaaactgctgttttcacaaggttgtaattggattcagcagtacagttttggtcctgagaagtatacaggctcgaatgtgtttggaaaactacggaaatatgtggaattattgaaaacacagtggactgaatttaatggcattagagattatcacaagagaggaagtatgtgcaacacccttttttcagatgccattctggaatataaactttatgaagctttaaagttcatcatgctgtatcaagtcactgaagtttatgaacaaatgaagactaaaaaggtcattcccagtctttttagactcctgttttccagggagacatcctctgatcctttgagcttcatgatgaatcacctgaattctgtaggcgacacatgtggactagagcagattgatatgtttatacttggatactcccttgaagtaaagataaaagtgttcagactgttcaagtttaactccagagactttgaagtctgctacccagaggagcctctcagggactggccggagatctccctgctgaccgagaacgaccgccactaccacattccagtcttttaagtccgctgggggccgaacagcagtgctcaccagtgacggtggtcacagttgcaataaagtctctctctgaaaccaaagctagcatttcagcatggaaggaattaggaccttttcttcaggattacaggtacactggatgcagccatgcatggatggtttttctttatttttcagtgatttcctctgaagcagctgcactgatacatttgggagttggtggcttgactttgtccataaggggcgtggccacttcacatgatggcgggcctttaagagcacaaagaagtttaatatggacaacaacaggaaaaagcaagaagaaaacaagtagggaaaaacagctaacctggagagaaagaatttctttaacctttatgttcttcattaaaaatcttatcttggactgatttgagggatttttagaaacatggccttattttatataagcattaccttcccaggaatctttgttgtatattaatttttgataaccatttgattaactttaaaattaagtatatgtgtgtatatatacatatgtatgtttatatacacacatgtatctgtatagttttatatatacatatatacacatagacatacagagaaccactactttgtaatagtgtacagtttgttttatatctctttactttttttgttactattttatctggccagcgtaatagttttatttagattttttaaaattctgtagattaaagcaaatgacagttattgaactatcacaaaactattaaactgtggtacatttaaaaaaaaaaaaaaaaaaaaaaaaaaactcgag

SEQ ID NO: 375 - DNA, 3034 bp, Homo sapiens
  misc_feature (5)..(5): n equals a,t,g, or c
aaggntaccgtccctcccctcccaagtgctgagccactgcgctcggccagcgtaaatttcttctaaagatacattttagctattaaaaaaatctattttagctatagctacagcttttagctatcagtagctatagataaaaataactatattctaatatggcttaaatggagatatgaccctctcattgatattttcctatgtgtaattatttttgaagcattgtgagttctgtgaaattttgctatttattgaactatgaaagcacttgattttcttaactcttgagtgccagaaatttgggaagaatattcctgaggattagacaaataatgataccttgtgtatatacatggtgttggaatgtctacatttcccttaagggcatcaattccataagttggtctacagataacttcacattagttgaccattgtttaacaatgctttaaagttacatttgcataagaatccaacttgatttttctaggaaaagttaaggaaaagaaccgaagaacctgatcgtgatgagcgtctaaaaaaggagaagcaagaaagagaagaaagagaaaaagaacgggagagagaaagggaagaaagagaaaggaaaagacgaagggaagaggaagaaagagaaaaagaaagggctcgtgacagagaaagaagaaagagaagtcgttcacgaagtagacactcaagccgaacatcagacagaagatgcagcaggtctcgggaccacaaaaggtcacgaagtagagaaagaaggcggagcagaagtagagatcgacgaagaagcagaagccatgatcgatcagaaagaaaacacagatctcgaagtcgggatcgaagaagatcaaaaagccgggatcgaaagtcatataagcacaggagcaaaagtcgggacagagaacaagatagaaaatccaaggagaaagaaaagaggggatctgatgataaaaaaagtagtgtgaagtccggtagtcgagaaaagcagagtgaagacacaaacactgaatcgaaggaaagtgrtactaagaatgaggtcaatgggaccagtgaagacattaaatctgaagtgcagctktaagtatgcacagatgaagatggaactaagccgagtaagaagacatacaaaagcctcttctgaaggaaaagacagtgtagtcctgcaaaacattttgaggtacattgttttgtctcagctattttgtagcagactcgtgcccccattagtgtgcctctttggaaattatcgcccacatttgtaatatagtcgccattgaaaagttaattatcctttttttagggattttgatgtcatttcttttttttttttaataaaaaggttgaactgtttttttttttctttttggtattaagtccatcttgtgttggtacattggcagagacatatgctttaaaaacttaaatatttcggaggcacatgttggactactttgttttaattaaactgctagtatttctttgtcaaggatgtttctagttttttgctttattgccttgcattctaatgcagtttgttctgtaactcgagagccagtagcattggattgatggaagtgtagggtttatgaattattgcagctgactaccatacctcacacagcgttggtgttgtgagcggcccatgaaaagccaaattaaaaatcaaggattcagtcaaactaagcaggtactcatgccaggtactcctttctctacccacatccatgtttgaatgctattgcctgtgatctttacgcttaactgttgtgtatcttttttgttctttacaagaagtgcagaggggttttttgtgtattgcgtgaaaacttataaaacaaatgttaacagaatggaattttttttcaactgtatgtagggctgcagtggtggccagaattagatatctttaaagaattttaaatacaataaacacttcatattattcgccttgttacactcaatgcaattctcaagtctataagaggtatgtgcttaatatttcctactgtgtaggagaatttgcagtcagccataggtatgtaggaatagtcactcactggctgatacatttaaagcagcagtgtgaatagcaaggacagacaccttcaatttgtgaaatcaaagaactgatgcactatatagaacgaatttgggtttttaaagaaatattaaaagttaggtactgtaagtgttcttaaaacctgtaaacttcattctgtgggctagtggtgtgggacaaaatattcctaatgaaaggaagtaccaattagttgatttgttggtggcattccccttttgggaaagcaatgtaaggttatgtctgtgtatgtcattcacacttaggcaagcatacacaggcacatggctttaagaaccacactgatgccttgataattaaaaagaatacaagcattccatgtacacatgttaattagcagttagtgactgggccaacactttctcataaaaattggccttttacatgttgtctaattatcatttttccccaaattttgcgttgtaggactactgttcgaagatttttggaagaatactgagaacggcataaagtgaagatcgacatttaaaaaatgaggtgaaagaaagctatagtggcatagaaaaagtataaagctcagttagtttttttattattattattattaaaagttaattcaggactgatgtgacctaccagatttcagaacatgtgttaatagtatatatgccactgaaaacttaggtcctgtatcatacttttttctttaagactttttaagaaatattacttaaacatgtggcttgctcagtgtttaattgcaagttttcaatcttggactttgaaaacaggattaaacgttagtattcgtgtgaatcagactaagtgggatttcatttttacaactctgctctacttagcctttggatttagaagtaaaaataaagtatctctgactttctgttaaaaaaaaaaaaaaaaaaaaaaaaaaaaaaaaaaaaaaaaaaaaaaaaaaaaaaaaaactcgag

SEQ ID NO: 376 - DNA, 2008 bp, Homo sapiens
gcccacgcgtccgcccacgcgtccgcccacgcgtccggcggccgtggagtttgtgacatacgaggtgacacccctcgagtcacttcccttcaactccagctggagcgcctgcttggctttgggttcgttctgcagccttcgccccgctcctagcctcagggccggactccagcgcagagcccagcccagcgcagctgccagcagccacccagccgcccagccgcccagccccgcacgaaacccggccagagcttcctagcagcccgagccatgaacaccgaaatgtatcagacccccatggaggtggcggtctaccagctgcacaatttctccatctccttcttctcttctctgcttggaggggatgtggtttccgttaagctggacaacagtgcctccggagccagcgtggtggccatagacaacaagatcgaacaggccatggatctggtgaagaatcatctgatgtatgctgtgagagaggaggtggagatcctgaaggagcagatccgagagctggtggagaagaactcccagctagagcgtgagaacaccctgttgaagaccctggcaagcccagagcagctggagaagttccagtcctgtctgagccctgaagagccagctcccgaatccccacaagtgcccgaggcccctggtggttctgcggtgtaagtggctctgtcctcagggtgggcagagccactaaacttgttttacctagttctttccagtttgtttttggctccccaagcatcatctcacgaggagaactttacacctagcacagctggtgccaagagatgtcctaaggacatggccacctgggtccactccagcgacagacccctgacaagagcaggtctctggaggctgagttgcatggggcctagtaacaccaagccagtgagcctctaatgctactgcgccctgggggctcccagggcctgggcaacttagctgcaactggcaaaggagaagggtagtttgaggtgtgacaccagtttgctccagaaagtttaaggggtctgtttctcatctccatggacatcttcaacagcttcacctgacaacgactgttcctatgaagaagccacttgtgttttaagcagaggcaacctctctcttctcctctgtttcgtgaaggcaggggacacagatgggagagattgagccaagtcagccttctgttggttaatatggtataatgcatggctttgtgcacagcccagtgtgggattacagctttgggatgaccgcttacaaagttctgtttggttagtattggcatagtttttctatatagccataaatgcgtatatatacccatagggctagatctgtatcttagtgtagcgatgtatacatatacacatccacctacatgttgaagggcctaaccagccttgggagtattgactggtcccttacctcttatggctaagtctttgactgtgttcatttaccaagttgacccagtttgtcttttaggttaagtaagactcgagagtaaaggcaaggaggggggccagcctctgaatgcggccacggatgccttgctgctgcaaccctttccccagctgtccactgaaacgtgaagtcctgttttgaatgccaaacccaccattcactggtgctgactacatagaatggggttgagagaagatcagtttgggcttcacagtgtcatttgaaaacgttttttgttttgttttgtaattattgtggaaaactttcaagtgaacagaaggatggtgtcctactgtggatgagggatgaacaaggggatggctttgatccaatggagcctgggaggtgtgcccagaaagcttgtctgtagcgggttttgtgagagtgaacactttccactttttgacaccttatcctgatgtatggttccaggatttggattttgattttccaaatgtagcttgaaatttcaataaactttgctctgtttttctaaaaataaaaaaaaaaaaaaaaaagttttgccctataggtcgac

SEQ ID NO: 377 - DNA, 947 bp, Homo sapiens
ccacgcgtccgcggacgcgtgggaaaaaaataaaaacagcccaaccgagtttcggaattaagtattcttctagtaagtgattcaaacttgtaatatttgccacaggactgacttatttatttactagctagaagctcttaagttcacttgtttatcagggcatatacagaagggtttgttaaaactcgatgttaactttacaactttctgacctggtgcatgaattctcaagtactgtatttcactgtgttggtgtgtctgatggaaatttcgaggtggtcccacaaaaatattttatgtagtgtgccttcaaagagaaccatttatttctcttcacttatcgtcccacaaagtcacatttggtggtggtcagccaagtcgcatctggtctagttttactcttgtcccaattttaaagagaaatgggaatgagtttgccctggtgagacccataccattgcaatgattatcttgagcacttaaagtccagtgttggctgttagtgtatttgatattctgcctgtctcctcatggttgaaatatgtctgaagaatagcagcataatctcttggctgtttatacttttttaaactttcctgtgttgtaaatattgtatacttttggtgattccagctatgtaacctctatgctctgtaaggtgattatttgtatatagcaacatggcccagtgatattatatagtttcccaatggagaggttattgagtaacctttgcattagtttaaacactaccagaagaatgctgagccaactataaacactcaattttgtatgttttccaaattgtacttattactgcttttgatactgtattacgtgccaatagtttcccaatcacatagcaggcaagagatattttgtactttttgatccactgtaatatttaataaaaaatgttactatctgttaaaaaaaaaaaaaaaaaa

SEQ ID NO: 378 - DNA, 5061 bp, Homo sapiens
  misc_feature (5057)..(5059): n equals a,t,g, or c
ggcacaagcagctcgccgcgcagcggctgtatttgcggcctgtgcgagtaggcgcttgggcactcagtctccctggcgagcgacgggcagaaatctcgaaccagtggagcgcactcgtaacctggatcccagaaggtcgcgaaggcagtaccgtttcctcagcggcggactgctgcagtaagaatgtcttttccacctcatttgaatcgccctcccatgggaatcccagcactcccaccagggatcccacccccgcagtttccaggatttcctccacctgtacctccagggaccccaatgattcctgtaccaatgagcattatggctcctgctccaactgtcttagtacccactgtgtctatggttggaaagcatttgggcgcaagaaaggatcatccaggcttaaaggctaaagaaaatgatgaaaattgtggtcctactaccactgtttttgttggcaacatttccgagaaagcttcagacatgcttataagacaactcttagctaaatgtggtttggttttgagctggaagagagtacaaggtgcttccggaaagcttcaagccttcggattctgtgagtacaaggagccagaatctaccctccgtgcactcagattattacatgacctgcaaattggagagaaaaagctactcgttaaagttgatgcaaagacaaaggcacagctggatgaatggaaagcaaagaagaaagcttctaatgggaatgcaaggccagaaactgtcactaatgacgatgaagaagccttggatgaagaaacaaagaggagagatcagatgattaaaggggctattgaagttttaattcgtgaatactccagtgagctaaatgccccctcacaggaatctgattctcaccccaggaagaagaagaaggaaaagaaggaggacattttccgcagatttccagtggccccactgatcccttatccactcatcactaaggaggatataaatgctatagaaatggaagaagacaaaagagacctgatatctcgagagatcagcaaattcagagacacacataagaaactggaagaagagaaaggcaaaaaggaaaaagaaagacaggaaattgagaaagaacggagagaaagagagagggagcgtgaaagggaacgagaaaggcgagaacgggaacgagaaagggaaagagaacgtgaacgagaaaaggagaaagaacgggagcgggaacgagaacgggatagggaccgtgaccggacaaaagagagagaccgagatcgggatcgagagagagatcgtgaccgggatagagaaaggagctcagatcgtaataaggatcgcagtcgatcaagagaaaaaagcagagatcgtgaaagggaacgagagcgggaaagagagagagagagagaacgagagcgagaacgagaacgggagcgagagagagagcgagagagggaacgggagcgagaaagagaaaaagacaaaaaacgggaccgagaagaagatgaagaagatgcatacgaacgaagaaaacttgaaagaaaactccgagagaaagaagctgcttatcaagagcgccttaagaattgggaaatcagagaacgaaagaaaacccgggaatatgagaaagaagctgaaagagaagaagaaagaagaagagaaatggccaaagaagctaaacgactaaaagaattcttagaagactatgatgatgatagagatgaccccaaatattacagaggaagtgctcttcagaaaaggttgcgtgatagagaaaaggaaatggaagcagatgaacgagataggaagagagagaaggaggagcttgaggaaatcaggcagcgccttctggcagaagggcatccagatccagatgcagagctccagaggatggaacaagaggctgagaggcgcaggcagccacaaataaagcaagagccagaatcagaagaggaggaagaagaaaagcaagaaaaagaagaaaaacgagaagaacccatggaagaggaagaggagccagagcaaaagccttgtctgaaacctactctgaggcccatcagctctgctccatctgtttcctctgccagtggcaatgcaacacctaacactcctggggatgagtctccctgtggtattattattcctcatgaaaactcaccagatcaacagcaacctgaggagcataggccaaaaataggactaagtcttaaactgggtgcttccaatagtcctggtcagcctaattctgtgaagagaaagaaactacctgtagatagtgtctttaacaaatttgaggatgaagacagtgatgacgtaccccgaaaaaggaaactggttcccttggattatggtgaagatgataaaaatgcaaccaaaggcactgtaaacactgaagaaaagcgtaaacacattaagagtctcattgagaaaatccctacagccaaacctgagctcttcgcttatcccctggattggtctattgtggattctatactgatggaacgtcgaattagaccatggattaataagaaaatcatagaatatataggtgaagaagaagctacattagttgattttgtttgttctaaggttatggctcatagttcaccccagagcattttagatgatgttgccatggtacttgatgaagaagcagaagtttttatagtcaaaatgtggagattattgatatatgaaacagaagccaagaaaattggtcttgtgaagtaaaactttttatatttagagttccatttcagatttcttctttgccacccttttaaggactttgaatttttctttgtctttgaagacattgtgagatctgtaattttttttttttgtagaaaatgtgaattttttggtcctctaatttgttgttgccctgtgtactcccttggttgtaaagtcatctgaatccttggttctctttatactcaccaggtacaaattactggtatgttttataagccgcagctactgtacacagcctatctgatataatcttgttctgctgatttgtttcttgtaaatattaaaacgactccccaattattttgcagaattgcacttaatattgaaatgtactgtataggaaccaacatgaacaattttaattgaaaacaccagtcataaactattaccacccccactctcttttgatcagaaatggcaagcccttgtgaaggcatggagtttaaaattggaatgcaaaaattagcagacaatccattcctactgtatttctgtatgaatgtgtttgtgaatgtatgtgtaaaagtctttcttttccctaatttgctttggtggggtccttaaaacatttcccaactaaagaatagaattgtaaaggaaaagtggtactgttccaacctgaaatgtctgttataattaggttattagtttcccagagcatggtgttctcgtgtcgtgagcaatgtggtttgctaactggatggggttttcttattaataagatggctgcttcagcttctcttttaaaggaatgtggatcatagtgatttttccttttaattttattgctcagaaatgaggcatatcctaaaaatcctggagagctgtatttaatgcatttttgcactaattggtccttagtttaattctattgtatctgtttatttaacaaaaaattcatcataccaaaaagtgtaagtgaaaaccccctttaaaacaaaacaaaaaaatgaaataaaattaggcaaattgacagacagtgagagttttacaaacatgataggtattctgctcggcaatttgtaagtttacatgttatttaaggataaaggtaaatcattcaaggcagttaccaaccactaactatttgttttcatttttgtcttgtagaaggtttatatcttgttttaccttggctcattagtgtttaaaaatgtactgatgatgtgcttagagaaattcctggggctttcttcgttgtagatcagaatttcaccagggagtaaaattacctgaaaacgtaagaagttttaaacagcttttcacacaaattagatgcaactgttcccatgtctgagtacttatttaaaagaaaggtaaagattggcctgttagaaaaagcataatgtgagctttggattactggattttttttttttttaaacacacctggagaggacatttgaaaacactgttcttaccctcgaaccctgatgtggttccattatgtaaatatttcaaatattaaaaatgtatatatttgatcctggggactcatattctttcagaatcatgtaaataaatggcatcatgttgtaattgtgtggtgcatactagaaaagttaaaaatatgggctgamctttttatggacttgatttttatgactattggtatctaaaggtcaaggaagccatttacattattttggatgaatctactatacatctatggaaatgtctcttttattttaaattctggtttctcaacggaaaatttcagaaaagatgccccttgccattttcgttaatttttcagtcttttcttagacacacccccagcctaagaccttgttcgaggagtttattgtgtctgtcttttcttaacatactgcactgttcttaagcatcatattgtgttgtttttatttagccactattaacatgaaggtttattcaggtagatttgatttcctttgcttcgtttcttctcctgctctgtcaactgtacttatcttaaagggccactctaaaaacaagggagatgtcgtaatctgaaacctttggggagatgtactctgtactgcataacatctccagtgaggtttgtgacaggacctcaactaaatatatgaatttgtgcaagttcatatattaaagtttctgcagcagagtgaaaattgttacagtaaatgtggtagaaactgttaatcgcttaatgccagtttaaatcatgttttgtaaccaagcttcagtaaaaggctttagattgtcagagttggttgatttttagaattgtatatataaagaattagacattaaacaggcatattctagtgtctgaaaatacacmtaagaaatttctawwaaaaaaaaaaaannnaa

SEQ ID NO: 379 - DNA, 1158 bp, Homo sapiens
  misc_feature (826)..(826): n equals a,t,g, or c
  misc_feature (842)..(842): n equals a,t,g, or c
caaggtcgccggtatcgataagctttgatatcgaattcaaccaatcactgttatcagggcagtcatccctttgtccagccatgctcctgtatcagagaagcactgccatgacagatattgggcaaactgatatatgacccccaatactgggtttggtgctcattctcgttaatgcatgtgttaagggtttcattctaatcatctgcaaaaaagtgattgttgtctttaaaatgttaccaaaactagtcttttagcaagaatcttactagaataaaatggctcttgctacctgtatttttaatcagcctatgtatattgatcccattcctgatattatcaccttaatatataacagccccaattcctcttattgagcattggttgctagggaaagcaaaaagttaagagaaaactactgagattttctctctaatttgcctctgtctgcctctaactagcttagagatcttggacaagtcctttaacagttctctgtcagctgcttggactgtgaaatagagataaaagtacctgtctawttcaggccgggcacggtggctcacgcctgtaatcccagcactttgggaggcccaggagggtgggtcacgaggtcaggagattgagaccatcctggctaatgcagtgaaaccccgtttctactaaaaatacaaaaaaattagccgggggtggtggtgggcacctgtagtcccagctacctgggaggctgaggcaggagaatggcatgaaacccggaggcggagcttgcagtgagccgagatcacgccacggcattgcagcctgagtgacagagtgagacyccstctcnaaaaaatwaaaccttnaaaaaaaaaaaaaaacaactgtctatttcatagaggtattgtgaggattaaatgagataatgttgatgaagtaattttgaaaagcatatcaatgtgcagctgtaaagttttattcatatttaccagccaggcaagtagtattagctgttataagtaaaggtaaacatccaagtgcatatgttcagatgattatttttaatatacattttctcctgatatatattcttctagttgcagatctgattggttgaattcgatatcaagcttatcgataccgtcgacctcgagggggggcccggtacccaattggccctag

SEQ ID NO: 380 - DNA, 2791 bp, Homo sapiens
gtcacctgacacctcaccggtccggaattcccgggtcgacccacgcgtccgcccacgcgtccgtaatccgtggttttctggagcatttcacagcctaggaacatacaaggggggcatctccctggaatgtaaattgactaagaggaattcaataatggtcaaatgaatgcagaattttagagtcttgcttagtattctcaccacatttcgtttartctactcatactctttttctcttactgctgacactagatggaaaaactcttaattaaaagtatttcacaaaatgtgctcgttttcagtcattccgtttccactccagcctgttgtgttgtttttttgaaataataatttaaagtaattttccttttgcaggatggcatagtcaatccaacaataagaaaagatttgaaaactggaccgaaattctactgctgtccaattgaaggctgccccagaggccctgagagaccgttttctcagttttctctcgtaaaacagcactttatgaaaatgcatgctgagaagaagcacaaatgtagtaagtgcagcaattcgtacggtacagaatgggacctgaaaagacatgcagaggactgtggcaagaccttccggtgcacatgcggctgtccctacgccagtagaacagcactgcagtctcacatctaccgaactgggcacgagatacctgcagaacacagggacccacctagtaagaaaaggaaaatggaaaactgtgcacaaaaccagaagttatccaacaagaccattgaatcattgaacaaccaaccaatccctagaccagacactcaagaactagaagcttcagaaataaagctagaaccatcttttgaagactcttgtggctctaacactgacaagcagactcttacaacaccaccgagatatcctcagaagttgcttttaccaaagcccaaagtggctttggttaaactacccgtgatgcagttttctgtcatgcctgtctttgtgcctacagccgactcctcagcccagcctgtggtgttaggtgttgatcagggctctgccacaggggctgtgcacttaatgcccttgtcagtaggaaccctgatcctcggcctagattcagaggcttgctctcttaaggagagcctacctcttttcaaaattgctaatcctattgctggtgagccaataagtactggtgttcaagtgaactttggtaaaagtccatctaatcctttacaagaactagggaacacgtgtcaaaagawtagcatttcttcaatcaacgtgcagacagatctgtcttatgcctcacaaaactttataccttctgcacagtgggccactgctgattcctctgtgtcgtcttgttctcaaactgatttgtcgtttgattctcaagtgtctcttcccattagtgttcacactcagacatttttgcccagctctaaggtaacttcatctatagctgctcagactgatgcatttatggacacctgtttccagtcaggtggggtctccagagaaactcaaaccagtgggatagaaagtccaacggatgaccatgtacagatggaccaagctggaatgtgcggagacatttttgagagtgttcattcatcatataatgttgctacaggtaacattataagcaacagtttagtagcagagacagtaactcatagtttgttacctcagaatgagcctaagactttaaatcaagatattgagaaatctgcaccaattataaatttcagtgcacagaatagtatgcttccttcacagaacatgacagataatcagacccaaaccatagatttattaagtgatttggaaaacatcttgtcaagtaatctgcctgcccagacattggatcatcgtagtcttttgtctgacacaaatcctggacctgacacccagctcccatctggcccagcccagaaccccggaatcgattttgatatcgaagagttcttttcggcctcaaatatccagactcaaactgaagagagtgaacttagcaccatgaccaccgagccagtcttggagtcactggacatagagactcaaacggacttcttactcgcagatacctctgctcagtcctatgggtgtaggggaaattctaacttcttaggccttgagatgtttgacacacagacacagacagacttaaactttttcttagacagtagccctcatctgcctctgggaagtattctgaaacactccagcttttccgtgagtactgattcatctgacacagagacccaaactgaaggagtctccactgctaaaaatatacctgctctagaaagcaaagttcagttgaacagtacagaaacacagaccatgagttctgggtttgaaaccctggggagcttgttcttcaccagcaacgaaactcagacagcaatggatgactttcttctggctgatctggcctggaacacgatggagtctcagttcagctctgtagaaacccagacttctgcggaaccacacacagtctccaacttctaaaactaacggtggagtccatgtgtgaaatggcatctaccatttcctctggattaaaactacggactggggacaacagtattaattcgattgaatgtggctgatgatgcagttgcttagcttctttgtgtttctttgccttttgtacttgtaaacagaaatttgcgtataaatgtgagtgtattataaagtttgagatgttgatctaaattgtttttgtgttgcctacatttgccttttcacagctagtcttttcatgttaaaaaaaaaaaaaaaaaaaaaa

SEQ ID NO: 381 - DNA, 1947 bp, Homo sapiens
ggtggcacatgcctgtaatcccaactacttgggaggctgaggcaggagaatcgcttgaacccaggaggtcaggttgcggtgagccgagatcttgccatcatactccagcctgggcaacaagagtgaaactccatctcacacaaaaaaaagaatgttgaatattggcccgcactctcttctggcttgtagtgtttccgcagagaaatccactgttagtctgatgggcttccctttgtggataacccgacctttctctctggctgcccttaacgtttttttcattcctttcaaccttggtgaatctgatgattacgtgtcttggggctgctcttctcgagaagtatctttgtggtggtctctgtctttcctgaacttgaatgttggtctgtcttgctaggttggggaagttctcctggataatatcctgaagagtgttttccaacttggttccattctccccatcattttcaggtacaccagtcaaacataggtttggtcttctcacatagtcccatatttcttggaggctttgttcattccttttcattcatttttctctaatcttgtcttcatgctttatttcattaagttgatcttcaatctctgaatatccttttttccacttgatcgatttggctattgatacttgtgtatgtgctcacaaagttcttgtgctgtgtttttcagctccatcaggtcattgatgattttctctagactggttattctagttagcaattcttctaaccttctttcaaggttcttagtttcccttgcagtgggttagaatgtgctcctttagctcggaggagttacccaccttccgaagcctacttctgtcaattcgtcaaactcattttccatccagttttgtttccttgctggcgaggagttatgatcccttggaggagaagaggtgttctggtttttggaattttcagccttcttgtgctggtttttcctcatctccctggatttatctgcctttggtctttgatgttggtgacctttggatggggtttttgtgtggacatcgtttttgttgatgttgatgctattcctttctgttttttagtttttctcctaacaggcaggcttctctcctgcaggcctgctggagtttgctggaggtccactccagaccctgtttgcctgagtatcactagcagacactgcagaacagcaagattgctgcctgctccttcctctggaagtttcgtcccagaggggcacccgccagatgctagtggagctctcctgtatgaggtgtctgttgacccctgctgggaggtgtctcccagtcaggaggcacaggggtcagggacccacttgaggaggcagtctgtcccttagcagagtttgagtgctgtgctgggagattcgctgctctcttcagagctggcaggcaggaacatttacgtctgctgaagctgcacccacagccgcctcttccgccaggtcctctgtcccagagaggtgggagttttatctgttagcccctgactggggctgctgcctttctttcagagatgccctgtccagagaggaggaatctagagaggcagtctggctatggcagctttgcagagctgtggtgggctctgccaattcgaacttcccagaagctttgtttatactgtgaggggaaaaccacctactcaagcctcagtaatggtggacgcttctccccacaccaagcttgagagtcccaggtcgacttcagactgctgtgctggcagcaagaatttcaagccagtggattttagcttgctgggctctgtggcggtgggatccactgatccacttggctccctggcttcagttccctttccaggagagtgaacagttctgtcgctggccttccaggtgtcactggggtatggaaaaaaaaaaaaaaaaaactcgagggggggcccgtacccaattcgcccctaagtgatcgtacac

SEQ ID NO: 382 - DNA, 1081 bp, Homo sapiens
  misc_feature (1076)..(1076): n equals a,t,g, or c
  misc_feature (1078)..(1078): n equals a,t,g, or c
gctgagcacgccctctgagccgctcggtggacaccaggcactctagtaggcctggcctacccagaaacagcaggagagagaagaaacaggccagctgtgagaagccaaggacaccgagtcagtcatggcacctaaggcggcaaagggggccaagccagagccagcaccagctccacctccacccggggccaaacccgaggaagacaagaaggacggtaaggagccatcggacaaacctcaaaaggcggtgcaggaccataaggagccatcggacaaacctcaaaaggcggtgcagcccaagcacgaagtgggcacgaggagggggtgtcgccgctaccggtgggaattaaaagacagcaataaagagttctggctcttggggcacgctgagatcaagattcggagtttgggctgcctaatagctgcaatgatactgttgtcctcactcaccgtgcaccccatcttgaggcttatcatcaccatggagatatccttcttcagcttcttcatcttactgtacagctttgccattcatagatacatacccttcatcctgtggcccatttctgacctcttcaacgacctgattgcttgtgcgttccttgtgggagccgtggtctttgctgtgagaagtcggcgatccatgaatctccactacttacttgctgtgatccttattggtgcggctggagtttttgcttttatcgatgtgtgtcttcaaagaaaccacttcagaggcaagaaggccaaaaagcatatgctggttcctcctccaggaaaggaaaaaggaccccagcagggcaagggaccagaacccgccaagccaccagaacctggcaagccaccagggccagcaaagggaaagaaatgacttggaggaggctcctggtgtctgaaacggcagtgtattttacagcaatatgtttccactctcttccttgtcttctttctggaatggttttcttttccattttcattaccacctttgcttggaaaagaatggattaatggattctaaaagcctaaaaaaaaaaaaaaaaaaaaaaaaaaaaaaaaaaaaaaaaaaaaaaaacagnanccc

SEQ ID NO: 383 - DNA, 1273 bp, Homo sapiens
acgaaagcggccaagtagagctccgtcctgacgcgccgcctcccgtgggctccggccggctaagccgcggcggacaactatgctgaaagccaagatcctcttcgtggggccttgcgagagtggaaaaactgttttggccaactttctgacagaatcttctgacatcactgaatacagcccaacccaaggagtgaggatcctagaatttgagaacccgcatgttaccagcaacaacaaaggcacgggctgtgaattcgagctatgggactgtggtggcgatgctaagtttgagtcctgctggccggccctgatgaaggatgctcatggagtggtgatcgtcttcaatgctgacatcccaagccaccggaaggaaatggagatgtggtattcctgctttgtccaacagccgtccttacaggacacacagtgtatgctaattgcacaccacaaaccaggctctggagatgataaaggaagcctgtctttgtcgccacccttgaacaagctgaagctggtgcactcaaacctggaagatgaccctgaggagatccggatggaattcataaagtatttaaaaagcataatcaactccatgtctgagagcagagacagggaggagatgtcaattatgacctagccagccttcacctgggactgccacatccccagtgaaatcagcatgtttctcggtgcagatctgaaatcacatccagctcctgatgttttcttctccctctgactgcagaggaagtgttcctacctgcaggaaggcacctgtcacacagggcgttcactcagaccatctgtgctctgccctgagttcagttgagaaaatcctattatcaaatttggatttcctggccccagaacttcccaaagacctgtaaaatggagggatttaccacctcacatatgtccagttaaacagtttgtggacttgtaaccgtcgcagcccaatgatacaacagtagtttaatcacgtgtattggcttgaatgtgattttcattccttgattcacccaacaaataccgactggctgagcacctgctgtgtgtgcactgctgttctagctgctgaccatagacagcataaatgaaaaagacagaaattcccaccttcgtggaactctccattttcctaaatgttaggttggtgcaaaactaatcgtggtttttgccatttttaatttttaatggcaaaagccactattacttttgcaccaacctaataggccgattcagaaacttgagtgcaatgtcttggatatgcaaa

SEQ ID NO: 384 - DNA, 2179 bp, Homo sapiens
ggaattcggcacgaggatctgtcttcctcctatttgcttgagcagacccgccctgagtctaattgacacaccaggtgggtttatgggcttctccttcctcccaagcatcccacagccacgttgcctattgtctttgtggcaagtcttgcccggcagcctagcttcagagcaatgtaagtggttgctgttatacccttctacccaccatgtgctggaaagaggagcatcatgactaaaaggcatgactcatgttctaatccatggcactactgatcctacttttctgcattttaaagtacaaacagctggatattgctgaagatggctcagggggtcaaggacaaatttcacaaatgtgacctcattctccaggctgcctgtttatcctggaggttgatcttggacttggggaccatttaaggttgcctatcttcaaagtgctcagcttggctttttaattctatactcctaaatctttgacagctgtgcatcaacaagctttcaaggtaactgaagcctagggcagctttctgccctctgttactggtgaatgtttttgcctgttggaaggacgttgcagctacaggcagactcccaccatccaccaacggccttattgtcaatccatagtcgtgtgctgactgcaaagtggcctgagttttttgcatatcttgtgagatcactatgggaacgcagtcattataatacagcagttcctgtcttgaggacttttgatagttttatttcttacagtttcatttcctattgatacaaaagagactcttggtaaccaaaaataaatgtaaccagaaatgtcggattctttgtttcatatatgaacatgattttgtaatgtaaattgaataagcccagatctattatgcaactatatactctcgtaacaagtgagtcacagaagcctccgtcaacactgacatattgatgaccttaagaagttagtgattacctatgatgtacaacaaacaaggctggtagctgccagcagaaactaggcataactacttctagtaagtactactactagttctaaaatttaaattaaatcagctcacaccttattttgtgctgctaccactaaaatccaagccaccatgacattatcactaacctggactactaactcatctttccgctttcactctgaccccctccattcattttccctggtgaagctagtgtcatcttataagtaaatcagatcatgtcattcatctcacaactcatctgctttccatctcaccgcaggatagaatccaaactcatcaccatggtccgtgagaccccctgtgatctggcctgcctgactctccgatctcatggcattaccactcccttccctcttgtgatgatctgtccgcaacgactttgctgtttctcatgcctggcccactatgtgcagacatgcaggttgtacaatgcataactccaagagaggcattcagtaggctgcagggtgaatgatgcccttggaagtatgtagtgtggtgaccctggtcacacgcacagctctttcctaccacaaagccttggcacttgctggcctttctgcctggacatccatctgaagattttttgcacagctggctccttcttgtcattcccttgacaaatattccaccaaacactactccataccagggaggctccataccaggcaggaccagctatatactttgcaggtcccagtgcaaaatgaaaaccagggccccttgttcaaaaagtattaagaatttcaagacggtgacagcagaacattaaactaagcatggggcccttctcagtgcggggccctgtgggacaacataggtcacacctccatcaagatggtaagggtttcacatgtattcatgaactcaattgtattttaaagtttagtagaaattgcacaattaataactggttagtgtatatttacctctgcctttggaagttaaagttttttttttttgaactaaaaattccttaagtgtaatttcatccttgaaaagtcaaagatttgttgttttggcatattgtcaagtttttaaaatttaaaatacagttagttcaaaatatattcacagctttcattcatgagacatttataaatattgggttataaagttccacatttagtatttaactcaaaaaaaaaaaaaaaaaactcgagggggggccc

SEQ ID NO: 385 - DNA, 2795 bp, Homo sapiens
aatttgtaggcaggagtaaacgttaactgacggtgggttagtgccctgcatcttgcatatttgaactgtctagagttcctgccattgctgggtataaaacgaggagctctctgttgacctgtaaatcattaatacttcttgacttagagtgtcacttcactttatagatgacattttcctctttccccttgatattttctatgttgtgttagataattggtagatatrtagttgtggtttagtacatttagggcttctatttatttagattttgtttgttggagtctgtttccaaaagggaatgtgccatttagtctgcatctgtatctttgtggacttgatgatcactggtttgattttgaaaaatgtcttttccagcttttagttactctcatcaaatgtcacatatttyctaatcacatgcactcctttaccacagaggcacataatcatttggcctcatagcagttatccatggccgtactgtagtaaagttccttagaactttgccaggagtgaactagaaaaaagtgcttactagggcctaagagttgctttgtgccgtgtagtccggcctttgcactagtagatcattgctgacataggtcagtttagagacctttctgtgttaatgcctcctggtactgtcttaagatacgtacagtgtctgtttttagatctatgcatatgtcatgaagctccttgtgggctctgcatgaagctgctgctttgtttttgggttaacagatgtgcctgtcaactagcatgtgtattgtccaaattccataaacttaaggtttttaagggctgtgtggtttctgagctctatgtgtctttcctatccttgtaccttcaaagggtgagaaatgagatttatacatccaaagttagtctgataaatatggctttttgtttctccatgtaacctagactgtcaaaaataagtgatggtgataagtaggcctggagcctcagcttctgtaaatctcattcctaaaattttgctagactcgtgttggcaaaaacaaatacctgtggattgtccttaaggcttttaatcagatacctgtgttgctgttagctgaactgtagtgaagcatcgatccaaatcggtcttctgaagtatcagttatgcttttgagtttagaaaatacttaggtgttagtctagtcttcccattcatgaatcagtgtatgtccatatcagagagcctcaacttcttttttcttcctttttaaaaatgattttagtgttttgatttagtgtatactacatagttcagtattattggctttaccagtgttgacagaaaaattttaaatctccagttgcaaacagcaatggattaggatatggaaataaaatcatggtgacatcactgctgagttatcttaaacctctgctacttaattctccatattgaaatgcatactcctccacatacatggcttccaagtaaaggcaattgtagaggggccctgtctatcccagtatggttggattttaaacatatctgtgtttccgttattttgggaactgattaatatttacaattttttttgtttatgagttattttgatactaagaaaagagagaatctagaacatcttgmagttgaaatacaaattttattcttttggtcttgggagaatttaagcagtctatgcaactcatcaaatggtgagaaatagccctccgaggttccagtaagctttcagtgactttgatacctccccaagtttcttgagttgctgcttgttaacacccagcttttaactgagtgtttgctcctgatggtttaggagattttcatgttgtatcacactgtcaagttttattttgtctttttatccctccgtggatgtgagtttgaaacaagcacggtacagtaatcctgcctgatagagtagtctggaatgagaattactttttgggtgagagagttctccattttaatgtttctaaagtttttcatatgaacttggcattggaaaagggaggtaaagaaaaaggacgtttactaaaagcagtgtctactcttcccctttgtgagtgtttattcatggctaatgaaaaaaagagaaggactcttgggttttgtgttgccatgttaagcatggagagggatgcttgacagcatgctaattgaagccagagcaagtatgtccttcatcaggtaatcaggaactcttcagttgaagctgaggaactaactgattagttgttgatcataatataattggttacaaagtggaagtgccagctggcttaagtacccaaagaaaagaatgcagcagcctaacttagtgttaccatatgttactgaatttgaaactgaccttttttcccaccctacttcacacacctaaaactcttttcttgtcagaccaaagagcgaaaagaaaaaaaaaaagtaaaacactttaccaatctgtcactcaggtacaattttgtggtgagatttttgtctgttctctttgtattgctcttaagagtcctttctcagcatattattctgccattgcctctgtcttccttggggcacctcagctctggatgctacccctgggatatctactgctgttatgtgaatgataggaggtaagtgaccattatagtaagggctctttgtaaaaaaattcaaaaaatttaaaaaggatgtatacattttatagtctggctatcagtttgatatcttgctgtcaagtatgtttctcaatctgtatttatccatcccatcaataaatgttaatggtaaaacactcaaaaaaaaaaaaaaaaaaaaaaaaaaaaaa

SEQ ID NO: 386 - DNA, 929 bp, Homo sapiens
  misc_feature (904)..(904): n equals a,t,g, or c
  misc_feature (906)..(906): n equals a,t,g, or c
  misc_feature (914)..(914): n equals a,t,g, or c
gcttcatcggtgaacaagggtgtttactgaatgtggagaagtcagtgaaatctccacagtgacagatgcactctggagatggggctgaggctaggtgtgcacctcccctgccagccatcagcagcctgcccacgtctgtcgcgttatgagttgttgatcttaaatttctgcaaatgtttcttgttacagagtatggtgtttgcgaaaacttgcggaagctggagatcacaggcgtgtcttgtcgggacgtctatgcgaagcgtattaaaccctcgcgtgaagtcgggacgttttgtgaaaattctccctgattatgagcacatggcgtacagagacgtttacacctgcctgcttcaccgatatagacacattttgggattgtggcagccagatatcgggccatacggaggactgctgaacgtggtggtggacggcctgttcatcatcgggtrratgaggcgtgcgccgccaatatgcactgtacattccacaagcattgccttcttattttacttcttttagctgtttaactttgtaagatgcaaagaggttggatcaagtttaaatgactgtgctgcccctttcacatcaaagaactactgacaacgaaggccgcgcctgcctttcccatctatctatctggctggcagggaaggaaagaacttgcatgttggtgaaggaagaagtggggtggaagaagtggggtgggacgacagtgaaatctagagtaaaaccaagctggcccaaggtgtcctgcaggctgtaatgcagtttaatcagagtgccatttttttttttgttcaaatgattttaattattggaatgcacaatttttttaatatgcaaataaaaagtttaaaaacttaaaaaaaaaaaaaaaaaaaaccccggggggggccccggnanccaattcnccccaaaagggagcc

SEQ ID NO: 387 - DNA, 1251 bp, Homo sapiens
ggcacgagagaagaagtactactccaaaaactttggtaaagtgcttattcttccctagcagtaggctgttgctgagttgtagactggtggttttatgaaaaaaaaacaggttggggaggtgtgaagatggaaatgagggctgtgttatgtatatctggtatctacttctgttccaggtgcttaattcaccctcatactgatgtttaaagttagaggattcttgtccatttgtcttgtcttctgttggcaggtcacatgcaggtaataggctatgggaaggggaagatgcctagattacttctaggctggtctccaagccccaagttcaagcctcctgagtagctgagactacaggcacacaccatcgttctcaacttttcttttttaacataggctagctagctcccaccttagccttctagaccctccattataattcttattcaattgccttggcctcccaaagtgctggaattacaggtgtgagccactgcacccagctattttttctatatttttatgtagttcattgagggtaataattttatcctacaacaaacatgtaagttattgaagaatattggagttttatgataatgctgtcataaatataaaaggtagggtaagagggatccaaatagagctcacttatattgtcactgataggcagtcacgctgtgctgatagaatgtggcctgacacttgatggagtgcagcatatgtatacttgggcaatttgagcagatatatacggtcccgagtttaaagaagagaacaaacaccagtgcacagctatagtattcctaatataggatgcattttaaagaatttcacattctacaaatggagagagatggcaggagaagccttattttaagtcctgcactaaggcaggttaacctcatgggtgtaattacctggacctttttgtaaggacaaaatatttaatcattaaaaggccctctgtagggtttgaaatatctatattttatatatgaatgcttcttttattaatatttatggtaagatattttatactgctgataaacggacattaatgatatatagcctattgtttgaaaaaagcattttggattatagcccaaaactggaaataaccaacagataaataaatggtggtatattcatacaataaaatactactcagataaaaaagatgaacttaatctcataaacattatgggcaacatagtgagaacccatctcttttaaaaaaaaaaaaaaaaaaaa

SEQ ID NO: 388 - DNA, 1887 bp, Homo sapiens
  misc_feature (1882)..(1882): n equals a,t,g, or c
gttcatcttagtcaatcctatgccacctcttcttcctccagtcccctcacctgatggtcccgacacttcatcatccaccacctcctggagggggtaccctgaggtgctccgctgggggctccgctcttcctggggctgcggttgatggctcatcatgatctttcccaaaatctgtcccatctcaccaaacctagtctctgttctgtccttggtcttcttctggacactgctgggatccagaagagtgtgttatcaattctcgaggctgggagaagtcaggagtggagaacagctctgagaagttactgttgtccaactgaactcccaggtgccgacagagtccggtccctccaatcaggaaggtcggaatctctgatgtcatcgctcatgccaacctggcaaccagtttgaaaaaaaacacatgtaactgccaggctgatctcttgtcctggagatcctgggtgaatggtatctcctgccactgtcccaacctcagaccaytgtccaaaagcatcttcagggwctccrcatccctctrttccctgtcccagcagaggctgtgtcctctccactcaaagcytgaagcrtgttggggtctcytcttctctgtacatgcccgtttcagagtccagtctggtgggagagggatcaggatgggaaagaaaagtagggtaagcagaaacgatgaaaccttacaagagtgagattatcatgtacaagagatcccaggaacattgacttgatgaaaaagtcacatcagagcactcaatttggcagaggttttctgccgagtgtctactgacattcactgtccgagattctgtactgggggtacacgcgtcctctgccctaaggcatctttgagtccaagagatattttgaggactggaaatcataggaaactgcccatgagttcacacatatttccaatggtgtccccaatttcagggagtccacggatcacctaaagccagcccctccagtttggctaagaaactctatatatcaagttttgtatcatatgtattgctcttaactcagaaaattccaccatttatagcagtggtttatttatttataccattgaaggaaatggtttatttatgaatctatattatggatattctataagatactgggtgtacaaaaagactaagtcgaaaaatctcagctgtgcacagtggctcatgyttgtaaycccatctctttgggtgsccaagggaggaagactgcctgaggccagcagttcaagaccagtataggcaacatagcaagagcccatctctaaaacaaaacaaaacaaaacaaaacaaaattagccaggtgtcgtggctggcacctgtgttccaacaacttgagagactgaggtggcaggaggattgcttgagcctaggagttaggggctgcagtgagctgtgatcgtgacaccgcactccagtctgggcaacacagcaagrccttgtgtcaaaaaaatttttttaattaaatataaaagagtttcatgacattcagagaccatccaaagaacctgtgggttccggccaggcacagtgctcacgcctgtaatcccagcgctttgggaggccatagcaggtggatcgcttgaggtcaggagtttaagagcagcctggccaacatggtgaaaccccatctcttctaaaaatacaaaaaattagtcaggcatggtggtgggtgcctgtaatcccagccactcaggaggcggggacagcagaatggcttaaacttgggaggcggaggttgcagtgagccaaggtcacaccattgcactccagcctgggcaacaagagcaaaactacatctcaaaaaaaaaaaaaaaaaactcgagggggggcccggtacccaattcgccctatggtgagtngaatg

SEQ ID NO: 389 - DNA, 1968 bp, Homo sapiens
  misc_feature (19)..(19): n equals a,t,g, or c
  misc_feature (291)..(291): n equals a,t,g, or c
  misc_feature (303)..(303): n equals a,t,g, or c
  misc_feature (308)..(308): n equals a,t,g, or c
gccgtgtaaatgacgtttnaaggcgagtgcggaaagtggcctggggagcctcggggagcggacgccctccgccctggtgctgacctgcctccctgccccttstgcctcctgtmagcagaggcctcggctccgcaactgccactcctcctcggggtgttgcacaagtttcgaggtcaccggcgaccccccctagcagcgcgcctggctctggcccccgcgaaggaggacggagtttgtgtgttgcatactttctaaggcggcggctgcagcagcggctccatccagcccgtnagctcctcctgnaaggnatggctggctacctgagtgaatcggactttgtgatggtggaggagggttmagtacccgagacctgctgaaggaactcactctgggggcctcacaggccaccacggacgaggtagctgccttcttcgtggctgacctgggtgccatagtgaggaagcacttttgctttctgaagtgcctgccacgagtccggcccttttatgctgtcaagtgcaacagcagcccaggtgtgctgaaggttctggcccagctggggctgggctttagctgtgccaacaaggcagagatggagttggtccagcatattggaatccctgccagtaagatcatctgcgccaacccctgtaagcaaattgcacagatcaaatatgctgccaagcatgggatccagctgctgagctttgacaatgagatggagctggcaaaggtggtaaagagccaccccagtgccaagatggttctgtgcattgctaccgatgactcccactccctgagctgcctgagcctaaagtttggagtgtcactgaaatcctgcagacacctgcttgaaaatgcgaagaagcaccatgtggaggtggtgggtgtgagttttcacattggcagtggctgtcctgaccctcaggcctatgctcagtccatcgcagacgcccggctcgtgtttgaaatgggcaccgagctgggtcacaagatgcacgttctggaccttggtggtggcttccctggcacagaaggggccaaagtgagatttgaagagattgcttccgtgatcaactcagccttggacctgtacttcccagagggctgtggcgtggacatctttgctgagctggggcgctactacgtgacctcggccttcactgtggcagtcagcatcattgccaagaaggaggttctgctagaccagcctggcagggaggaggaaaatggttccacctccaagaccatcgtgtaccaccttgatgagggcgtgtatgggatcttcaactcagtcctgtttgacaacatctgccctacccccatcctgcagaagaaaccatycacggagcagcccctgtacagcagcagcctgtggggcccggcggttgatggctgtgattgcgtggctgagggcctgtggctgccgcaactacacgtaggggactggctggtctttgacaacatgggcgcctacactgtgggcatgggttcccccttttgggggacccaggcctgccacatcacctatgccatgtcccgggtggcctgggaagcgctgcgaaggcagctgatggctgcagaacaggaggatgacgtggagggtgtgtgcaagcctctgtcctgcggctgggagatcacagacaccctgtgcgtgggccctgtcttcaccccagcgagcatcatgtgagtgggcctcgttccccccggagaatcccagcggggcctcagagatgcatctgggagaggtggggaagatggcaggcaagggtacccttggccaggactctggtgcccaccctgccacccccgcgctccacctgcagtgtttctgccctgtaaataggaccagtcttacactcgctgtagttcaagtatgcaacataaatcctgttccttccaaaaaaaaaaaaaaaaaaaaaaaaaaaaaaaaaaaaaaaaaaaaaaaaaaaaaaaaaaaaactcgag

SEQ ID NO: 390 - DNA, 2878 bp, Homo sapiens
  misc_feature (205)..(205): n equals a,t,g, or c
  misc_feature (213)..(213): n equals a,t,g, or c
  misc_feature (840)..(840): n equals a,t,g, or c
tgatgatcaggatgaagggagcccagtcacccaagaacctgagctagcatcaggtggtggtggtagtggtggagttggcaaaaaggrgcagctgtctgtgaagaagyttcgagtagtactgtttgctctatgctgcamtacagaacaggcagytgaacacttccgaaatccccagcgacgtattcgccgttggcttcgacgtttncaggcctnccagggggagaatctagagggcaaatatctgagctttgaggcagaagagaaactggctgagtrggtgctaacccagcgcgaacaacagctacctgtaaatgaggagaccttgttccagaaggccaccaaaataggacgttctttggaaggggggtttaagatctcctatgagtgggctgtgcgtttcatgctgcggcaccacctgactccccatgcccggcgagctgtggcccacaccctacctaaggatgtagcagagaatgcaggactcttcattgattttgtacaacggcagattcacaaccaggacttacccttgtctatgattgtggctattgatgagatctctttgttcctggatacagaggtgctgagcagtgatgatcgaaaggagaatgccctgcagacagtgggcacaggggaaccttggtgtgatgtagtcctagccattctggcagatggcactgtccttcccaccctggttttctacagagggcagatggatcagcctgctaacatgccagactccatattgctagaggcaaaggagagtggctacagtgatgacgagatcatggagctgtggtcaactcgagtgtggcagaagcacacagcttgccagcgcanaaaggcatgcttgtgatggactgtcatcgcactcacttgtcagaagaggtactggctatgcttagtgcctctagcactttgcctgcagtggtcccagcaggctgtagctccaaaattcagccattagatgtatgcatcaaaagaactgtcaagaacttcctgcataaaaaatggaaggaacaggctcgggaaatggcagatactgcatgtgattctgatgtcctgcttcagctggtgcttgtctggctgggtgaagtgctaggtgtcattggggactgtccagagctagttcagcgctccttcctggtggctagtgttctgcctggccccgatggcaacattaactcacctacaagaaatgctgacatgcaggaggagctaattgcctccctagaggagcaactgaagctgagtggggaacattctgagtcttccactccacgacccagatcatctcctgaagagacaattgagcctgaaagtcttcaccagctctttgagggtgaaagtgagaccgagtctttctatggctttgaagaagctgacctagatctgatggagatttgagtgttggggtcatgagggggtgtggagtgggggtgggaacatgtgagggagggtaaaggggcttagggaaaagggggcataccaggtggggtatttggtttctattttttaattttataccaccactcccccctgaagttgacttacacttccctgtggatttgtggattaattaggaaaaccaatagtaatcacgtctgagccaaggagctggcccattggtcattcacttctgctaaaaacaggtttttgtgactttttttttttttaaatttaaatcactgtgtttggtatttttctgacaaaattaagaaaaagaaaaaaaattatttgtgggcaaatgttaaatttttttgtttccccttttacctcaattgtatcatagtactgggtttttttgtttgttttattgtgtggccaatgtctttgggcatgatgctatctaatcattgttaatgtgagaacatttctgaagatgggaaagacaaattatgtagctcacaaactggtttattatatatatggataaaaaacttttttcattgtggtcttaacacttttatataaaaatgaaaatggaaaaaaagtcccactgaactctctcttccttctccttttctttccttccctctccagagatgttggtttctacagcaaccctagatataaaattgtggctttaaaaatgcatgaaaccacctttaattatccagaatgaatagatttgtcttttcctcaccaccttccctccaaaacatgacataaacaatattttttgcacttgtgatccttggcccctttccccattctcaacaccatccatccctctggacaaaggatcatacaggtgttattagcaagcaagagatactgaagcgatcaaacagttttagggtggaagccattcccagtttgagtcttcatcctgtaagcccccaggggcagtccctgctttactgaacttcatcctgttagatggagagcatgcctgtttaagggattactggtcctacagccaggagctaattgttcaagaagtgttgaactttaaaaagacaagaccacttgttgaaatccagcgtgctctgtggctttcccctatttctcttaatacttagggaagaatctgacaggaagaagcgcacaggggtgtgcacaaagaaaatgacatgaatctttatttttcactgccagcttcaaggaaagaaaattttttctacaatttgcatgagggatttttttaattgtatgtactcatggttgtaaaccaaaacgtactgtaccgtacagagaaaaggagcaaaaaaccaagtcttctgtttatcctgaggctttccacaatgttcccctcctgtgagccaaggaggcaaactgcacaagcttgtaaatggttcgtctttaaaatgtacataagtggaacatttaataaaatgaggggaaatggaaaaaaaaaaaaaaaaaaaaaaaaaaa

SEQ ID NO: 391 - DNA, 3179 bp, Homo sapiens
  misc_feature (49)..(49): n equals a,t,g, or c
  misc_feature (2993)..(2993): n equals a,t,g, or c
gctctctctctctctctctctctctctgctttcctcgcgagcctgcggntgggcttcttctcagaggaacgagaatgaatatgactcaagcccgggttctggtggctgcagtggtggggttggtggctgtcctgctctacgcctccatccacaagattgaggagggccatctggmtgtgtactwcaggggaggagctttactaactagccccagtggaccaggctatcatatcatgttgcctttcattactacgttcagatctgtgcagacaacactacaaactgatgaagttaaaaatgtgccttgtggaacaagtggtggggtcatgatctatattgaccgaatagaagtggttaatatgttggctccttatgcagtgtttgatatcgtgaggaactatactgcagattatgacaagaccttaatcttcaataaaatccaccatgagctgaaccagttctgcagtgcccacacacttcaggaagtttacattgaattgtttgatcaaatagatgaaaacctgaagcaagctctgcagaaagacttaaacctcatggccccaggtctcactatacaggctgtgcgtgttacaaaacccaaaatcccagaagccataagaagaaattttgagttaatggaggctgagaagacaaaactccttatagctgcacagaaacaaaaggttgtggaaaaagaagctgagacagagaggaaaaaggcagttatagaagcagagaagattgcacaagtggcaaaaattcggtttcagcagaaagtgatggaaaaagaaactgaaaagcgcatttctgaaatcgaagatgctgcattcctggcccgagagaaagcgaaagcagatgctgaatattatgctgcacacaaatatgccacctcaaacaagcacaagttgaccccggaatatctggagctcaaaaagtaccaggccattgcttctaacagtaagatctattttggcagcaacatccctaacatgttcgtggactcctcatgtgctttgaaatattcagatattaggactggaagagaaagctcactcccctctaaggaggctcttgaaccctctggagagaacgtcatccaaaacaaagagagcacaggttgatgcaagaggtggaaatgttctccatatcaagatgtggcccaaggggttaagtgggaacaatcattatacggactcttcagatttacagagaacttacacttcatctgttccacctctcctgcgatagtcctgggtgctccactgattggaggatagagccagctgtctgacacacaaatggtcttttcagccacagtcttatcaagtatcctatatgtattcctttctaaactgctactcatgaatgaggaaagtctgatgctaagatactgcctgcactggaatgttaaacactaaatatataacaagctgtgttttcctaagctgagatctgttgaataatgtttacattcgtcccccggggaaatgtatgctcagccaccattcaagagatgactgagaaggagatggtaagttcaagaagactgattgcacctgggacccaggccctttctttgggatccagtcccagccttcatccatgtgattaagatccaggccgctgaagttccccaggaaatgatcttccacttgagcaaccttttacttgatacgatttgcacctttctgttttcctgcagtcagggtggtggcctgcagggacctgagctttgctacccaaccagattcctcatagagattcctaatcactagtttcttgtattcataaactcagagatacagagggcttggtttgaagttggggtgagatgaaacctttgctctgagccaaagctctggggccttgcattccctgcattgggttgatgactgtcagcatcactgccgcagcatgcttgactaaggtacctggttttagccacagccacctccttgtatgttacctttcagctctggccaagagtgggacagggttttaaccacaaataggagcagcatgcaattcctagtgacttgctgcacagtattgtatcataattacaggaagtttttatttttaaaactggatctggggtatattcatttgccccatcacctctgtctaaaggcccaagtcctagggctgccatggtcacaagcacactgatgctccttaagattgtttatctggagcccacatagtgtggaacaaaaagtcacctagaaagcatccttggtcatcattgtctccttcccacctggcccagagatgcttaaatccaagttgtttctccagctgtcacctcccccaggagatcaggattccactgacgtcctgggcagccagtgaatttaattttccatgagaaacaacagagttaacctgtggcattaggagacctacttcatgtggaccctttttttccttcagtttaacttttctggagcagtgtgctgcgtagttcggcctgagtttgtgcagcttgttaagacaactcttgtgtacgctatgttgaagctcaacaaaaaagtcatgggaccacttctagaaatctttcagctgtcaggcctgtcagtctcatgacagtttgttggttgtgccaaacactttatttgggaaaggaaagcccagatttgaatgggtctttcccctgggccttatcctatagaggcatttgtaatatggagaaaataatttttcatttttgctcatttaattctataaattctctttataaatgaattttgtgttctttagttctccttaaaagaacttttgaattataaaaataaaatctttacctgtcgaattgttgctgcagatgattgttgtggaaaatctggatcattgacctctgtgctttcattcctagagatgttttatagttacatgagcaaaagctgttgccccaaagtgatggccctggaggcggggctgaggaacagggaaatgccgctgtgaagtcttaaagcacttctgcttaaactccnatgtgtgaggagtgtgcctccctgtgccctctcagctctgaggctggccgtctttcggggtgttccttttggcaaatatacactgtaatcttgagtctaaatttatatgttgaaatgctaccttttttaaaataagaaactaaataaaattattttactatcaaaaaaaaaaaaaaaaaactcgag

SEQ ID NO: 392 - DNA, 1411 bp, Homo sapiens
ggcacgagctgtaccaaggcttcagagtgagcagggggacatctggataggttagccagggccacagagagaagagctgcttacacctgaattgtttcacccttttcaagaacagggttgtccttctccccatctggatccttgggctagatctctgccgaggggctccgtcaagtcccgcaaggctagagaagggagccccacatcatttccactttcaaagagggaagatgctcgtcattcaaattacttctgttgatttccatggtatccccctgtccgtcccacaatctcttaccaggcgtcaatgcacatgcaggggatggaaagaggatgagccgatgagcagactttgcattaatcaaggagaaagaaaaagcagatggaaggaggtaggtagatggagaaagcaacagctccttttagcccttgatgacggccctgaaggcctgtctcttttagtgactcctctttgggtcctcttcccctacctctcagtgactaggttcctcatattaattccctgctgtgagtttggctccttgtgctgggcaattcagtcatcctcagaaagagcaaagttggtcttggaattaaggtgcaggtggggaaaaagaggactcagctagacacgaagaaaggctctcttcccagtctaagcccttctaccgtaaggggcattttatcaagacagccacccaactccccatcccatctcccctcctttgtagaaacagcatttgactcaccaagcctttctctccctttccgtgtgtcttgcttagtttctggattgagagaatttctatccttgctccctcgaactctaaaagagcttcttttgaaaactggggagtatcaggcctacctctacatgtgcaacagtgccaggattcaaaggaaaagctcattccagcctctgcctcttgggagatggttcagagtgccacatagggactgaaagagggtgtctgaatccttcaggaatgctttaagtgacattgttgaaaagagataaagaaaaggaaaacaatggaattgggtttctaaggtccctggaaatatcctgggggtctaattgagaaagaaaataagaggaaatttgaagactcacttcttccttcatctgaatccactcagatggcaactgatctctgtcccaaggaccctctaccccacccaattcataatcatctcagattagaaaaggcagaattccttcccattctcaaatcagcatttgggttaggggcccctaagttacgtgagcatgttagaaatgtgaccccaggcctcaagagagaggctctgccacatgagaggagataggaatcatgactgaaaggggattagcacagaacagagaaaactgatttgatagacaaatcaaatagaaaaaaaaaaaaaaaaa

SEQ ID NO: 393 - DNA, 1065 bp, Homo sapiens
ttttttttttttttttttttttttcccaggagtcaacactttattttgttcaggccaaccacactgggagcccagcatccccgcaggataatgcctctgtgggctcatctcgcctcttgagggtggccatgctggctggctctggccaccggggaggcctggccagtctctctgtctccaagttattgtagagtcgggaagtcttcaagggcagcttcaaggaggctgaactggttcctamttctggaggtatttcttcattatgctcgcaacatcgtcgtctttcctccccgtccctggctctctccgctcgggggacgttcgctcgccaccgtcacccgcaagtcgtgggattcctggtcgacttttgatgctgtcagcacttttgaaggacacgatggagccggaggatgaggacgagtcagacaggtgagcgggatcctccttgggctccgggctcttcttcaaaatggtcttgatccccgagagaaaggaacggttagcctcttccgtttcaaagtggatgcttgaacgctgtgaaccgtcttgcccacctttggctgatccagccaaggaggtaggtgtctggggcttccggatagctgggaggaagtcatcgaagtccactttggtcttgcgttcgtagtcgaggcttgggagtttccagctgaatgggtcactgcctagaggttcctccatcaggtgggcaaactggcggttctggaaaacaagcggctcctttccaaggtctggacagcccgcatcgtccacagaggactccagacaccgcctccgaggacgcagtgtgggcgacaacagcatgtccctgggtgtggtcggagagctcagttttctccccatgctcggtctggattctaagagggactcgcaggaactgaatcgggttttcgacttttcggggagtagggttgtgcccccaacaccgtctgaagagatgcatttgaggctggtggacctcaagagaccaccagcggccccttcgatttccaggggtgactttgccccaaccctcagcgagaggtttccctcgtcactgctcgtgcc

SEQ ID NO: 394 - DNA, 1980 bp, Homo sapiens
  misc_feature (35)..(35): n equals a,t,g, or c
cggacgcgtgggcgagcccgggcgccggcgggcgnccgtcgcgtctgacagaccactgcagaccacgggccgaggcccagcgcccgtccgcagcgcggcggcatggcggcgacaaggagccccacgcgggcaagggagcgggacggtctggcgctcccgccgcaggaagtgaccaagttcactcctggatgctagctacaagccaagccttagacactgtctggagaatggcaaaaggctttgtgatgttggcagtttcatttctggtggctgccatctgctacttccggaggctacatttatattcagggcacaagctgaaatggtggattggatatctgcagagaaaattcaaaaggaacctcagtgtggaggcagaggttgatttactcagttattgtgcaagagaatggaaaggagagacaccccgtaacaagctgatgaggaaggcttatgaggagctattttggcggcatcacattaaatgtgttcgacaagtaaggagagataactatgatgctctcagatcagtgttatttcagatattcagccagggcatctcttttccatcatggatgaaagaaaaggacattgttaagcttcctgaaaaactgctgttttcacaaggttgtaattggattcagcagtacagttttggtcctgagaagtatacaggctcgaatgtgtttggaaaactacggaaatatgtggaattattgaaaacacagtggactgaatttaatggcattagagattatcacaagagaggaagtatgtgcaacacccttttttcagatgccattctggaatataaactttatgaagctttaaagttcatcatgctgtatcaagtcactgaagtttatgaacaaatgaagactaaaaaggtcattcccagtctttttagactcctgttttccagggagacatcctctgatcctttgagcttcatgatgaatcacctgaattctgtaggcgacacatgtggactagagcagattgatatgtttatacttggatactcccttgaagtaaagataaaagtgttcagactgttcaagtttaactccagagactttgaagtctgctacccagaggagcctctcagggactggccggagatctccctgctgaccgagaacgaccgccactaccacattccagtcttttaagtccgctgggggccgaacagcagtgctcaccagtgacggtggtcacagttgcaataaagtctctctctgaaaccaaagctagcatttcagcatggaaggaattaggaccttttcttcaggattacaggtacactggatgcagccatgcatggatggtttttctttatttttcagtgatttcctctgaagcagctgcactgatacatttgggagttggtggcttgactttgtccataaggggcgtggccacttcacatgatggcgggcctttaagagcacaaagaagtttaatatggacaacaacaggaaaaagcaagaagaaaacaagtagggaaaaacagctaacctggagagaaagaatttctttaacctttatgttcttcattaaaaatcttatcttggactgatttgagggatttttagaaacatggccttattttatataagcattaccttcccaggaatctttgttgtatattaatttttgataaccatttgattaactttaaaattaagtatatgtgtgtatatatacatatgtatgtttatatacacacatgtatctgtatagttttatatatacatatatacacatagacatacagagaaccactactttgtaatagtgtacagtttgttttatatctctttactttttttgttactattttatctggccagcgtaatagttttatttagattttttaaaattctgtagattaaagcaaatgacagttattgaactatcacaaaactattaaactgtggtacatttaaaaaaaaaaaaaaaaaaaaaaaaaaactcgta

SEQ ID NO: 395 - DNA, 1663 bp, Homo sapiens
ggtattaagtccatcttgtgttggtacattggcagagacatatgctttaaaaacttaaatatttcggaggcacatgttggactactttgttttaattaaactgctagtatttctttgtcaaggatgtttctagttttttgctttattgccttgcattctaatgcagtttgttctgtaactcgagagccagtagcattggattgatggaagtgtagggtttatgaattattgcagctgactaccatacctcacacagcgttggtgttgtgagcggcccatgaaaagccaaattaaaaatcaaggattcagtcaaactaagcaggtactcatgccaggtactcctttctctacccacatccatgtttgaatgctattgcctgtgatctttacgcttaactgttgtgtatcttttttgttctttacaagaagtgcagaggggttttttgtgtattgcgtgaaaacttataaaacaaatgttaacagaatggaattttttttcaactgtatgtagggctgcagtggtggccagaattagatatctttaaagaattttaaatacaataaacacttcatattattcgccttgttacactcaatgcaattctcaagtctataagaggtatgtgcttaatatttcctactgtgtaggagaatttgcagtcagccataggtatgtaggaatagtcactcactggctgatacatttaaagcagcagtgtgaatagcaaggacagacaccttcaatttgtgaaatcaaagaactgatgcactatatagaacgaatttgggtttttaaagaaatattaaaagttaggtactgtaagtgttcttaaaacctgtaaacttcattctgtgggctagtggtgtgggacaaaatattcctaatgaaaggaagtaccaattagttgatttgttggtggcattccccttttgggaaagcaatgtaaggttatgtctgtgtatgtcattcacacttaggcaagcatacacaggcacatggctttaagaaccacactgatgccttgataattaaaaagaatacaagcattccatgtacacatgttaattagcagttagtgactgggccaacactttctcataaaaattggccttttacatgttgtctaattatcatttttccccaaattttgcgttgtaggactactgttcgaagatttttggaagaatactgagaacggcataaagtgaagatcgacatttaaaaaatgaggtgaaagaaagctatagtggcatagaaaaagtataaagctcagttagtttttttattattattattattaaaagttaattcaggactgatgtgacctaccagatttcagaacatgtgttaatagtatatatgccactgaaaacttaggtcctgtatcatacttttttctttaagactttttaagaaatattacttaaacatgtggcttgctcagtgtttaattgcaagttttcaatcttggactttgaaaacaggattaaacgttagtattcgtgtgaatcagactaagtgggatttcatttttacaactctgctctacttagcctttggatttagaagtaaaaataaagtatctctgactttctgttaaaaaaaaaaaaaaaaaaaaaaaaaaaaaaaaaaaaaaaaaaaaaaaaaaaaaaaaaactcgag

SEQ ID NO: 396 - DNA, 2008 bp, Homo sapiens; identical to SEQ ID NO: 376

SEQ ID NO: 397 - DNA, 2495 bp, Homo sapiens
  misc_feature (913)..(913): n equals a,t,g, or c
tgtaaggtggtttggggtcatgtttttaaccacctggccaatacagtccactttctggtttcttttattgtgggaagtaaatggtcaagctgctcaggcagtgaaaagatgtggagaatgtccgttgtcattcttgccactgtattccatttgctaccgagatataacattaaggtggacacatttyctaactgtattaattaaaagtcaatggatacagagagtggatttyctcccaagtcccatccctgctgaagaccgcttggatgaactccccaacccactgtgcccctcccgcaacactaccagtagactttagaaccatagttaactaagtcttttacctctgagatacttaattctgggaaaattggtgacaattttcaacttctaaataggtaactcgactgcaaaataatcaaaactgataacaatgaaactgcggctcttaaacaaagccatgcatgccgtgcatttgtattgaaatgtctccatgatatgaagccaaatattcaatgtaacatacttaatatccaaaggtggaaacaaaagaatgtagagatccagtgttaagagttccatttgcttcaattaattatttaccttcctgtggaataatatatatatatatatttaatagaaccatagatagactagtagaatttagattataaatgtgtgagtgcagattatcctgctattgcacaagctagaggggggaaaaatctcaattccagctggcaagatgctagccaggacacatataagaaagttgcactagattgaatggtcacagaatcggaggacatggaagaaaaaggaaacttcggtggttctgcagcagacatgggctaggtcatatgtggtttctrtsaagttcgtgtctcaaaaaaaaaaggagggggggcatctntccccggtggagctcacctatttggraatatggggcatttgttttttccactgcaatgatttcagtctggtttcatcatgttggaattcgatcacaccattttcaaacaatgttaacatagtccagcttttgtttttctcatctcttctgagaggagactcactgtttctgtctgaggaagctcataccctcggcaaaacatcaggacaaataaagagaaatgggggtacgcattcccaacagaagcagtgtgttatttgttttaaaactctgaacagagatcttgggaaatctttcaaaaagaccattgaattcttcattggctgagaacgacgttttaaaatgtcttaaataaggctttgtttgcattgtttgagttcaaggggccttattattgaatggaattgcacaagcctttctttgtgcaatcaaaccattgttattggtagttctgtaaaggaaactgtggaatcgaattggcagtggagtcataaatctatttactgagtgtggcttccaagaaatgttgcaattcaaaatgcactaagtctgtgatttattggagatttggagattctaaataatatttttaaaaaacttccatgcaacttctggtttaatgtttggcaactccacatgataaaaaaataaaaacagcccaaccgagtttcggaattaagtattcttctagtaagtgattcaaacttgtaatatttgccacaggactgacttatttatttactagctagaagctcttaagttcacttgtttatcagggcatatacagaagggtttgttaaaactcgatgttaactttacaactttctgacctggtgcatgaattctcaagtactgtatttcactgtgttggtgtgtctgatggaaatttcgaggtggtcccacaaaaatattttatgtagtgtgccttcaaagagaaccatttatttctcttcacttatcgtcccacaaagtcacatttggtggtggtcagccaagtcgcatctggtctagttttactcttgtcccaattttaaagagaaatgggaatgagtttgccctggtgagacccataccattgcaatgattatcttgagcacttaaagtccagtgttggctgttagtgtatttgatattctgcctgtctcctcatggttgaaatatgtctgaagaatagcagcataatctcttggctgtttatacttttttaaactttcctgtgttgtaaatattgtatacttttggtgattccagctatgtaacctctatgctctgtaaggtgattatttgtatatagcaacatggcccagtgatattatatagtttcccaatggagaggttattgagtaacctttgcattagtttaaacactaccagaagaatgctgagccaactataaacactcaattttgtatgttttccaaattgtacttattactgcttttgatactgtattacgtgccaatagtttcccaatcacatagcaggcaagagatattttgtactttttgatccactgtaatatttaataaaaaatgttactatctgttaaaaaaaaaaaaaaaaaagggsggccgcccaaggg

SEQ ID NO: 398 - DNA, 1771 bp, Homo sapiens
  misc_feature (1672)..(1672): n equals a,t,g, or c
  misc_feature (1696)..(1696): n equals a,t,g, or c
  misc_feature (1706)..(1706): n equals a,t,g, or c
  misc_feature (1749)..(1749): n equals a,t,g, or c
gcctgcagtcgacactagtggatccaaagaattcggcctgtgcgagtaggcgcttgggcactcagtctccctggcgagcgacgggcagaaatctcgaaccagtggagcgcactcgtaacctggatcccagaaggtcgcgaaggcagtaccgtttcctcagcggcggactgctgcagtaagaatgtcttttccacctcatttgaatcgccctcccatgggaatcccagcactcccaccagggatcccacccccgcagtttccaggatttcctccacctgtacctccagggaccccaatgattcctgtaccaatgagcattatggctcctgctccaactgtcttagtacccactgtgtctatggttggaaagcatttgggcgcaagaaaggatcatccaggcttaaaggctaaagaaaatgatgaaaattgtggtcctactaccactgtttttgttggcaacatttccgagaaagcttcagacatgcttataagacaactcttagctaaatgtggtttggttttgagctggaagagagtacaaggtgcttccggaaagcttcaagccttcggattctgtgagtacaaggagccagaatctaccctccgtgcactcagattattacatgacctgcaaattggagagaaaaagctactcgttaaagttgatgcaaagacaaaggcacagctggatgaatggaaagcaaagaagaaagcttctaatgggaatgcaaggccagaaactgtcactaatgacgatgaagaagccttggatgaagaaacaaagaggagagatcagatgattaaaggggctattgaagttttaattcgtgaatactccagtgagctaaatgccccctcacaggaatctgattctcaccccaggaagaagaagaaggaaaagaaggaggacattttccgcagatttccagtggccccactgatcccttatccactcatcactaaggaggatataaatgctatagaaatggaagaagacaaaagagacctgatatctcgagagatcagcaaattcagagacacacataagaaactggaagaagagaaaggcaaaaaggaaaaagaaagacaggaaattgagaaagaacggagagaaagagagagggagcgtgaaagggaacgagaaaggcgagaacgggaacgagaaagggaaagagaacgtgaacgagaaaaggagaaagaacgggagcgggaacgagaacgggatagggaccgtgaccggacaaaagagagagaccgagatcgggatcgagagagagatcgtgaccgggatagagaaaggagctcagatcgtaataaggatcgcagtcgatcaagagaaaaaagcagagatcgtgaaagggaacgagagcgggaaagagagagagagagagaacgagagcgagaacgagaacgggagcgagagagagagcgagagagggaacgggagcgagaaaragaaaaagacaaaaaacgggaccgagaagaagatgaagaagatgcatacgaacgaagaaaacttgaaagaaaactccgagagaaagaagctgcttatcaagagcgccttaagaattgggaaatcagagaacgaaagaaaacccgggaatatgagaaagaagctraaararaaggaagaaagaaggaaggagaattggccaaaggaagcttaaacganttaaaaagatttttttaggaagantttttgttgnttgattaggaggttgaccccaattttttaccagagggaattgntttttcaggaaaagttttcctt

SEQ ID NO: 399 - DNA, 1534 bp, Homo sapiens
ggcacaagcagctcgccgcgcagcggctgtatttgcggcctgtgcgagtaggcgcttgggcactcagtctccctggcgagcgacgggcagaaatctcgaaccagtggagcgcactcgtaacctggatcccagaaggtcgcgaaggcagtaccgtttcctcagcggcggactgctgcagtaagaatgtcttttccacctcatttgaatcgccctcccatgggaatcccagcactcccaccagggatcccacccccgcagtttccaggatttcctccacctgtacctccagggaccccaatgattcctgtaccaatgagcattatggctcctgctccaactgtcttagtacccactgtgtctatggttggaaagcatttgggcgcaagaaaggatcatccaggcttaaaggctaaagaaaatgatgaaaattgtggtcctactaccactgtttttgttggcaacatttccgagaaagcttcagacatgcttataagacaactcttagctaaatgtggtttggttttgagctggaagagagtacaaggtgcttccggaaagcttcaagccttcggattctgtgagtacaaggagccagaatctaccctccgtgcactcagattattacatgacctgcaaattggagagaaaaagctactcgttaaagttgatgcaaagacaaaggcacagctggatgaatggaaagcaaagaagaaagcttctaatgggaatgcaaggccagaaactgtcactaatgacgatgaagaagccttggatgaagaaacaaagaggagagatcagatgattaaaggggctattgaagttttaattcgtgaatactccagtgagctaaatgccccctcacaggaatctgattctcaccccaggaagaagaagaaggaaaagaaggaggacattttccgcagatttccagtggccccactgatcccttatccactcatcactaaggaggatataaatgctatagaaatggaagaagacaaaagagacctgatatctcgagagatcagcaaattcagagacacacataagaaactggaagaagagaaaggcaaaaaggaaaaagaaagacaggaaattgagaaagaacggagagaaagagagagggagcgtgaaagggaacgagaaaggcgagaacgggaacgagaaagggaaagagaacgtgaacgagaaaaggagaaagaacgggagcgggaacgagaacgggatagggaccgtgaccggacaaaagagagagaccgagatcgggatcgagagagagatcgtgaccgggatagagaaaggagctcagatcgtaataaggatcgcagtcgatcaagagaaaaaagcagagatcgtgaaagggaacgagagcgggaaagagagagagagagagaacgagagcgagaacgagaacgggagcgagagagagagcgagagagggaacgggagcgagaaaaaaaaaaaaaaaaaaaagggcggccgctctagaggatccaagcttacgtacgcgtgcatgcgacgtcaaagtcttctg

SEQ ID NO: 400 - DNA, 1157 bp, Homo sapiens
  misc_feature (826)..(826): n equals a,t,g, or c
caaggtcgccggtatcgataagctttgatatcgaattcaaccaatcactgttatcagggcagtcatccctttgtccagccatgctcctgtatcagagaagcactgccatgacagatattgggcaaactgatatatgacccccaatactgggtttggtgctcattctcgttaatgcatgtgttaagggtttcattctaatcatctgcaaaaaagtgattgttgtctttaaaatgttaccaaaactagtcttttagcaagaatcttactagaataaaatggctcttgctacctgtatttttaatcagcctatgtatattgatcccattcctgatattatcaccttaatatataacagccccaattcctcttattgagcattggttgctagggaaagcaaaaagttaagagaaaactactgagattttctctctaatttgcctctgtctgcctctaactagcttagagatcttggacaagtcctttaacagttctctgtcagctgcttggactgtgaaatagagataaaagtacctgtctawttcaggccgggcacggtggctcacgcctgtaatcccagcactttgggaggcccaggagggtgggtcacgaggtcaggagattgagaccatcctggctaatgcagtgaaaccccgtttctactaaaaatacaaaaaaattagccgggggtggtggtgggcacctgtagtcccagctacctgggaggctgaggcaggagaatggcatgaaacccggaggcggagcttgcagtgagccgagatcacgccacggcattgcagcctgagtgacagagtgagacyccstctcnaaaaaataaacctttaaaaaaaaaaaaaaacaactgtctatttcatagaggtattgtgaggattaaatgagataatgttgatgaagtaattttgaaaagcatatcaatgtgcagctgtaaagttttattcatatttaccagccaggcaagtagtattagctgttataagtaaaggtaaacatccaagtgcatatgttcagatgattatttttaatatacattttctcctgatatatattcttctagttgcagatctgattggttgaattcgatatcaagcttatcgataccgtcgacctcgagggggggcccggtacccaattggccctag

SEQ ID NO: 401 - DNA, 2791 bp, Homo sapiens
gtcacctgacacctcaccggtccggaattcccgggtcgacccacgcgtccgcccacgcgtccgtaatccgtggttttctggagcatttcacagcctaggaacatacaaggggggcatctccctggaatgtaaattgactaagaggaattcaataatggtcaaatgaatgcagaattttagagtcttgcttagtattctcaccacatttcgtttartctactcatactctttttctcttactgctgacactagatggaaaaactcttaattaaaagtatttcacaaaatgtgctcgttttcagtcattccgtttccactccagcctgttgtgttgtttttttgaaataataatttaaagtaattttccttttgcaggatggcatagtcaatccaacaataagaaaagatttgaaaactggaccgaaattctactgctgtccaattgaaggctgccccagaggccctgagagaccgttttctcagttttctctcgtaaaacagcactttatgaaaatgcatgctgagaagaagcacaaatgtagtaagtgcagcaattcgtacggtacagaatgggacctgaaaagacatgcagaggactgtggcaagaccttccggtgcacatgcggctgtccctacgccagtagaacagcactgcagtctcacatctaccgaactgggcacgagatacctgcagaacacagggacccacctagtaagaaaaggaaaatggaaaactgtgcacaaaaccagaagttatccaacaagaccattgaatcattgaacaaccaaccaatccctagaccagacactcaagaactagaagcttcagaaataaagctagaaccatcttttgaagactcttgtggctctaacactgacaagcagactcttacaacaccaccgagatatcctcagaagttgcttttaccaaagcccaaagtggctttggttaaactacccgtgatgcagttttctgtcatgcctgtctttgtgcctacagccgactcctcagcccagcctgtggtgttaggtgttgatcagggctctgccacaggggctgtgcacttaatgcccttgtcagtaggaaccctgatcctcggcctagattcagaggcttgctctcttaaggagagcctacctcttttcaaaattgctaatcctattgctggtgagccaataagtactggtgttcaagtgaactttggtaaaagtccatctaatcctttacaagaactagggaacacgtgtcaaaagawtagcatttcttcaatcaacgtgcagacagatctgtcttatgcctcacaaaactttataccttctgcacagtgggccactgctgattcctctgtgtcgtcttgttctcaaactgatttgtcgtttgattctcaagtgtctcttcccattagtgttcacactcagacatttttgcccagctctaaggtaacttcatctatagctgctcagactgatgcatttatggacacctgtttccagtcaggtggggtctccagagaaactcaaaccagtgggatagaaagtccaacggatgaccatgtacagatggaccaagctggaatgtgcggagacatttttgagagtgttcattcatcatataatgttgctacaggtaacattataagcaacagtttagtagcagagacagtaactcatagtttgttacctcagaatgagcctaagactttaaatcaagatattgagaaatctgcaccaattataaatttcagtgcacagaatagtatgcttccttcacagaacatgacagataatcagacccaaaccatagatttattaagtgatttggaaaacatcttgtcaagtaatctgcctgcccagacattggatcatcgtagtcttttgtctgacacaaatcctggacctgacacccagctcccatctggcccagcccagaaccccggaatcgattttgatatcgaagagttcttttcggcctcaaatatccagactcaaactgaagagagtgaacttagcaccatgaccaccgagccagtcttggagtcactggacatagagactcaaacggacttcttactcgcagatacctctgctcagtcctatgggtgtaggggaaattctaacttcttaggccttgagatgtttgacacacagacacagacagacttaaactttttcttagacagtagccctcatctgcctctgggaagtattctgaaacactccagcttttccgtgagtactgattcatctgacacagagacccaaactgaaggagtctccactgctaaaaatatacctgctctagaaagcaaagttcagttgaacagtacagaaacacagaccatgagttctgggtttgaaaccctggggagcttgttcttcaccagcaacgaaactcagacagcaatggatgactttcttctggctgatctggcctggaacacgatggagtctcagttcagctctgtagaaacccagacttctgcggaaccacacacagtctccaacttctaaaactaacggtggagtccatgtgtgaaatggcatctaccatttcctctggattaaaactacggactggggacaacagtattaattcgattgaatgtggctgatgatgcagttgcttagcttctttgtgtttctttgccttttgtacttgtaaacagaaatttgcgtataaatgtgagtgtattataaagtttgagatgttgatctaaattgtttttgtgttgcctacatttgccttttcacagctagtcttttcawgttaaaaaaaaaaaaaaaaaaaaaa

SEQ ID NO: 402 - DNA, 669 bp, Homo sapiens
  misc_feature (23)..(23): n equals a,t,g, or c
  misc_feature (37)..(37): n equals a,t,g, or c
  misc_feature (75)..(75): n equals a,t,g, or c
  misc_feature (97)..(97): n equals a,t,g, or c
  misc_feature (108)..(108): n equals a,t,g, or c
  misc_feature (202)..(202): n equals a,t,g, or c
tgggaggttcttttataagcagngctcgtttagtganccgtcagatcgcctggagacgccatccacgctgttttnacctccatagaagccaccgggnccgatccagcntccggactctagcctaggccgcgggacggataacaatttcacacaggaaacagctatgaccactaggcttttgcaaaaagctatttaggtgacnctatagaaggtacgcctgcaggtaccggtccggaattcccgggtcgacccacgcgtccgccctggggagcttgttcttcaccagcaacgaaactcagacagcaatggatgactttcttctggctgatctggcctggaacacgatggagtctcagttcagctctgtagaaacccagacttctgcggaaccacacacagtctccaacttctaaaactaacggtggagtccatgtgtgaaatggcatctaccatttcctctggattaaaactacggactggggacaacagtattaattcgattgaatgtggctgatgatgcagttgcttagcttctttgtgtttctttgccttttgtacttgtaaacagaaatttgcgtataaatgtgagtgtattataaagtttgagatgttgatctaaaaaaaaaaaaaaaaaaaaaaaaaaaaaaaaaaaaaaaaaaaaaaaaaaaa

SEQ ID NO: 403 - DNA, 1854 bp, Homo sapiens
  misc_feature (1280)..(1280): n equals a,t,g, or c
  misc_feature (1826)..(1826): n equals a,t,g, or c
  misc_feature (1835)..(1835): n equals a,t,g, or c
  misc_feature (1852)..(1853): n equals a,t,g, or c
agatcttgccatcatactccagcytgggcaacaagagtgaactccatctcacacaaaaaaaagaatgttgaatattggcccgcactctcttctggcttgtagtgtttccgcagagaaatccactgttagtctgatgggcttccctttgtggataacccgacctttctctctggctgcccttaacgtttttttcattcctttcaaccttggtgaatctgatgattacgtgtcttggggctgctcttctcgagaagtatctttgtggtggtctctgtctttcctgaacttgaatgttggtctgtcttgctaggttggggaagttctcctggataatatcctgaagagtgttttccaacttggttccattctccccatcattttcaggtacaccagtcaaacataggtttggtcttctcacatagtcccatatttcttggaggctttgttcattccttttcattcatttttctctaatcttgtcttcatgctttatttcattaagttgatcttcaatctctgatatccttttttccacttgatcgatttggctattgatacttgtgtatgcttcacaaagttcttgtgctgtgtttttcagctccatcaggtcattgatgattttctctagactggttattctagttagcaattcttctaaccttctttcaaggttcttagtttccttgcagtgggttagaatgtgctcctttagctcggaggagttacccaccttccgaagcctacttctgtcaattcgtcaaactcattttccatccagttttgtttccttgctggcgaggagttatgatcccttggaggagaagaggtgttctggtttttggaattttcagccttcttgtgctggtttttcctcatctccctggatttatctgcctttggtctttgatgttggtgacctttggatggggtttttgtgtggacatcgtttttgttgatgttgatgctattcctttctgttttttagtttttctcctaacaggcaggcttctctcctgcaggcctgctggagtttgctggaggtccactccagaccctgtttgcctgagtatcactagcagacactgcagaacagcaagattgctgcctgctccttcctctggaagtttcgtcccagaggggcacccgccagatgctagtggagctctcctgtatgaggtgtctgttgacccctgctgggaggtgtctcccagtcaggaggcacaggggtcagggacccacttraggaggcagtctgtcccttagcagagtttgagtgctgngctgggagattcgctgctctcttcagagctggcaggcaggaacatttacgtctgctgaagctgcacccacagccgcctcttccgccaggtcctctgtcccagagaggtgggagttttatctgttagcccctgactggggctgctgcctttctttcagagatgccctgtccagagaggaggaatctagagaggcagtctggctatggcagctttgcagagctgtggtgggctctgccaattcgaacttcccagaagctttgtttatactgtgaggggaaaaccacctactcaagcctcagtaatggtggacgcttctccccacaccaagcttgagagtcccaggtcgacttcagactgctgtgctggcagcaagaatttcaagccagtggattttagcttgctgggctctgtggcggtgggatccactgatccacttggctccctggcttcagttccctttccaggagagtgaacagttctgtcgctggcctttccaggtgtcactggggtatggaaaaaaaaaaaaaaaaaamtcgggggggcccntacccattngccttagggggcgtttnna

SEQ ID NO: 404 - DNA, 1081 bp, Homo sapiens; identical to SEQ ID NO: 382
  misc_feature (1076)..(1076): n equals a,t,g, or c
  misc_feature (1078)..(1078): n equals a,t,g, or c

SEQ ID NO: 405 - DNA, 1081 bp, Homo sapiens; identical to SEQ ID NO: 382
  misc_feature (1076)..(1076): n equals a,t,g, or c
  misc_feature (1078)..(1078): n equals a,t,g, or c

SEQ ID NO: 406 - DNA, 1044 bp, Homo sapiens
gctgagcacgccctctgagccgctcggtggacaccaggcactctagtaggcctggcctacccagaaacagcaggagagagaagaaacaggccagctgtgagaagccaaggacaccgagtcagtcatggcacctaaggcggcaaagggggccaagccagagccagcaccagctccacctccacccggggccaaacccgaggaagacaagaaggacggtaaggagccatcggacaaacctcaaaaggcggtgcaggaccataaggagccatcggacaaacctcaaaaggcggtgcagcccaagcacgaagtgggcacgaggagggggtgtcgccgctaccggtgggaattaaaagacagcaataaagagttctggctcttggggcacgctgagatcaagattcggagtttgggctgcctaatagctgcaatgatactgttgtcctcactcaccgtgcaccccatcttgaggcttatcatcaccatggagatatccttcttcagcttcttcatcttactgtacagctttgccattcatagatacatacccttcatcctgtggcccatttctgacctcttcaacgacctgattgcttgtgcgttccttgtgggagccgtggtctttgctgtgagaagtcggcgatccatgaatctccactacttacttgctgtgatccttattggtgcggctggagtttttgcttttatcgatgtgtgtcttcaaagaaaccacttcagaggcaagaaggccaaaaagcatatgctggttcctcctccaggaaaggaaaaaggaccccagcagggcaagggaccagaacccgccaagccaccagaacctggcaagccaccagggccagcaaagggaaagaaatgacttggaggaggctcctggtgtctgaaacggcagtgtattttacagcaatatgtttccactctcttccttgtcttctttctggaatggttttcttttccattttcattaccacctttgcttggaaaagaatggattaatggattctaaaagcctaaaaaaaaaaaaaaaaaaaa

SEQ ID NO: 407 - DNA, 1081 bp, Homo sapiens; identical to SEQ ID NO: 382
  misc_feature (1076)..(1076): n equals a,t,g, or c
  misc_feature (1078)..(1078): n equals a,t,g, or c

SEQ ID NO: 408 - DNA, 1100 bp, Homo sapiens
agagcacgccctctgagccgcwcggtggacaccaggcactctagtaggcctggcctacccagaaacagcaggagagagaagaaacaggccagctgtgagaagccaaggacaccgagtcagtcatggcacctaaggcggcaaagggggccaagccagagccagcaccagctccacctccacccggggccaaacccgaggaagacaagaaggacggtaaggagccatcggacaaacctcaaaaggcggtgcaggaccataaggagccatcggacaaacctcaaaaggcggtgcagcccaagcacgaagtgggcacgaggagggggtgtcgccgctaccggtgggaattaaaagacagcaataaagagttctggctcttggggcacgctgagatcaagattcggagtttgggctgcctaatagctgcaatgatactgttgtcctcactcaccgtgcaccccatcttgaggcttatcatcaccatggagatatccttcttcagcttcttcatcttactgtacagctttgccattcatagatacatacccttcatcctgtggcccatttctgacctcttcaacgacctgattgcttgtgcgttccttgtgggagccgtggtctttgctgtgagaagtcggcgatccatgaatctccactacttacttgctgtgatccttattggtgcggctggagtttttgcttttatcgatgtgtgtcttcaaagaaaccacttcagaggcaagaaggccaaaaagcatatgctggttcctcctccaggaaaggaaaaaggaccccagcagggcaagggaccagaacccgccaagccaccagaacctggcaagccaccagggccagcaaagggaaagaaatgacttggaggaggctcctggtgtctgaaacggcagtgtattttacagcaatatgtttccactctcttccttgtcttctttctggaatggttttcttttccattttcattaccacctttgcttggaaaagaatggattaatggattctaaaagccwaaaaaaaaaaaaaaaaaaaaaaaaaaaaaaaaaaaaaaaaaaaaaaaaaaaaaaaaaaaaaaaaaaaaaaaactcgag

SEQ ID NO: 409 - DNA, 1015 bp, Homo sapiens
  misc_feature (995)..(995): n equals a,t,g, or c
acgaaagcggccaagtagagctccgtcctgacgcgccgcctcccgtgggctccggccggctaagccgcggcggacaactatgctgaaagccaagatcctcttcgtggggccttgcgagagtggaaaaactgttttggccaactttctgacagaatcttctgacatcactgaatacagcccaacccaaggagtgaggatcctagaatttgagaacccgcatgttaccagcaacaacaaaggcacgggctgtgaattcgagctatgggactgtggtggcgatgctaagtttgagtcctgctggccggccctgatgaaggatgctcatggagtggtgatcgtcttcaatgctgacatcccaagccaccggaaggaaatggagatgtggtattcctgctttgtccaacagccgtccttacaggacacacagtgtatgctaattgcacaccacaaaccaggctctggagatgataaaggaagcctgtctttgtcgccacccttgaacaagctgaagctggtgcactcaaacctggaagatgaccctgaggagatccggatggaattcataaagtatttaaaaagcataatcaactccatgtctgagagcagagacagggaggagatgtcaattatgacctagccagccttcacctgggactgccacatccccagtgaaatcagcatgtttctcggtgcagatctgaaatcacatccagctcctgatgttttcttctccctctgactgcagaggaagtgttcctacctgcaggaaggcacctgtcacrcagggcgttcactcagaccatctgtgctctgccctgagttcagttgagaaaatcctattatcaaatttggatttcctggccccagaacttcccaaagacctgtaaaatggagggatttaccacctcacatatgtccagttaaacagtttgtggacttgtaaccgtcgcagcccaatgatacaacagtagtttaatcacgtgtattgggcttgnaatgtgatttccatcccttg

SEQ ID NO: 410 - DNA, 2167 bp, Homo sapiens
aattcggcacagggatctgtcttcctcctatttgcttgagcagacccgccctgagtctaattgacacaccaggtgggtttatgggcttctccttcctcccaagcatcccacagccacgttgcctattgtctttgtggcaagtcttgcccggcagcctagcttcagagcaatgtaagtggttgctgttatacccttctacccaccatgtgctggaaagaggagcatcatgactaaaaggcatgactcatgttctaatccatggcactactgatcctacttttctgcattttaaagtacaaacagctggatattgctgaagatggctcagggggtcaaggacaaatttcacaaatgtgacctcattctccaggctgcctgtttatcctggaggttgatcttggacttgggaccatttaaggttgcctatcttcaaagtgctcagcttggctttttaattctatactcctaaatctttgacagctgtgcatcaacaagctttcaaggtaactgaagcctagggcagctttctgccctctgttactggtgaatgtttttgcctgttggaaggacgttgcagctacaggcagactcccaccatccaccaacggccttattgtcaatccatagtcgtgtgctgactgcaaagtggcctgagttttttgcatatcttgtgagatcactatgggaacgcagtcattataatacagcagttcctgtcttgaggacttttgatagttttatttcttacagtttcatttcctattgatacaaaagagactcttggtaaccaaaaataaatgtaaccagaaatgtcggattctttgkttcatatatgaacatgattttgtaatgtaaattgaataagcccagatctattatgcaactatatactctcgtaacaagtgagtcacagaagcctccgtcaacactgacatattgatgaccttaagaagttagtgattacctatgatgtacaacaaacaaggctggwagctgccagcagaaactaggcataactacttctagtaagtactactactagttctaaaatttaaattaaatcagctcacaccttattttgtgctgctaccactaaaatccaagccaccatgacattatcactaacctggactactaactcatctttccgctttcactctgaccccctccattcattttccctggtgaagctagtgtcatcttataagtaaatcagatcatgtcattcatctcacaactcatctgctttccatctcaccgcaggatagaatccaaactcatcaccatggtccgtgagaccccctgtgatctggcctgcctgactctccgatctcatggcattaccactcccttccctcttgtgatgatctgtccgcaacgactttgctgtttctcatgcctggcccactatgtgcagacatgcaggttgtacaatgcataactccaagagaggcattcagtaggctgcagggtgaatgatgcccttggaagtatgtagtgtggtgaccctggtcacacgcacagctctttcctaccacaaagccttggcacttgctggcctttctgcctggacatccatctgaagattttttgcacagctggctccttcttgtcattcccttgacaaatattccaccaaacactactccataccagggaggctccataccaggcaggaccagctatatactttgcaggtcccagtgcaaaatgaaarccagggscccttgttcaaaaagtattaagaatttcaagacggtgacagcagaacattaaactaagcatggggcccttctcagtgcggggccctgtgggacaacataggtcacacctccatcaagatggtaagggtttcacatgtattcatgaactcaattgtattttaaagtttagtagaaattgcacaattaataactggttagtgtatatttacctctgcctttggaagttaaagttttttttttttgaactaaaaattccttaagtgtaatttcatccttgaaaagtcaaagatttgttgttttggcatattgtcaagtttttaaaatttaaaatacagttagttcaaaatatattcacagctttcattcatgagacatttataaatattgggttataaagttccacatttagtatttaactcaaaaaaaaaaaaaaaaaactcgag

SEQ ID NO: 411 - DNA, 2793 bp, Homo sapiens
  misc_feature (2762)..(2762): n equals a,t,g, or c
aatttgtaggcaggagtaaacgttaactgacggtgggttagtgccctgcatcttgcatatttgaactgtctagagttcctgccattgctgggtataaaacgaggagctctctgttgacctgtaaatcattaatacttcttgacttagagtgtcacttcactttatagatgacattttcctctttccccttgatattttctatgttgtgttagataattggtagatatrtagttgtggtttagtacatttagggcttctatttatttagattttgtttgttggagtctgtttccaaaagggaatgtgccatttagtctgcatctgtatctttgtggacttgatgatcactggtttgattttgaaaaatgtcttttccagcttttagttactctcatcaaatgtcacatatttctaatcacatgcactcctttaccacagaggcacataatcatttggcctcatagcagttatccatggccgtactgtagtaaagttccttagaactttgccaggagtgaactagaaaaaagtgcttactagggcctaagagttgctttgtgccgtgtagtccggcctttgcactagtagatcattgctgacataggtcagtttagagacctttctgtgttaatgcctcctggtactgtcttaagatacgtacagtgtctgtttttagatctatgcatatgtcatgaagctccttgtgggctctgcatgaagctgctgctttgtttttgggttaacagatgtgcctgtcaactagcatgtgtattgtccaaattccataaacttaaggtttttaagggctgtgtggtttctgagctctatgtgtctttcctatccttgtaccttcaaagggtgagaaatgagatttatacatccaaagttagtctgataaatatggctttttgtttctccatgtaacctagactgtcaaaaataagtgatggtgataagtaggcctggagcctcagcttctgtaaatctcattcctaaaattttgctagactcgtgttggcaaaaacaaatacctgtggattgtccttaaggcttttaatcagatacctgtgttgctgttagctgaactgtagtgaagcatcgatccaaatcggtcttctgaagtatcagttatgcttttgagtttagaaaatacttaggtgttagtctagtcttcccattcatgaatcagtgtatgtccatatcagagagcctcaacttcttttttcttcctttttaaaaatgattttagtgttttgatttagtgtatactacatagttcagtattattggctttaccagtgttgacagaaaaattttaaatctccagttgcaaacagcaatggattaggatatggaaataaaatcatggtgacatcactgctgagttatcttaaacctctgctacttaattctccatattgaaatgcatactcctccacatacatggcttccaagtaaaggcaattgtagaggggccctgtctatcccagtatggttggattttaaacatatctgtgtttccgttattttgggaactgattaatatttacaattttttttgtttatgagttattttgatactaagaaaagagagaatctagaacatcttgmagttgaaatacaaattttattcttttggtcttgggagaatttaagcagtctatgcaactcatcaaatggtgagaaatagccctccgaggttccagtaagctttcagtgactttgatacctccccaagtttcttgagttgctgcttgttaacacccagcttttaactgagtgtttgctcctgatggtttaggagattttcatgttgtatcacactgtcaagttttattttgtctttttatccctccgtggatgtgagtttgaaacaagcacggtacagtaatcctgcctgatagagtagtctggaatgagaattactttttgggtgagagagttctccattttaatgtttctaaagtttttcatatgaacttggcattggaaaagggaggtaaagaaaaaggacgtttactaaaagcagtgtctactcttcccctttgtgagtgtttattcatggctaatgaaaaaaagagaaggactcttgggttttgtgttgccatgttaagcatggagagggatgcttgacagcatgctaattgaagccagagcaagtatgtccttcatcaggtaatcaggaactcttcagttgaagctgaggaactaactgattagttgttgatcataatataattggttacaaagtggaagtgccagctggcttaagtacccaaagaaaagaatgcagcagcctaacttagtgttaccatatgttactgaatttgaaactgaccttttttcccaccctacttcacacacctaaaactcttttcttgtcagaccaaagagcgaaaagaaaaaaaaaaagtaaaacactttaccaatctgtcactcaggtacaattttgtggtgagatttttgtctgttctctttgtattgctcttaagagtcctttctcagcatattattctgccattgcctctgtcttccttggggcacctcagctctggatgctacccctgggatatctactgctgttatgtgaatgataggaggtaagtgaccattatagtaagggctctttgtaaaaaaattcaaaaaatttaaaaaggatgtatacattttatagtctggctatcagtttgatatcttgctgtcaagtatgtttctcaatctgtatttatccatcccatcaataaatgttaatggtaaaacancaaaaaaaaaaaaaaaaaaaaaaaaaaaaaa

SEQ ID NO: 412 - DNA, 927 bp, Homo sapiens
  misc_feature (883)..(883): n equals a,t,g, or c
  misc_feature (912)..(912): n equals a,t,g, or c
gcttcatcggtgaacaagggtgtttactgaatgtggagaagtcagtgaaatctccacagtgacagatgcactctggagatggggctgaggctaggtgtgcacctcccctgccagccatcagcagcctgcccacgtctgtcgcgttatgagttgttgatcttaaatttctgcaaatgtttcttgttacagagtatggtgtttgcraaaacttgcggaagctggagatcacaggcgtgtcttgtcgggacgtctatgcgaagcgtattaaaccctcgcgtgaagtcgggacgttttgtgaaaattctccctgattatgagcacatggcgtacagagacgtttacacctgcctgcttcaccgatatagacacattttgggattgtggcagccagatatcgggccatacggaggactgctgaacgtggtggtggacggcctgttcatcatcgtaatgaggcgtgcgccgccaatatgcactgtacattccacaagcattgccttcttattttacttcttttagctgtttaactttgtaagatgcaaagaggttggatcaagtttaaatgactgtgctgcccctttcacatcaaagaactactgacaacgaaggccgcgcctgcctttcccatctatctatctggctggcagggaaggaaagaacttgcatgttggtgaaggaagaagtggggtggaagaagtggggtgggacgacagtgaaatctagagtaaaaccaagctggcccaaggtgtcctgcaggctgtaatgcagtttaatcagagtgccatttttttttttgttcaaatgattttaattattggaatgcacaatttttttaatatgcaaataaaaagtttaaaaacttaaaaaaaaaaaaaaaaaaaanccccggggggggccccggwaccaatttcnccccaaaagggagcc

SEQ ID NO: 413 - DNA, 1252 bp, Homo sapiens
  misc_feature (243)..(243): n equals a,t,g, or c
gagaagaagtactactccaaaaactttggtaaagtgcttattcttccctagcagtaggctgttgctgagttgtagactggtggttttatgaaaaaaaaacaggttggggaggtgtgaagatggaaatgagggctgtgttatgtatatctggtatctacttctgttccaggtgcttaattcaccctcatactgatgtttaaagttagaggattcttgtccatttgtcttgtcttctgttggcanggtcacatgcaggtaataggctatgggaaggggaagatgcctagattacttctaggctggtctccaagccccaagttcaagcctcctgagtagctgagactacaggcacacaccatcgttctcaacttttcttttttaacataggctagctagctcccaccttagccttctagacccctccattataattcttattcaattgccttggcctcccaaagtgctggaattacaggtgtgagccactgcacccagctattttttctatatttttatgtagttcattgagggtaataattttatcctacaacaaacatgtaagttattgaagaatattggagttttatgataatgctgtcataaatataaaaggtagggtaagagggatccaaatagagctcacttatattgtcactgataggcagtcacgctgtgctgatagaatgtggcctgacacttgatggagtgcagcatatgtatacttgggcaatttgagcagatatatacggtcccgagtttaaagaagagaacaaacaccagtgcacagctatagtattcctaatataggatgcattttaaagaatttcacattctacaaatggagagagatggcaggagaagccttattttaagtcctgcactaaggcaggttaacctcatgggtgtaattacctggacctttttgtaaggacaaaatatttaatcattaaaaggccctctgtagggtttgaaatatctatattttatatatgaatgcttcttttattaatatttatggtaagatattttatactgctgataaacggacattaatgatatatagcctattgtttgaaaaaagcattttggattatagcccaaaactggaaataaccaacagataaataaatggtggtatattcatacaataaaatactactcagataaaaaagatgaacttaatctcataaacattatgggcaacatagtgagaacccatctcttttaaaaaaaaaaaaaaaaaaaactcgaa

SEQ ID NO: 414 - DNA, 1887 bp, Homo sapiens; identical to SEQ ID NO: 388
  misc_feature (1882)..(1882): n equals a,t,g, or c

SEQ ID NO: 415 - protein, 141 aa, Homo sapiens
LPASGCHGPAASSYSASAEPARVRALVYGHHGDPAKVVELKNLELAAVRGSDVRVKMLAAPINPSDINMIQGNYGLLPELPAVGGNEGVAQVVAVGSNVTGLKPGDWVIPANAGLESRSVAQAGAILAHCNLQPPPHRRMA

SEQ ID NO: 416 - protein, 18 aa, Homo sapiens
LGLLVPLEPHHVLGVESP

SEQ ID NO: 417 - protein, 78 aa, Homo sapiens [sequence omitted]

SEQ ID NO: 418 - protein, 41 aa, Homo sapiens
MCGRRPRLGWTCVWGCTRAPCWGASWARSAGSTTCGRLMSL

SEQ ID NO: 419 - protein, 59 aa, Homo sapiens
LLGTWLCPQLPPGLGAHHAPSSFSSYLCPVSPSIRLSDGTLWERLWPWSGGREQGGRHK

SEQ ID NO: 420 - protein, 139 aa, Homo sapiens
MSCPAHASPPCSNTSGCLEFSFCGFALPIPSPVLHSSWQGGEGWGWFGWVRGFFLCVRCCYLTVLRPYWPFSSSSYLYGTSNKDTHFRPGKKKKKKKKKKKKKKKKKKKKKKKKKKKKKKKKKKKKKKKKKKKKKKKKK

SEQ ID NO: 421 - protein, 30 aa, Homo sapiens
MLMMGTLVLILLHDVIVTFTEFYNAQNLKW

SEQ ID NO: 422 - protein, 23 aa, Homo sapiens
CLQWFVPLVPQQIPELILMTIWK

SEQ ID NO: 423 - protein, 20 aa, Homo sapiens
FLLSFCAFPCVFMFWVSVLH

SEQ ID NO: 424 - protein, 21 aa, Homo sapiens
MIYLSIYLLVNILAVSNSWPS

SEQ ID NO: 425 - protein, 9 aa, Homo sapiens
MFMMSVYIL

SEQ ID NO: 426 - protein, 17 aa, Homo sapiens
MPWCLLPLCLHILCVSA

SEQ ID NO: 427 - protein, 55 aa, Homo sapiens
MVLAIFQNALSFTISALLFILSFYFGTAALWLFICQNCHFLSIQLLCPLFHESPN

SEQ ID NO: 428 - protein, 11 aa, Homo sapiens
MHQPLCIYCFS

SEQ ID NO: 429 - protein, 54 aa, Homo sapiens
MTENPKVQMMLIIVVPLQLFINPVQHPIQQVRCIHLHLCHGWALDRLALELVCL

SEQ ID NO: 430 - protein, 10 aa, Homo sapiens
MTRCLWRTLQ

SEQ ID NO: 431 - protein, 32 aa, Homo sapiens
MFCGACQIGWNLWGLLWEMPREHRFRRWEQLV

SEQ ID NO: 432 - protein, 13 aa, Homo sapiens
MKTTCLSSTLVRM

SEQ ID NO: 433 - protein, 38 aa, Homo sapiens
VLLILKLLLLKGARSIQIFMFRCLIAFALITKLQNYMD

SEQ ID NO: 434 - protein, 94 aa, Homo sapiens
MRTIYSAFFFLSLCLSVLLSSTVFDDWHPISISWVQNFGLTPSFDVQVPQTLRCFFRSGCRWHPLNLLQFKLSTFLRIISFYLSFCSEKRLQHE

SEQ ID NO: 435 - protein, 1167 aa, Homo sapiens
  SITE (429): Xaa equals any of the naturally occurring L-amino acids
  SITE (435): Xaa equals any of the naturally occurring L-amino acids
  SITE (437): Xaa equals any of the naturally occurring L-amino acids
  SITE (444): Xaa equals any of the naturally occurring L-amino acids
  SITE (447): Xaa equals any of the naturally occurring L-amino acids
  SITE (452): Xaa equals any of the naturally occurring L-amino acids
  SITE (588): Xaa equals any of the naturally occurring L-amino acids
  SITE (832): Xaa equals any of the naturally occurring L-amino acids
VELPFVTHLFLPLVFLTGLCSPFNLDEHHPRLFPGPPEAEFGYSVLQHVGGGQRWMLVGAPWDGPSGDRRGDVYRCPVGGAHNAPCAKGHLGDYQLGNSSHPAVNMHLGMSLLETDGDGGFMACAPLWSRACGSSVFSSGICARVDASFQPQGSLAPTAQRCPTYMDVVIVLDGSNSIYPWSEVQTFLRRLVGKLFIDPEQIQVGLVQYGESPVHEWSLGDFRTKEEVVRAAKNLSRREGRETKTAQAIMVACTEGFSQSHGGRPEAARLLVVVTDGESHDGEELPAALKACEAGRVTRYGIAVLGHYLRRQRDPSSFLREIRTIASDPDERFFFNVTDEAALTDIVDALGDRIFGLEGSHAENESSFGLEMSQIGFSTHRLKDGILFGMVGAYDWGGSVLWLEGGHRLFPPRMALEDEFPPALQNHAXYLGYSXSXMLLRGGXRLXLSGAXRFRHRGKVIAFQLKKDGAVRVAQSLQGEQIGSYFGSELCPLDTDRDGTTDVLLVAAPMFLGPQNKETGRVYVYLVGQQSLLTLQGTLQPEPPQDARFGFAMGALPDLNQDGFADVAVGAPLEDGHQGALYLYHGTXSGVRPHPAQRIAAASMPHALSYFGRSVDGRLDLDGDDLVDVAVGAQGAAILLSSRPIVHLTPSLEVTPQAISVVQRDCRRRGQEAVCLTAALCFQVTSRTPGRWDHQFYMRFTASLDEWTAGARAAFDGSGQRLSPRRLRLSVGNVTCEQLHFHVLDTSDYLRPVALTVTFALDNTTKPGPVLNEGSPTSIQKLVPFSKDCGPDNECVTDLVLQVNMDIRGSRKAPFVVRGGRRKVLVSTTLEXRKENAYNTSLSLIFSRNLHLASLTPQRESPIKVECAAPSAHARLCSVGHPVFQTGAKVTFLLEFEFSCSSLLSQVFVKLTASSDSLERNGTLQDNTAQTSAYIQYEPHLLFSSESTLHRYEVHPYGTLPVGPGPEFKTTLRVQNLGCYVVSGLIISALLPAVAHGGNYFLSLSQVITNNASCIVQNLTEPPGPPVHPEELQHTNRLNGSNTQCQVVRCHLGQLAKGTEVSVGLLRLVHNEFFRRAKFKSLTVVSTFELGTEEGSVLQLTEASRWSESLLEVVQTRPILISLWILIGSVLGGLLLLALLVFCLWKLGFFAHKKIPEEEKREEKLEQ

SEQ ID NO: 436 - protein, 23 aa, Homo sapiens
MSVLLLSSSCGAAFAVLCPPHCE

SEQ ID NO: 437 - protein, 56 aa, Homo sapiens
GWFHLFWQEWEQEPGQNKLLEALVLGTAAGRVGTRQNCLQDESQERTLSPVSGVWL

SEQ ID NO: 438 - protein, 3 aa, Homo sapiens
GYS

SEQ ID NO: 439 - protein, 68 aa, Homo sapiens [sequence omitted]

SEQ ID NO: 440 - protein, 42 aa, Homo sapiens
  SITE (38): Xaa equals any of the naturally occurring L-amino acids
MLLFWAIFASYVSIQSMHFRCCGREIFGGAGTSKTGIXLKSQ

SEQ ID NO: 441 - protein, 17 aa, Homo sapiens
MTCFCQIKYRYHWGFLF

SEQ ID NO: 442 - protein, 42 aa, Homo sapiens [sequence omitted]

SEQ ID NO: 443 - protein, 19 aa, Homo sapiens
MYAFLQGFIFLLLFFFIAE

SEQ ID NO: 444 - protein, 124 aa, Homo sapiens [sequence omitted]

SEQ ID NO: 445 - protein, 2 aa, Homo sapiens
GA

SEQ ID NO: 446 - protein, 76 aa, Homo sapiens
LVPLLPGPLVRFCFCLHVGVGSSVGGGAPCPGCRPASCARAPFRVGLDHPSPHQGPHCEVITALNPPLLFYLLNLI

SEQ ID NO: 447 - protein, 203 aa, Homo sapiens
MGIKTALPAAELGLYSLVLSGALAYAGRGLLEASQDGAHRKAFRESVRPGWEYIGRKMDVADFEWVMWFTSFRNVIIFALSGHVLFAKLCTMVAPKLRSWMYAVYGALAVMGTMGPWYLLLLLGHCVGLYVASLLGQPWLCLGLGLASLASFKMDPLISWQSGFVTGTFDLQEVLFHGGSSFTCCVAPALHWRAVPTLTATTP

SEQ ID NO: 448 - protein, 29 aa, Homo sapiens
MFSCFSLVVFILFSLGFFCNAFVQLILSC

SEQ ID NO: 449 - protein, 42 aa, Homo sapiens
VKVLWLILFILSCSLAGYWQTQSFCFHKELMKRTIGETHVCL

SEQ ID NO: 450 - protein, 34 aa, Homo sapiens
MISMCQMLRTTVMTHLWIVTWIQRSWQESGDIRV

SEQ ID NO: 451 - protein, 23 aa, Homo sapiens
MQSWLWAAVCSAGCPCFWGMKAL

SEQ ID NO: 452 - protein, 31 aa, Homo sapiens
MLSPFTLLLSYATIVHFCMPLIPFLLILTIK

SEQ ID NO: 453 - protein, 107 aa, Homo sapiens
MAQQDPGLPFLFWFSVASLITLFHLFLFKLSFGGLQFTENHLQFQADPDVLHNSYALHGIRYKNDHINLAVLADAEGKPYLHVSVESRGQPVKIYACKQAAWTSQWS

SEQ ID NO: 454 - protein, 36 aa, Homo sapiens
MNAAVLLTLVFFLLLYLFYLGVLGSDPAYLPLLKKS

SEQ ID NO: 455 - protein, 8 aa, Homo sapiens
KSILGSHS

SEQ ID NO: 456 - protein, 31 aa, Homo sapiens
MISMKMILVILVTLALPVAQLHLLLLVLKIQ

SEQ ID NO: 457 - protein, 4 aa, Homo sapiens
FPYS

SEQ ID NO: 458 - protein, 28 aa, Homo sapiens
MVFSCHLLFLIRCLYSCGHLSSTLQHII

SEQ ID NO: 459 - protein, 89 aa, Homo sapiens
  SITE (34): Xaa equals any of the naturally occurring L-amino acids
MVCTYFLPFCNVFLCLLFLWLCRSFFICCNLIFXSLLFLLVLLESYPKNHCPVQSQETFPYIFFSSFIILGLTCKSLIQFELIFVYGVR

SEQ ID NO: 460 - protein, 28 aa, Homo sapiens
MARNVWFFIVSFCYKFLSYFRASSTLKV

SEQ ID NO: 461 - protein, 9 aa, Homo sapiens
MPLPSSGQF

SEQ ID NO: 462 - protein, 49 aa, Homo sapiens
MLAWQHFQIAFCLLGSWGFGGRGSISTLHEIAYFIMMELLFLLSCDFFF

SEQ ID NO: 463 - protein, 68 aa, Homo sapiens
LASGPGATLRCLVWLWSLSLRALLPLSHAVWWVILCPEPPPWTGPVSRAGTPCLFSLFRHNSRSLASH

SEQ ID NO: 464 - protein, 29 aa, Homo sapiens
  SITE (27): Xaa equals any of the naturally occurring L-amino acids
MEGKLTTSKILIVGKVFWVSCTLFYIXFF

SEQ ID NO: 465 - protein, 48 aa, Homo sapiens
  SITE (2): Xaa equals any of the naturally occurring L-amino acids
MXLQGLPGTSGTGLGCLLCLVLFLSIAVTNKGMEEQSDKKKKKKKKNS

SEQ ID NO: 466 - protein, 16 aa, Homo sapiens
MALRLARMWLSSLASV

SEQ ID NO: 467 - protein, 1 aa, Homo sapiens
I

SEQ ID NO: 468 - protein, 71 aa, Homo sapiens [sequence omitted]

SEQ ID NO: 469 - protein, 23 aa, Homo sapiens
VQTYVVLLHFALSCFADIVFFTN

SEQ ID NO: 470 - protein, 32 aa, Homo sapiens
YLLKISLFLGAVYVTLHSSGSCHVFMSEYFWF

SEQ ID NO: 471 - protein, 32 aa, Homo sapiens
KAIWFLILCTTHSILIITFIYKKNKENNSKLC

SEQ ID NO: 472 - protein, 55 aa, Homo sapiens
MWALKSLFLLTPSPVIRFYFAALWIRAAGRLLGGGGSPTPPTSLAPGFSEAGGLC

SEQ ID NO: 473 - protein, 23 aa, Homo sapiens
VGHFWVVIWLVRSMSDRMNKNAL

SEQ ID NO: 474 - protein, 43 aa, Homo sapiens
MGIFDYKLFSHYFKACFIFFLILLTHLCLSLFYYKLFIVQSLP

SEQ ID NO: 475 - protein, 265 aa, Homo sapiens
MGGQVAGVYAAYYPSDVSSLCLVCPAGLQYSTDNQFVQRLKELQGSAAVEKIPLIPSTPEEMSEMLQLCSYVRFKVPQQILQGLVDVRIPHNNFYRKLFLEIVSEKSRYSLHQNMDKIKVPTQIIWGKQDAGAGCVWGRHVGQVNCQLPGGASGKLWALSSDGKTQEDSQAHNRLFSFCAQHRQQQEAGLRPRLQPAFCTQHLLPSPKSDAATTLRDPAPNAVGAPVTLRKPVPYPWYPRFPRALGTTRKPPRYFSQNRNSYGTK

SEQ ID NO: 476 - protein, 27 aa, Homo sapiens
MVVHILWSWCCRGLAGTAALPRVLFYF

SEQ ID NO: 477 - protein, 25 aa, Homo sapiens
MALCSLAVFCPSTILGCDLVQLGPE

SEQ ID NO: 478 - protein, 1 aa, Homo sapiens
I

SEQ ID NO: 479 - protein, 38 aa, Homo sapiens
MLLVALPCFLQNCPWSSRVLETLCLLNGPLFLCCALDG

SEQ ID NO: 480 - protein, 145 aa, Homo sapiens
KSQVFSYPHRYLVLDLALLFLMGILEAVRLYLGTRGNLTEAERPLAASLALTAGTALLSAHFLLWQALVLWADWALSATLLALHGLEAVLQVVAIAAFTRGFGGEVRAKAGDETAGERAAEGHIRSLRPLQFYQLLPFCTELNKF

SEQ ID NO: 481 - protein, 211 aa, Homo sapiens
MTTLTRQDLNFGQVVADVLCEFLEVAVHLILYVREVYPVGIFQKRKKYNVPVQMSCHPELNQYIQDTLHCVKPLLEKNDVEKVVVVILDKEHRPVEKFVFEITQPPLLSISSDSLLSHVEQLLRAFILKISVCDAVLDHNPPGCTFTVLVHTREAATRNMEKIQVIKDFPWILADEQDVHMHDPRLIPLKTMTSDILKMQLYVEERAHKGS

SEQ ID NO: 482 - protein, 46 aa, Homo sapiens
MLQTCSVVLHFILCLCVCVFRLIQVVCYISCIIYKVTQNIKSSKLV

SEQ ID NO: 483 - protein, 122 aa, Homo sapiens [sequence omitted]

SEQ ID NO: 484 - protein, 29 aa, Homo sapiens
MLCVLVLFILYLPGFSKSNQDVPWGDILC

SEQ ID NO: 485 - protein, 60 aa, Homo sapiens [sequence omitted]

SEQ ID NO: 486 - protein, 49 aa, Homo sapiens
  SITE (40): Xaa equals any of the naturally occurring L-amino acids
  SITE (48): Xaa equals any of the naturally occurring L-amino acids
MKGHSSKLFCLVVWGFLCFLFLGCFFFNCLVQKKKEKKNXGGAPEPNXP

SEQ ID NO: 487 - protein, 5 aa, Homo sapiens
WASLT

SEQ ID NO: 488 - protein, 22 aa, Homo sapiens
MTCLSCLISFLASLSANWASTR

SEQ ID NO: 489 - protein, 11 aa, Homo sapiens
MKPSWQLPSCA

SEQ ID NO: 490 - protein, 26 aa, Homo sapiens
MKYCFRPWVLCDTTLGIGLFGFALCF

SEQ ID NO: 491 - protein, 12 aa, Homo sapiens
LLVLLQIMKGNL

SEQ ID NO: 492 - protein, 55 aa, Homo sapiens
MGGDQRSMGLACESPLAAWSLGITPALVLQMLLGFIGAGPSRAGPLTLPAWLHSP

SEQ ID NO: 493 - protein, 120 aa, Homo sapiens
MMCVVLTTLPCLTFSIAVTEVQKSINGSADVLPDMLPDLPVSLVLLSLIMVDIIEKLRIYPLRGSQKSKCSFKCEYFLKFDIFFTFLPLCYLTTCLMIPFLRANITDRRLQMKISKHNYF

SEQ ID NO: 494 - protein, 20 aa, Homo sapiens
MGTIKPWKSSAVVGGPGHQG

SEQ ID NO: 495 - protein, 425 aa, Homo sapiens
  SITE (264): Xaa equals any of the naturally occurring L-amino acids
  SITE (274): Xaa equals any of the naturally occurring L-amino acids
  SITE (278): Xaa equals any of the naturally occurring L-amino acids
  SITE (296): Xaa equals any of the naturally occurring L-amino acids
MELLPLWLCLGFHFLTVGWRNRSGTATAASQGVCKLVGGAADCRGQSLASVPSSLPPHARMLTLDANPLKTLWNHSLQPYPLLESLSLHSCHLERISRGAFQEQGHLRSLVLGDNCLSENYEETAAALHALPGLRRLDLSGNALTEDMAALMLQNLSSLRSVSLAGNTIMRLDDSVFEGLERLRELDLQRNYIFEIEGGAFDGLAELRHLNLAFNNLPCIVDFGLTRLRVLNVSYNVLEWFLATGGEAAFELETLDLSHNQAAXLPAAAPVQQXADPXAARQQHGLLPGPVQHLVXEGDGGPVPPRGRQRDQHHHRQPLGRILLQRPRRSPLPGHEPEPVPVPARRLPEENAFPLPPEPPPELPDDASHSGARAPRSAHRAGPEPQPAVGAAPGSGAGQLPGQPALVQPELQPAPGRPPWPLRQC

SEQ ID NO: 496 - protein, 52 aa, Homo sapiens
MRLSVRRVLLATGCALVLVLAVQLGQQVLECRAVLAGLRTPGGPCGLSRRSW

SEQ ID NO: 497 - protein, 7 aa, Homo sapiens
MQVFEFF

SEQ ID NO: 498 - protein, 60 aa, Homo sapiens
MRSVPAILQMLWILRRSTNWTLYLILHGCPAVVCAWPRQHAPWGMVRLWVPTAAPAALSP

SEQ ID NO: 499 - protein, 23 aa, Homo sapiens
MAFLPSPAWWISLLPSLLSIARS

SEQ ID NO: 500 - protein, 62 aa, Homo sapiens
MEQEPVRRYPLVPLVPLVVVAVWGFFPGGSESSSSELDSISLRSSLDTLPLETALQAIFTIK

SEQ ID NO: 501 - protein, 16 aa, Homo sapiens
LFVFFCFVLVFFFFLA

SEQ ID NO: 502 - protein, 12 aa, Homo sapiens
MLLLSIVLLLIL

SEQ ID NO: 503 - protein, 29 aa, Homo sapiens
MLMASALSRCAGAAVLVLLLWLAVDWALM

SEQ ID NO: 504 - protein, 41 aa, Homo sapiens
MKLFFCLCAGLILEFQKALWERKRLLNKVWNRAPHSDNMQS

SEQ ID NO: 505 - protein, 17 aa, Homo sapiens
MSSLLLIIILALSLAYE

SEQ ID NO: 506 - protein, 33 aa, Homo sapiens
MWMAKPTCYLALTGWSCWRTCWERSGWALYLQP

SEQ ID NO: 507 - protein, 29 aa, Homo sapiens
APLCHCPYFGFCKHPLRLVSSLGKQASTS

SEQ ID NO: 508 - protein, 60 aa, Homo sapiens
MGFHLLLGLVNLLGLVNCFLLGKPNYLSLIVSIVAPLTFLFSFISNIKKKKKKGGRSRGS

SEQ ID NO: 509 - protein, 52 aa, Homo sapiens
  SITE (18): Xaa equals any of the naturally occurring L-amino acids
MSLTTLWTLDKLLLCVCXLICKMKIISVSYRYSLNRDNYTYFKVVKYTITTR

SEQ ID NO: 510 - protein, 42 aa, Homo sapiens
MLLCPNLRNPLIWGLILLTHAISVSVASFYYIILVKSKLYHV

SEQ ID NO: 511 - protein, 41 aa, Homo sapiens
MPFPWSFRLLMLLSTAQSPQPQKRFPLHSTPLQSNFPLSKC

SEQ ID NO: 512 - protein, 62 aa, Homo sapiens
EAFCFLRSYFCYSCNAPPYMPHLCESTGIRFGHHTCLKLGSVCSVFCVEWRKKRLPCCLPCS

SEQ ID NO: 513 - protein, 25 aa, Homo sapiens
  SITE (24): Xaa equals any of the naturally occurring L-amino acids
MSPSLLLTCIIGRLIIPPSLKSPXS

SEQ ID NO: 514 - protein, 46 aa, Homo sapiens
MALLWQINWTIAEAFLRGDITDSTALWSWAATSRTSLWSTVTSPAL

SEQ ID NO: 515 - protein, 11 aa, Homo sapiens
MRWNLLLVKLL

SEQ ID NO: 516 - protein, 24 aa, Homo sapiens
MLFFPLVLLPCVFLSYSKRRRAQG

SEQ ID NO: 517 - protein, 235 aa, Homo sapiens
  SITE (204): Xaa equals any of the naturally occurring L-amino acids
MGLPGLFCLAVLAASSFSKAREEEITPVVSIAYKVLEVFPKGRWVLITCCAPQPPPPITYSLCGTKNIKVAKKVVKTHEPASFNLNVTLKSSPDLLTYFCRASSTSGAHVDSARLQMHWELWSRQRGRPQGGDDLPGVLGQPTYHQQPDREGWAGPPAAETMPQAACQLLLPAEPDIGLVLVPGCKQRQCPAQRPHSGAPRRVXQGTHHRAGWQPCLHCGHHLQDAGLDPRGPRW

SEQ ID NO: 518 - protein, 9 aa, Homo sapiens
MASGSKISS

SEQ ID NO: 519 - protein, 11 aa, Homo sapiens
MHFHADYMHGC

SEQ ID NO: 520 - protein, 69 aa, Homo sapiens
MVPTPPGWVGFFVFWVFLGGGLFHVTSISVFISYLFHFQVYHGKCTDFFVNNVLGFAKKEKKKTLLSLP

SEQ ID NO: 521 - protein, 36 aa, Homo sapiens
MFLLTIGKIEKALCFLFFCCCCHCCFFQKTSVSVLS

SEQ ID NO: 522 - protein, 41 aa, Homo sapiens
DFLFFFPPCGSHCFLSCLYLSLCLSSSFPQMSQLSLPNFPI

SEQ ID NO: 523 - protein, 29 aa, Homo sapiens
MRQQQTHLAAGVLFCCRLTFSSSVSGKSG

SEQ ID NO: 524 - protein, 42 aa, Homo sapiens
MMNVSLEIYFVVFLSLFCVVLPLHALFLKSFFFLDFACFQIL

SEQ ID NO: 525 - protein, 20 aa, Homo sapiens
MTTFLLLLLLVSIFSSVNCG

SEQ ID NO: 526 - protein, 17 aa, Homo sapiens
MRIASFCWEDRIFHSKF

SEQ ID NO: 527 - protein, 10 aa, Homo sapiens
MVVVTLMLFL

SEQ ID NO: 528 - protein, 51 aa, Homo sapiens
LEAPSMKTDTRTIFVAIFSCISILLLFLSVFIIYRCSQHGELRERKGREGE

SEQ ID NO: 529 - protein, 15 aa, Homo sapiens
LPCLAGCRVKFMIMK

SEQ ID NO: 530 - protein, 32 aa, Homo sapiens
MEKGAAKKNFWVQGTVYLLLLFMPVAGCPTTL

SEQ ID NO: 531 - protein, 22 aa, Homo sapiens
MVPSLNLYLLVSWDTLLENFLM

SEQ ID NO: 532 - protein, 66 aa, Homo sapiens
FYLLVLVFLNSIFAELSLFLPCLSPVCLSFVVDIVLSSPKYLSLETYSKRILFSMSVFLLCCPPCL

SEQ ID NO: 533 - protein, 2 aa, Homo sapiens
DI

SEQ ID NO: 534 - protein, 15 aa, Homo sapiens
MFEDNKWWCILFLIR

SEQ ID NO: 535 - protein, 40 aa, Homo sapiens
MRCARHWKWLLLCFWGQLICRRLWRRSGRGKCFLCCLHRE

SEQ ID NO: 536 - protein, 27 aa, Homo sapiens
MNVIIVLVHALCPWCRGCPHWGPLVPP

SEQ ID NO: 537 - protein, 31 aa, Homo sapiens
MASVFLLLYLELFCQPFPSTLGACKSRGALF

SEQ ID NO: 538 - protein, 51 aa, Homo sapiens
MAFQSLLEMKFFLCAAFPLGAGVKMFHYLGPGKPLPQASPSPHPHRNRIWP

SEQ ID NO: 539 - protein, 82 aa, Homo sapiens [sequence omitted]

SEQ ID NO: 540 - protein, 43 aa, Homo sapiens
MEIYVSLGIVGLAILALLAVTSIPSVSDSLTWREFHYIQVNNI

SEQ ID NO: 541 - protein, 42 aa, Homo sapiens
MLLVSCCLAGHICVWDAQTGDCLTRIPRPGRQRRGQWRGQRA

SEQ ID NO: 542 - protein, 55 aa, Homo sapiens
MSMSCPWLGTWAVVCASPRQRNDSQGTDARGGNRADQRLPGHKRNLEERTPAEQT

SEQ ID NO: 543 - protein, 14 aa, Homo sapiens
MAHWHVFYVFSCHS

SEQ ID NO: 544 - protein, 25 aa, Homo sapiens
MCRYLPLMLFMTMCRFLLGLFAVGW

SEQ ID NO: 545 - protein, 45 aa, Homo sapiens
MMVTRLPCWAGVLPPVPLLLACMTSTARPWAQAPCPFSTAPLSRQ

SEQ ID NO: 546 - protein, 30 aa, Homo sapiens
MAVGSCSPILSLLGPGILAPLSALPLISVP

SEQ ID NO: 547 - protein, 5 aa, Homo sapiens
NNRYV

SEQ ID NO: 548 - protein, 65 aa, Homo sapiens
MLHTMRNVRGCVCVCVCVCVCVSEGHLLNGTPKNTIVFVFAVVRGLNKCKLAQEMLDLRGLERPD

SEQ ID NO: 549 - protein, 26 aa, Homo sapiens
MFFLLLLMLLPHCLNYYILLTNLTFW

SEQ ID NO: 550 - protein, 6 aa, Homo sapiens
MLLPLL

SEQ ID NO: 551 - protein, 19 aa, Homo sapiens
MLPPLLEWAVFVPLSQLLL

SEQ ID NO: 552 - protein, 39 aa, Homo sapiens
MFFLIKVPLNWPLYQPLVLAKCPKHALGPRHVTIHRLSV

SEQ ID NO: 553 - protein, 48 aa, Homo sapiens
INSWKRPVNASCFCICVLRWALWFLCTQSTFLVITIVIFIVMTAPELW

SEQ ID NO: 554 - protein, 26 aa, Homo sapiens
GQLRWSSLVSQFACLFILFSAKCIPF

SEQ ID NO: 555 - protein, 36 aa, Homo sapiens
MVLALAVFTLLASVCCQLHSHSFYPCMSCFYSSLSF

SEQ ID NO: 556 - protein, 64 aa, Homo sapiens
MWLLWQPYLAGFLLQVLEGRVAQSQAEADSGVLGAGGTTPAGGRRGLCQQSEQPRGPIPHILQV

SEQ ID NO: 557 - protein, 1 aa, Homo sapiens
F

SEQ ID NO: 558 - protein, 41 aa, Homo sapiens
MLSGSSRGSQGSLNLHVCLWLPPQPPLHPSYSFSFFLQFWE

SEQ ID NO: 559 - protein, 223 aa, Homo sapiens
MWGLVSALAATLCFSLQNIFSKKVLRDSRIHHLRLLNILGCHAVFFMIPTWVLVDLSAFLVSSDLTYVYQWPWTLLLLAVSGFCNFAQNVIAFSILNLVSPLSYSVANATKRIMVITVSLIMLRNPVTSTNVLGMMTAILGVFLYNKTKYDANQQARKHLLPVTTADLSSKERHRSPLEKPHNGLLFPQHGDYQYGRNNILTDHFQYSRQSYPNSYSLNRYDV

SEQ ID NO: 560 - protein, 47 aa, Homo sapiens
MTLTAWTGACWPSFTWLMPRTSWRMLLLLFWTSSMIWLPRECGSFST

SEQ ID NO: 561 - protein, 24 aa, Homo sapiens
MGELLWLVILCAHIIVATHHCWEN

SEQ ID NO: 562 - protein, 8 aa, Homo sapiens
MFQRLLKY

SEQ ID NO: 563 - protein, 27 aa, Homo sapiens
GVSVIISLLISSSEDCYQSLGLEVQII

SEQ ID NO: 564 - protein, 55 aa, Homo sapiens
MSACLPGSLFLLFPPAGRYQRRGHPSRPGMGRKEVTAKAVEWGWHQPLVCFPCGS

SEQ ID NO: 565 - protein, 24 aa, Homo sapiens
MSIWLMHFCLLVLGKRMSILDVKL

SEQ ID NO: 566 - protein, 32 aa, Homo sapiens
APRFPSLLVLLPGILFPGLSGHCFVSGFFTLL

SEQ ID NO: 567 - protein, 6 aa, Homo sapiens
MYFWCC

SEQ ID NO: 568 - protein, 36 aa, Homo sapiens
MFCHCIVCLLLVLWSSLPFFIPSFLLLKVILSCGMI

SEQ ID NO: 569 - protein, 9 aa, Homo sapiens
LKILFLIEV

SEQ ID NO: 570 - protein, 27 aa, Homo sapiens
MTSSVACPGARVCLAGSWPAASSSPCW

SEQ ID NO: 571 - protein, 34 aa, Homo sapiens
FGYFWYRWPLGWIFLHSVPQLQEGVPLVCEYVCL

SEQ ID NO: 572 - protein, 18 aa, Homo sapiens
LATLLLRLLLSLGTGCQR

SEQ ID NO: 573 - protein, 43 aa, Homo sapiens
  SITE (28): Xaa equals any of the naturally occurring L-amino acids
  SITE (33): Xaa equals any of the naturally occurring L-amino acids
DQFSTAVRHRVPAGHWQVAGSTPTPCPXNPDLXPGKEREGPVS

SEQ ID NO: 574 - protein, 117 aa, Homo sapiens
CVETPRPGFCQKAPWYQPGKSATKPTTTREETIPSKFTSPNTNLPKLNRLQPLCPDPTLTAFPFTQIWAFWQKVLRLWGKRRAVMALRWVSYSPEEIGLFYALPYIRNYIQDAILRH

SEQ ID NO: 575 - protein, 281 aa, Homo sapiens
MAEALLLRATFYLLIGNANAAKPDLDKVISLKEANVKLRANALIKRGSMYMQQQQPLLSTQDFNMAADIDPQNADVYHHRGQLKILLDQVEEAVADFDECIRLRPESALAQAQKCFALYRQAYTGNNSSQIQAAMKGFEEVIKKFPRCAEGYALYAQALTDQQQFGKADEMYDKCIDLEPDNATTYVHKGLLQLQWKQDLDRGLELISKAIEIDNKCDFAYETMGTIEVQRGNMEKAIDMFNKAINLAKSEMEMAHLYSLCDAAHAQTEVAKKYGLKPPTL

SEQ ID NO: 576 - protein, 50 aa, Homo sapiens
MHLCLLWQLHYVVGDVDAEPHILSSCLCYSPLCFTFSNECQAGDFQIQKF

SEQ ID NO: 577 - protein, 50 aa, Homo sapiens
MVYIYYLYFLTFYYLLNPLHQTTTYGTSQGSSLGALFFKYSVLMKNKFNI

SEQ ID NO: 578 - protein, 36 aa, Homo sapiens
  SITE (35): Xaa equals any of the naturally occurring L-amino acids
MFDSTPVLVALFLHPRLGASYSLCLQHSSSPCLPXS

SEQ ID NO: 579 - protein, 11 aa, Homo sapiens
MSHSLSVACVY

SEQ ID NO: 580 - protein, 4 aa, Homo sapiens
LDFC

SEQ ID NO: 581 - protein, 41 aa, Homo sapiens
MYNHLSLNCTLPLFICALFLVYSVIIPHLKNKNHYCYILLI

SEQ ID NO: 582 - protein, 46 aa, Homo sapiens
MMAIPYFILAELNFIFLCILLPDDLGGKSRLVKANHGSSILMILLG

SEQ ID NO: 583 - protein, 348 aa, Homo sapiens
MNMTQARVLVAAVVGLVAVLLYASIHKIEEGHLAVYYRGGALLTSPSGPGYHIMLPFITTFRSVQTTLQTDEVKNVPCGTSGGVMIYIDRIEVVNMLAPYAVFDIVRNYTADYDKTLIFNKIHHELNQFCSAHTLQEVYIELFDQIDENLKQALQKDLNLMAPGLTIQAVRVTKPKIPEAIRRNFELMEAEKTKLLIAAQKQKVVEKEAETERKKAVIEAEKIAQVAKIRFQQKVMEKETEKRISEIEDAAFLAREKAKADAEYYAAHKYATSNKHKLTPEYLELKKYQAIASNSKIYFGSNIPNMFVDSSCALKYSDIRTGRESSLPSKEALEPSGENVIQNKESTG

SEQ ID NO: 584 - protein, 66 aa, Homo sapiens
  SITE (40): Xaa equals any of the naturally occurring L-amino acids
MCLLSLAYFILVLGYGASYGKGKGPFRKTSFGEIKMWTVXKKKKKKKKKKKKKKKKKKKKKKKKKK

SEQ ID NO: 585 - protein, 14 aa, Homo sapiens
MLSQPPHSKRGYRL

SEQ ID NO: 586 - protein, 34 aa, Homo sapiens
MFLSFLNILIILLQGIWEPYLVFACNVIRYNYTM

SEQ ID NO: 587 - protein, 127 aa, Homo sapiens
MVFCLAFGATLLLAGKIQFGYVYGISAIGCLGMFCLLNLMSMTGVSFGCVASVLGYCLLPMILLSSFAVIFSLQGMVGIILTAGIIGWCSFSASKIFISALAMEGQQLLVAYPCALLYGVFALISVF

SEQ ID NO: 588 - protein, 2 aa, Homo sapiens
PC

SEQ ID NO: 589 - protein, 72 aa, Homo sapiens [sequence omitted]

SEQ ID NO: 590 - protein, 17 aa, Homo sapiens
MCTSVLLAIFLLCFSVT

SEQ ID NO: 591 - protein, 21 aa, Homo sapiens
MRAGCRLCSLWLWTHNSWARG

SEQ ID NO: 592 - protein, 10 aa, Homo sapiens
MLALSTHFLP

SEQ ID NO: 593 - protein, 49 aa, Homo sapiens
MWAGASRGRTGARLAVPLHAWCTLWPLALGQAILLQIPVLPQGHHQAPP

SEQ ID NO: 594 - protein, 12 aa, Homo sapiens
MVCLLVHSFLSF

SEQ ID NO: 595 - protein, 182 aa, Homo sapiens
  SITE (1): Xaa equals any of the naturally occurring L-amino acids
  SITE (5): Xaa equals any of the naturally occurring L-amino acids
  SITE (11): Xaa equals any of the naturally occurring L-amino acids
XLLPXTPLGIXYDGLMSFAGGKLLIVGENATAHIFATYPAPYLSLANAFADQVVATMILLIIVFAIFDSRNLGAPRGLEPIAIGLLIIVIASSLGLNSGCAMNPARDLSPRLFTALAGWGFEVFRAGNNFWWIPVVGPLVGAVIGGLIYVLVIEIHHPEPDSVFKAEQSEDKPEKYELSVIM

SEQ ID NO: 596 - protein, 32 aa, Homo sapiens
MFHVCCAFLNFMLHSKTVVLFLWCLDSCGVCF

SEQ ID NO: 597 - protein, 50 aa, Homo sapiens
MYPLDVDNNVPFLSLFLLLLLKLIVLPNLLLCFFPNTVIYLICRQEPCLC

SEQ ID NO: 598 - protein, 43 aa, Homo sapiens
MKAISVSLLRLTKLLWFFSIVLYVPLLAVLLFNTVLYFFSKCT

SEQ ID NO: 599 - protein, 43 aa, Homo sapiens
  SITE (14): Xaa equals any of the naturally occurring L-amino acids
MCNQVFLLLILILXDDHFYTLWQSLIASVSCLENEFIIYLLGN

SEQ ID NO: 600 - protein, 14 aa, Homo sapiens
MRKLAFGLRISYCS

SEQ ID NO: 601 - protein, 73 aa, Homo sapiens [sequence omitted]

SEQ ID NO: 602 - protein, 42 aa, Homo sapiens
MSKFVSLPVFLACISPWFNSYQIFGRGGTEVSSHSRALGCPY

SEQ ID NO: 603 - protein, 48 aa, Homo sapiens
MCPPHLMLICLMVMPRVQDLVTCAVVNTQRLGRSVSLVLPSFKVHGKI

SEQ ID NO: 604 - protein, 26 aa, Homo sapiens
MVFFSAILFLYILYLFADYSSIFDFP

SEQ ID NO: 605 - protein, 8 aa, Homo sapiens
MAKFTVLW

SEQ ID NO: 606 - protein, 34 aa, Homo sapiens
MVHLLLVFWSGPHNLGRFQPMKLFAICLNQSMLL

SEQ ID NO: 607 - protein, 33 aa, Homo sapiens
MLHGVVIVRLWLLLGRNSLKRNSLVWRGSRSPK

SEQ ID NO: 608 - protein, 93 aa, Homo sapiens
MWIRVGFLVFKTPGLRTPAAGERIYNISGNGSPLADSKEIFLTVPVGGGESLRLLASDLQRHSIAQLDPEALGNIKKLSNRLAQICSSIRTHK

SEQ ID NO: 609 - protein, 31 aa, Homo sapiens
MYNLSSLFMISFLVCHVTPSQTLKGPPLSWS

SEQ ID NO: 610 - protein, 65 aa, Homo sapiens
GSFPSPKHRQRGGEQFLVLFLFLKWCLYLQPPGGLPWPHFSAPPRHRHPSTLLHVTRKMPFAECT

SEQ ID NO: 611 - protein, 6 aa, Homo sapiens
MFLREQ

SEQ ID NO: 612 - protein, 30 aa, Homo sapiens
MKTWLPKRSLLLCTPTTCRPAASPTLTCRS

SEQ ID NO: 613 - protein, 10 aa, Homo sapiens
MLLYLTVGYW

SEQ ID NO: 614 - protein, 27 aa, Homo sapiens
MTVPTLAMKKNQDAASWSLTCVSCLHY

SEQ ID NO: 615 - protein, 35 aa, Homo sapiens
MKFKSQCLEIKFYSHTACSFVYLLCMATFTLQWQS

SEQ ID NO: 616 - protein, 381 aa, Homo sapiens
MSRHEGVSCDACLKGNFRGRRYKCLICYDYDLCASCYESGATTTRHTTDHPMQCILTRVDFDLYYGGEAFSVEQPQSFTCPYCGKMGYTETSLQEHVTSEHAETSTEVICPICAALPGGDPNHVTDDFAAHLTLEHRAPRDLDESSGVRHVRRMFHPGRGLGGPRARRSNMHFTSSSTGGLSSSQSSYSPSNREAMDPIAELLSQLSGVRRSAGGQLNSSGPSASQLQQLQMQLQLERQHAQAARQQLETARNATRRTNTSSVTTTITQSTATTNIANTESSQQTLQNSQFLLTRLNDPKMSETERQSMESERADRSLFVQELLLSTLVREESSSSDEDDRGEMADFGAMGCVDIMPLDVALENLNLKESNKGNEPPPPPL

SEQ ID NO: 617 - protein, 113 aa, Homo sapiens
MSPSPRWGFLCVLFTAVHPAPSTAPVQDKCPVNTWEAMQASSQQLLQTDPRPKPFLLPPLPPLLLISAGTEVSSLVFQKSPLHTQPEGAIKTAGQPTSVHSKVLSKGSLLLGE

SEQ ID NO: 618 - protein, 35 aa, Homo sapiens
HKKSFQGRALGDPLFKGIWAGFIVVSSEESGKGRP

SEQ ID NO: 619 - protein, 48 aa, Homo sapiens
MIGKKKGTLEEIVLMIVVLVSTQCLIMTMEVVLKNLVIMTEWIMKMTD

SEQ ID NO: 620 - protein, 30 aa, Homo sapiens
MAMGAASSGWSAPASSSWSTLWWSSFPRPR

SEQ ID NO: 621 - protein, 25 aa, Homo sapiens
MLISVMLHSLWLVIHLGPQHTVILF

SEQ ID NO: 622 - protein, 38 aa, Homo sapiens
MFLCCQIGPLGPFRFCFLGAGFLPWTPSLGTVDIKCLA

SEQ ID NO: 623 - protein, 23 aa, Homo sapiens
MGWSSHWSNFLSVRLWFSTLAIC

SEQ ID NO: 624 - protein, 34 aa, Homo sapiens
MFYWGGLSFYFLLSSGVGFYCFLFGFGMEIWIAA

SEQ ID NO: 625 - protein, 58 aa, Homo sapiens
  SITE (54): Xaa equals any of the naturally occurring L-amino acids
MYMPAPPLSLAPAVGETFPVCRERMWSWQAWLLPDSVSSGNTQPSFKKKKTRSXPSDR

SEQ ID NO: 626 - protein, 33 aa, Homo sapiens
MCVCMHVCVCCVWWEAAWGCQKRAEGGIRPSWT

SEQ ID NO: 627 - protein, 32 aa, Homo sapiens
MLIITPKLKKVGSQPQMEDWAPLLPSSASLLP

SEQ ID NO: 628 - protein, 30 aa, Homo sapiens
MENCLYVVALMVLMPSVVWKCMIQLEMNGR

SEQ ID NO: 629 - protein, 114 aa, Homo sapiens
DRERNMATCAQLLRLVLEAEHIAPAAWHWPWDMGGRGRRVPAYVGRWAGAQTQQAPWGHSSPLHPFILKHLQRASSARLSGAKGTEMRTDSPLGETVFAWSCPQCKAQEWCRGA

SEQ ID NO: 630 - protein, 46 aa, Homo sapiens
EVIGLLLLLLLLCNNNRQKQRRGESADAWPLPWGFPSAEESVAAQL

SEQ ID NO: 631 - protein, 59 aa, Homo sapiens
  SITE (34): Xaa equals any of the naturally occurring L-amino acids
CPSVSACCLGLPIWIVGKSKRAWCLPTPPDSSRXKPRPHEACPTRSPMAQTAPPPSHKV

SEQ ID NO: 632 - protein, 243 aa, Homo sapiens
  SITE (146): Xaa equals any of the naturally occurring L-amino acids
MLVIQITSVDFHGIPLSVPQSLTRRQCTCRGWKEDEPMSRLCINQGERKSRWKEVGRWRKQQLLLALDDGPEGLSLLVTPLWVLFPYLSVTRFLILIPCCEFGSLCWAIQSSSERAKLVLELRCRWGKRGTQLDTKKGSLPSLSPXTVRGILSRQPPNSPSHLPSFVETAFDSPSLSLPFRVSCLVSGLREFLSLLPRTLKELLLKTGEYQAYLYMCNSARIQRKSSFQPLPLGRWFRVPHRD

SEQ ID NO: 633 - protein, 17 aa, Homo sapiens
LLLLLFMLSLGKPLGRT

SEQ ID NO: 634 - protein, 44 aa, Homo sapiens
PARLLPPGPAVALLLLRGSCSLCCCHQPHKASCKAMPSAGSNVP

SEQ ID NO: 635 - protein, 32 aa, Homo sapiens
MAPAPCSASPRPAGGRDGGGAPELSFLLSVLV

SEQ ID NO: 636 - protein, 8 aa, Homo sapiens
HRAVILAL

SEQ ID NO: 637 - protein, 73 aa, Homo sapiens
  SITE (52): Xaa equals any of the naturally occurring L-amino acids
MALSNSVAPKPSPPWPLLGCFLHSPSHFLVCCILHTFIMFTVALLCSDGHPXRPGVLPGPLLYLECRILGSSD

SEQ ID NO: 638 - protein, 45 aa, Homo sapiens
MAAAKALISLWLVSACGQWETSFPIYGGDMECQAVVFWWLEEERK

SEQ ID NO: 639 - protein, 74 aa, Homo sapiens
MLLPQILAWLTPLCSGFCQAVTFSMRPTWATIFNTAVYTASPPTTQHSQALTLLPLFFPFRQPSSNTWDHILIY

SEQ ID NO: 640 - protein, 34 aa, Homo sapiens
MQCPYLLGAQLLVSSICPVVPALPRPVNKCLVPD

SEQ ID NO: 641 - protein, 25 aa, Homo sapiens
MSMLFLFCVHVSLLIFLICSPMLYL

SEQ ID NO: 642 - protein, 39 aa, Homo sapiens
MSEAGWWAWLFVILHPFGMPDTFHNNFKKDKTTAEKCIE

SEQ ID NO: 643 - protein, 21 aa, Homo sapiens
MLAALACSWRLLSLGAHSGRA

SEQ ID NO: 644 - protein, 64 aa, Homo sapiens
MSSFGKCLFILVLGLFFNWVFVFFFAIDFLKFLDSNLLSDMWFTNIFSYSVDCLFILSIISFAL

SEQ ID NO: 645 - protein, 59 aa, Homo sapiens
MPGPHQLCLINAGQPCSLVTSVGHWLLGVFSILPCSLLAPGEKGPYRSLFQVTRSWGGP

SEQ ID NO: 646 - protein, 10 aa, Homo sapiens
MGVGLLNRII

SEQ ID NO: 647 - protein, 6 aa, Homo sapiens
MPFYPC

SEQ ID NO: 648 - protein, 38 aa, Homo sapiens
MGVLPGLFPFPPSLATVLGVWQLFGFFFFLQLCVCVFV

SEQ ID NO: 649 - protein, 43 aa, Homo sapiens [sequence omitted]

SEQ ID NO: 650 - protein, 27 aa, Homo sapiens
SFYVLFSNLQWYVFNIFATYTLGKKKM

SEQ ID NO: 651 - protein, 33 aa, Homo sapiens
MLRQVFFFPLCLGPVRGLLRTVSVIEGLYSFQL

SEQ ID NO: 652 - protein, 10 aa, Homo sapiens
NTMIAAGSCD

SEQ ID NO: 653 - protein, 51 aa, Homo sapiens
MCWYVISRPLWLNRLCMSSRLFVLPQPSVLITLRPAASVGFLPVGEHISRL

SEQ ID NO: 654 - protein, 20 aa, Homo sapiens
MLFVLLIWKLYMIYIKTFCF

SEQ ID NO: 655 - protein, 39 aa, Homo sapiens
LFWSVSETGIAFGVSRVLGMLEGHLQEAWGRREISCDAL

SEQ ID NO: 656 - protein, 198 aa, Homo sapiens
MFFAPTVLGLARLRHWVYLLCFSAGNYYNQGETRKKELLQSCDVLGIPLSSVMIIDNRDFPDDPGMQWDTEHVARVLLQHIEVNGINLVVTFDAGGVSGHSNHIALYAAVRALHSEGKLPKGCSVLTLQSVNVLRKYISLLDLPLSLLHTQDVLFVLNSKEVAQAKKAMSCHRSQLLWFRRLYIIFSRYMRINSLSFL

SEQ ID NO: 657 - protein, 24 aa, Homo sapiens
MILISVIPSFFPVISAVQTTYEQC

SEQ ID NO: 658 - protein, 83 aa, Homo sapiens
MCVFVYELMLLSLVFLPHWSLPSLPYFSFALHSNTVKPDIYFLCGSNSLIFPVDKRYVFYSFISLIVNRKQLENWNTFSLCGC

SEQ ID NO: 659 - protein, 28 aa, Homo sapiens
MPVWKCLLWCTPLLRCTQLLLQLQSRCC

SEQ ID NO: 660 - protein, 33 aa, Homo sapiens
MCSFHINFCLLSSTFILLTGLCFSVYASNIWVC

SEQ ID NO: 661 - protein, 88 aa, Homo sapiens
SLKIFSVSGVLQGWPLAPEPLPQCSHQPPPHPSVCRASSTGPHAAFFTHSALGRFVIWLSLHWAEVCVHRVGVPSSPFHSEGHTQRCQ

SEQ ID NO: 662 - protein, 11 aa, Homo sapiens
ERSSLMSCAFF

SEQ ID NO: 663 - protein, 72 aa, Homo sapiens
METPQLQVQGQLLHLLLCLYHHKVVQQKLLLLILLKLLKVTTLYPMEQILGSFHQLERSFIGIILSHRLLRP

SEQ ID NO: 664 - protein, 20 aa, Homo sapiens
MSGVKLQLFGTRLSLPLSSY

SEQ ID NO: 665 - protein, 26 aa, Homo sapiens
  SITE (3): Xaa equals any of the naturally occurring L-amino acids
MAXGSFLFFCLVHINVATSFLDLGLS

SEQ ID NO: 666 - protein, 30 aa, Homo sapiens
MNSYMCACVFSSEIHLGGGFFCFFNSVPDL

SEQ ID NO: 667 - protein, 36 aa, Homo sapiens
MALTLPSQWVFLVFILDDLYAHLSLSRNFCWKHLLF

SEQ ID NO: 668 - protein, 45 aa, Homo sapiens
MCCWIRFASILLRIFTPMFIRDIGLKFCFFVVSLPSFVIRMMLAS

SEQ ID NO: 669 - protein, 19 aa, Homo sapiens
MSLLLESCVEPLSFLLLLQ

SEQ ID NO: 670 - protein, 17 aa, Homo sapiens
SVWGSFLSMLMLLLSVC

SEQ ID NO: 671 - protein, 19 aa, Homo sapiens
QRPWILTTDLSVFFLCLFP

SEQ ID NO: 672 - protein, 38 aa, Homo sapiens
MPCGHLRIRAGIAGGSGAAQSLLFPYLESLWECDFDRA

SEQ ID NO: 673 - protein, 47 aa, Homo sapiens
MNVLCGYGLPIGRWFWGLRIILKLSLTDSPVFYKLTTNLSKDHLGRH

SEQ ID NO: 674 - protein, 35 aa, Homo sapiens
HSCGPDTCVCPSPVSPCLPVPLAALMVTPKGSNPC

SEQ ID NO: 675 - protein, 35 aa, Homo sapiens
MTSLLQNCVIFVKVVQYMTFNFFFFFFFFFFFFFW

SEQ ID NO: 676 - protein, 80 aa, Homo sapiens
MGRMAILACSLPTTWSSLSEAEGTSCPSPLRHGFLIAGRGGLGVDIQHSSRNRTPSEDEASGLPPAWQTQPVTPNAAMAW

SEQ ID NO: 677 - protein, 13 aa, Homo sapiens
MKLFCVLIVVVVT

SEQ ID NO: 678 - protein, 26 aa, Homo sapiens
MSQACFPISVKLFETLLCLCFVCACV

SEQ ID NO: 679 - protein, 44 aa, Homo sapiens
ICVANYRLWCKVCLIFLPLTPANCCILDSLFQYCIKTLVLCWTE

SEQ ID NO: 680 - protein, 253 aa, Homo sapiens
MNCFLSPLLTLLAKNGAFFAGSILAVLIALTIYDEDVLAVEHVLTTVTLLGVTVTVCRSFIPDQHMVFCPEQLLRVILAHIHYMPDHWQGNAHRSQTRDEFAQLFQYKAVFILEELLSPIVTPLILIFCLRPRALEIIDFFRNFTVEVVGVGDTCSFAQMDVRQHGHPQRLSAGQTEASVYQQAEDGKTELSLMHFAITNPGWQPPRESTAFLGFSRSRFSGMEQLLASPKGVCSLKMPSLRLSSPYNLSLSP

SEQ ID NO: 681 - protein, 65 aa, Homo sapiens
MAPSTATRHWHAHCFASCRSTGMQRLCGPGIPKNSLPVTSWWTWGASTTLGDTDMTITRGLSQRP

SEQ ID NO: 682 - protein, 63 aa, Homo sapiens
MQIHMIPVTYELKIRCLLLFVSFSRKMSQQPIRKLYQSTLDYKLTETINNKATQYEYNTPKGT

SEQ ID NO: 683 - protein, 31 aa, Homo sapiens
MCCSCCGRYPWVLGKHMCSLLWLQIPAYLKS

SEQ ID NO: 684 - protein, 46 aa, Homo sapiens
GIIQSVLFCAWFVLVNIASGSFISVQGWRTPAYKPNLVLCLFSYGL

SEQ ID NO: 685 - protein, 9 aa, Homo sapiens
AGAGLPPGS

SEQ ID NO: 686 - protein, 10 aa, Homo sapiens
MPLHSSLGGH

SEQ ID NO: 687 - protein, 10 aa, Homo sapiens
GLVAAVRFIS

SEQ ID NO: 688 - protein, 26 aa, Homo sapiens
IFLHLLSCSLLFAWTNGEKSAQNEIM

SEQ ID NO: 689 - protein, 63 aa, Homo sapiens [sequence omitted]

SEQ ID NO: 690 - protein, 37 aa, Homo sapiens
MLCQRSVGYKYLALFLGCLFCSIGLCTCCYTSPMLFW

SEQ ID NO: 691 - protein, 36 aa, Homo sapiens
  SITE (31): Xaa equals any of the naturally occurring L-amino acids
  SITE (33): Xaa equals any of the naturally occurring L-amino acids
MSSLLLIIILALSLAYKKKKKKLEGGPGTHXPXGGV

SEQ ID NO: 692 - protein, 57 aa, Homo sapiens
WVDWQRKWTTKFFMLRSFLLETSQIFRFLWIMKQKSTEDLLLLNLSWQRMLQQLSTT

SEQ ID NO: 693 - protein, 10 aa, Homo sapiens
WHPVCSWCLH

SEQ ID NO: 694 - protein, 27 aa, Homo sapiens
PAPHLPRLTLPCQVVWGPRCWGGESGS

SEQ ID NO: 695 - protein, 70 aa, Homo sapiens
MCDVLWGLFILLVHRRGTLPQESRHLSSSSSSSSATEEPPYLGQVSHCLPVMFTTHERTRRFDVSIKLNE

SEQ ID NO: 696 - protein, 41 aa, Homo sapiens
  SITE (40): Xaa equals any of the naturally occurring L-amino acids
MLLGLLVILVINLWMRQVLISTEFFNRRLCYRSYRFFPGXA

SEQ ID NO: 697 - protein, 4 aa, Homo sapiens
DKLM

SEQ ID NO: 698 - protein, 14 aa, Homo sapiens
GKGRLSRGKYYQSS

SEQ ID NO: 699 - protein, 42 aa, Homo sapiens
LPGSRSRCFIFPLFSHYIVISPTLSLVLFFSWKTRKPLSPKC

SEQ ID NO: 700 - protein, 66 aa, Homo sapiens
DLLLLFCGDVPCSLYVSSHVCLCTHIASCAVFVSLPLMPASGMMERLWSRLRIMTAYKTDSTLTGK

SEQ ID NO: 701 - protein, 265 aa, Homo sapiens
MATLLRPVLRRLCGLPGLQRPAAEMPLRARSDGAGPLYSHHLPTSPLQKALLAAGSAAMALYNPYRHDMVAVLGETTGHRTLKVLRDQMRRDPEGAQILQERPRISTSTLDLGKLQSLPEGSLGREYLRFLDVNRVSPDTRAPTRFVDDEELAYVIQRYREVHDMLHTLLGMPTNILGEIVVKWFEAVQTGLPMCILGAFFGPIRLGAQSLQVLVSELIPWAVQNGRRAPCVLNLYYERRWEQSLRALREELGITAPPMHVQGLA

SEQ ID NO: 702 - protein, 21 aa, Homo sapiens
EKQLYLESYCLGFLIRHSSPD

SEQ ID NO: 703 - protein, 28 aa, Homo sapiens
MVKTVFAHCFLLFHLVTNDQDDLIFFPS

SEQ ID NO: 704 - protein, 21 aa, Homo sapiens
  SITE (14): Xaa equals any of the naturally occurring L-amino acids
MAGRVGYLRYCLFXISALLIF

SEQ ID NO: 705 - protein, 62 aa, Homo sapiens
MCNLPENLFCFWSTSGVASGPRAFATVLPPAPTSSVCLQSLIYRSPRCLLYSLCAWPFCYLA

SEQ ID NO: 706 - protein, 60 aa, Homo sapiens
ELWWFWLLWTVLILFSCCCAFRHRRAKLRLQQQQRQRRNQLVGLSWGMPWGWSFPYRFTA

SEQ ID NO: 707 - protein, 125 aa, Homo sapiens
GRGPVLGPMVYAICYCPLPRLADLEALKVADSKTLLESERERLFAKMEDTDFVGWALDVLSPNLISTSMLGRVKYNLNSLSHDTATGLIQYALDQGVNVTQVFVDTVGCQRHTRRGCSKVFPGLR

SEQ ID NO: 708 - protein, 38 aa, Homo sapiens
MLPNFSWLLLLCHTAHRSCPPPPYTPRPHPPVRQFKSC

SEQ ID NO: 709 - protein, 59 aa, Homo sapiens
MLSQTNGSHVASTLLSFAVAWLGILGSSPSPTLSAPSQFLPGPHTLLQLPTLLQSHCRP

SEQ ID NO: 710 - protein, 14 aa, Homo sapiens
HSSISRSSLSCPYS

SEQ ID NO: 711 - protein, 33 aa, Homo sapiens
MFWTNLVQYVFCLSFFILLLSQQVENLALLGSM

SEQ ID NO: 712 - protein, 4 aa, Homo sapiens
FVCI

SEQ ID NO: 713 - protein, 31 aa, Homo sapiens
MAPLRRLTVWRVGLRLGPAGAAGGPGEASSV

SEQ ID NO: 714 - protein, 4 aa, Homo sapiens
MWNW

SEQ ID NO: 715 - protein, 20 aa, Homo sapiens
MGATARPGPTRGRWDSCLRQ

SEQ ID NO: 716 - protein, 56 aa, Homo sapiens
MRSIWKPTRCWPLCTLLRSTSSQHWQKPVSTFWRQVWKPRTPASCCPRAGCLRSPS

SEQ ID NO: 717 - protein, 5 aa, Homo sapiens
MVKNL

SEQ ID NO: 718 - protein, 45 aa, Homo sapiens
AAAFVGWLSGLLGFSFMVARWHYSNSSIMFVFKTEGKGDGLYQSL

SEQ ID NO: 719 - protein, 323 aa, Homo sapiens
  SITE (217): Xaa equals any of the naturally occurring L-amino acids
  SITE (226): Xaa equals any of the naturally occurring L-amino acids
  SITE (229): Xaa equals any of the naturally occurring L-amino acids
MELSKAFSGQRTLLSAILSMLSLSFSTTSLLSNYWFVGTQKVPKPLCEKGLAAKCFDMPVSLDGDTNTSTQEVVQYNWETGDDRFSFRSFRSGMWLSCEETVEEPGERCRSFIELTPPAKRENPMVIPGNADHLHRTSIHQLPPATNRLATHWEPCLWAQTERLCCCFLCPVRSPGDVAHMMYSQVFQATVNLGPEDWRPHVWNYGWAFYMACSPSXAAWRRLSPXSTXTPGWCWSSSASIVKSFKENPNCLPHHHQCFPRRLSSAAPTVGPLTSYHQYHNQPIHSVSEGVDFYSELRNKGFQRGASQELKEAVRSSVEEEQC

SEQ ID NO: 720 - protein, 37 aa, Homo sapiens
VLSCWTWMTWCGWLCPTPSASTHTSRNCTAALCRKDW

SEQ ID NO: 721 - protein, 7 aa, Homo sapiens
FVKLRHP

SEQ ID NO: 722 - protein, 34 aa, Homo sapiens
MAAMRHLLRLFSGCGDLGFLTLYIFFLYSKQNNF

SEQ ID NO: 723 - protein, 38 aa, Homo sapiens
MLRLAGPPFYWPVLLALLPFASSGFQVSLKVGGCLSSL

SEQ ID NO: 724 - protein, 12 aa, Homo sapiens
MTSVQQFCIYSE

SEQ ID NO: 725 - protein, 16 aa, Homo sapiens
MRGKHVCLLLLLLGRF

SEQ ID NO: 726 - protein, 20 aa, Homo sapiens
MPQASTHIKAPPPPSPEPGN

SEQ ID NO: 727 - protein, 129 aa, Homo sapiens
MFHLQPLMFLGLFPLFAVFEGLHLSTSEKIFRFQDTGLLLRVLGSLFLGGILAFGLGFSEFLLVSRTSSLTLSIAGIFKEVCTLLLAAHLLGDQISLLNWLGFASASREYPSTLPSKPCIPEVMVAPRP

SEQ ID NO: 728 - protein, 13 aa, Homo sapiens
QKAALRLPFPVLL

SEQ ID NO: 729 - protein, 33 aa, Homo sapiens
MASTTLWLLWKTWLSSGLRCVQRVPSRVFYSGC

SEQ ID NO: 730 - protein, 8 aa, Homo sapiens
MSLLLFLF

SEQ ID NO: 731 - protein, 36 aa, Homo sapiens
MTSGEPWACAGCSFPATAAASDFASVLPGVEGSVCC

SEQ ID NO: 732 - protein, 69 aa, Homo sapiens
MSHFRPARCLPGPCQTLLTFPLLVCAGLRRPPRPHSTQPGSSCSPRHPSFPSLSWVMLLPPCVTFEAVK

SEQ ID NO: 733 - protein, 207 aa, Homo sapiens
MGRKLSSPTTPRDMLLSPTLRPRRRCLESSVDDAGCPDLGKEPLVFQNRQFAHLMEEPLGSDPFSWKLPSLDYERKTKVDFDDFLPAIRKPQTPTSLAGSAKGGQDGSQRSSIHFETEEANRSFLSGIKTILKKSPEPKEDPAHLSDSSSSSGSIVSFKSADSIKSRPGIPRLAGDGGERTSPERREPGTGRKDDDVASIMKKYLQK

SEQ ID NO: 734 - protein, 23 aa, Homo sapiens
MFQAPALAFLSGLQLSFVACSIY

SEQ ID NO: 735 - protein, 30 aa, Homo sapiens
FCLFVCLFCMAHVFTIPGALPSFVWIQFSI

SEQ ID NO: 736 - protein, 21 aa, Homo sapiens
MWLSAFFLARLADSVLEESII

SEQ ID NO: 737 - protein, 27 aa, Homo sapiens
MASWICVFCTSPSGCSATCLVCYPAFP

SEQ ID NO: 738 - protein, 34 aa, Homo sapiens
MLFFFSIALSSFFFLNLFLCLCNSRVIGIVLTIS

SEQ ID NO: 739 - protein, 71 aa, Homo sapiens
ERCLSLLFAAIIKIPIHGVNYNEEKFISWSSGGWGVPKSRCWHLVRSFLLSTPWWRVEGQKEREGWRPIGG

SEQ ID NO: 740 - protein, 32 aa, Homo sapiens
MSVFRVIQILLFPFSLRYSLGDLMYLNLTTIY

SEQ ID NO: 741 - protein, 14 aa, Homo sapiens
MSTFLWDIQTTYCF

SEQ ID NO: 742 - protein, 118 aa, Homo sapiens
MDLAGLLKSQFLCHLVFCYVFIASGLIINTIQLFTLLLWPINKQLFRKINCRLSYCISSRLQGPGQERAGLCPNYRLDVVLHRDGLLFAQVGAGSQDGCHQFAAPPGLPREVFFPDSL

SEQ ID NO: 743 - protein, 42 aa, Homo sapiens
EWVKGIVIWQFYLLFYACLSSACLFSPSANIPFMPWAFSTVL

SEQ ID NO: 744 - protein, 54 aa, Homo sapiens
MWCLSHLSLSLSLSHLSLARRAGRPMPWCPATQLVILWLQNWWSPMMDMRRSLR

SEQ ID NO: 745 - protein, 33 aa, Homo sapiens
LPRLQSALLLLPLPPTLQGHVRAPIYPPPACRS

SEQ ID NO: 746 - protein, 18 aa, Homo sapiens
MPHPCLPVSTHLEGRWGC

SEQ ID NO: 747 - protein, 234 aa, Homo sapiens
KLLYTTLRHPKCFLQRLSLENCHLTEANCKDLAAVLVVSRELTHLCLAKNPIGNTGVKFLCEGLRYPECKLQTLVLWNCDITSDGCCDLTKLLQEKSSLLCLDLGLNHIGVKGMKFLCEALRKPLCNLRCLWLWGCSIPPFSCEDLCSALSCNQSLVTLDLGQNPLGSSGVKMLFETLTCSSGTLRTLRLKIDDFNDELNKLLEEIEEKNPQLIIDTEKHHPWEERPSSHDFMI

SEQ ID NO: 748 - protein, 8 aa, Homo sapiens
SLFWGCPW

SEQ ID NO: 749 - protein, 12 aa, Homo sapiens
AGGLGLHARCWR

SEQ ID NO: 750 - protein, 22 aa, Homo sapiens
ILIFMVFPFVLVFASLTSVISI

SEQ ID NO: 751 - protein, 18 aa, Homo sapiens
MVAWTSTWSRAWQSTLRM

SEQ ID NO: 752 - protein, 151 aa, Homo sapiens
  SITE (4): Xaa equals any of the naturally occurring L-amino acids
  SITE (9): Xaa equals any of the naturally occurring L-amino acids
  SITE (14): Xaa equals any of the naturally occurring L-amino acids
  SITE (17): Xaa equals any of the naturally occurring L-amino acids
  SITE (36): Xaa equals any of the naturally occurring L-amino acids
  SITE (69): Xaa equals any of the naturally occurring L-amino acids
  SITE (71): Xaa equals any of the naturally occurring L-amino acids
  SITE (87): Xaa equals any of the naturally occurring L-amino acids
  SITE (92): Xaa equals any of the naturally occurring L-amino acids
  SITE (95): Xaa equals any of the naturally occurring L-amino acids
  SITE (108): Xaa equals any of the naturally occurring L-amino acids
  SITE (119): Xaa equals any of the naturally occurring L-amino acids
  SITE (150): Xaa equals any of the naturally occurring L-amino acids
MRVXAPRTXLLLLXGAXALTETWAGSHSMRYFYTAXSRPGRGEPRFIAVGYVDDTQFVRFDSDARVRGXSXGRLRRQGLHRPERGPXLLDRXGHXGSDHPAQVGGGPXGGAAESLPGGXVRGVAPQIPGEREGDAAARGPPKDTRDPPPXL

SEQ ID NO: 753 - protein, 132 aa, Homo sapiens
LLRPLAWLVLRAPRGGAQTPLYCALQEGIEPLSGRYFANCHVEEVPPAARDDRAAHRLWEASKRLAGLGPGEDAEPDEDPQSEDSEAPSSLSTPHPEEPTVSQPYPSPQSSPDLSKMTHRIQAKVEPEIQLS

SEQ ID NO: 754 - protein, 66 aa, Homo sapiens
ETVGCGFSLSFFFNFLCWVFEQPHVPFPGSLLIYLLELKWMGSRALCVSMLCFLTRLHSEALMPFG

SEQ ID NO: 755 - protein, 29 aa, Homo sapiens
MATLSLRAGLGFCFLLGLTEYFVGFHLIP

SEQ ID NO: 756 - protein, 31 aa, Homo sapiens
MPLVPLLLSCPPTWLARFGVSLPCSGIPVLA

SEQ ID NO: 757 - protein, 16 aa, Homo sapiens
MTCCLLRSGVPVCLSL

SEQ ID NO: 758 - protein, 37 aa, Homo sapiens
MGLRRHFPALWVLWWPWCPSWRQTRTPSAPSMQMATR

SEQ ID NO: 759 - protein, 26 aa, Homo sapiens
CGTAYCLFTPSPGMPQASAFHCSSLF

SEQ ID NO: 760 - protein, 33 aa, Homo sapiens
MLLGTYFKVYLIFKCFYIFLYKSRKMHFHLQKS

SEQ ID NO: 761 - protein, 32 aa, Homo sapiens
  SITE (9): Xaa equals any of the naturally occurring L-amino acids
MGLVERLLXCFTHGLWQFAQTAPIRTPLAAFA

SEQ ID NO: 762 - protein, 196 aa, Homo sapiens
MWFMYLLSWLSLFIQVAFITLAVAAGLYYLAELIEEYTVATSRIIKYMIWFSTAVLIGLYVFERFPTSMIGVGLFTNLVYFGLLQTFPFIMLTSPNFILSCGLVVVNHYLAFQFFAEEYYPFSEVLAYFTFCLWIIPFAFFVSLSAGENVLPSTMQPGDDVVSNYFTKGKRGKRLGILVVFSFIKEAILPSRQKIY

SEQ ID NO: 763 - protein, 47 aa, Homo sapiens
MRQRQSHYCSVLFLSVNYLGGTFPVYQKSRNLQRDKIQETFAQKRIK

SEQ ID NO: 764 - protein, 46 aa, Homo sapiens
GRRRAQLLWHIIFLQLYFWARWQREGSVMPPHRHSIRRRVDSFWML

SEQ ID NO: 765 - protein, 22 aa, Homo sapiens
MLLAVILQLIPPVTKAFVYELT

SEQ ID NO: 766 - protein, 5 aa, Homo sapiens
MPCLF

SEQ ID NO: 767 - protein, 29 aa, Homo sapiens
MGKKHHVGRTAWVFALVVVCILGPLLCSS

SEQ ID NO: 768 - protein, 43 aa, Homo sapiens
MVPLLRLCSSFVLLLFCYVTAKKKKKKEKKSANCVHAFLPAGM

SEQ ID NO: 769 - protein, 51 aa, Homo sapiens
  SITE (43): Xaa equals any of the naturally occurring L-amino acids
MRAFIWTCGTWTLWSLSDRSLGSSRICMGFAGSLKRPGRTKAXTTFWGTWF

SEQ ID NO: 770 - protein, 90 aa, Homo sapiens
MNIKCFVMCGGLYLASILVTWREHGSPHFLDEHTNVLRKCMIGSKLQNHLPSRIIPIICTASPGANGFIQRGSTELWVIRRQYPRVRVFP

SEQ ID NO: 771 - protein, 50 aa, Homo sapiens
MYIFELSLYLEGTSFVVVLLFLLISVSLDSPPTTKGWGLCLTYLGALIVQ

SEQ ID NO: 772 - protein, 3 aa, Homo sapiens
VER

SEQ ID NO: 773 - protein, 32 aa, Homo sapiens
MGSWLWTVANLLHIPPNLYRMLAGRWQRAHWD

SEQ ID NO: 774 - protein, 24 aa, Homo sapiens
MASELARLLHAFGLMGPRKAGESS

SEQ ID NO: 775 - protein, 66 aa, Homo sapiens
  SITE (31): Xaa equals any of the naturally occurring L-amino acids
MQLEALNLLHTLVWARSLCRAGAVQTQERLXGSASPEQVPAGECCALQEYEAAVGAAQERADPGAG

SEQ ID NO: 776 - protein, 39 aa, Homo sapiens
MLLEKVIRLRCSCFVLLCFSLSWVGVSSSNDVQVDLFSH

SEQ ID NO: 777 - protein, 71 aa, Homo sapiens [sequence omitted]

SEQ ID NO: 778 - protein, 327 aa, Homo sapiens
MLATSQALDTVWRMAKGFVMLAVSFLVAAICYFRRLHLYSGHKLKWWIGYLQRKFKRNLSVEAEVDLLSYCAREWKGETPRNKLMRKAYEELFWRHHIKCVRQVRRDNYDALRSVLFQIFSQGISFPSWMKEKDIVKLPEKLLFSQGCNWIQQYSFGPEKYTGSNVFGKLRKYVELLKTQWTEFNGIRDYHKRGSMCNTLFSDAILEYKLYEALKFIMLYQVTEVYEQMKTKKVIPSLFRLLFSRETSSDPLSFMMNHLNSVGDTCGLEQIDMFILGYSLEVKIKVFRLFKFNSRDFEVCYPEEPLRDWPEISLLTENDRHYHIPVF

SEQ ID NO: 779 - protein, 7 aa, Homo sapiens
MFECYCL

SEQ ID NO: 780 - protein, 130 aa, Homo sapiens
MYQTPMEVAVYQLHNFSISFFSSLLGGDVVSVKLDNSASGASVVAIDNKIEQAMDLVKNHLMYAVREEVEILKEQIRELVEKNSQLERENTLLKTLASPEQLEKFQSCLSPEEPAPESPQVPEAPGGSAV

SEQ ID NO: 781 - protein, 57 aa, Homo sapiens
MNSQVLYFTVLVCLMEISRWSHKNILCSVPSKRTIYFSSLIVPQSHIWWWSAKSHLV

SEQ ID NO: 782 - protein, 9 aa, Homo sapiens
ALWLLLQLS

SEQ ID NO: 783 - protein, 16 aa, Homo sapiens
FLISLCILIPFLILSP

SEQ ID NO: 784 - protein, 19 aa, Homo sapiens
MWLMMQLLSFFVFLCLLYL

SEQ ID NO: 785 - protein, 58 aa, Homo sapiens
MGFPLWITRPFSLAALNVFFIPFNLGESDDYVSWGCSSREVSLWWSLSFLNLNVGLSC

SEQ ID NO: 786 - protein, 75 aa, Homo sapiens [sequence omitted]

SEQ ID NO: 787 - protein, 7 aa, Homo sapiens
MGLWWRC

SEQ ID NO: 788 - protein, 32 aa, Homo sapiens
MALLILLFCILKYKQLDIAEDGSGGQGQISQM

SEQ ID NO: 789 - protein, 69 aa, Homo sapiens
MKLLLCFWVNRCACQLACVLSKFHKLKVFKGCVVSELYVSFLSLYLQRVRNEIYTSKVSLINMAFCFSM

SEQ ID NO: 790 - protein, 124 aa, Homo sapiens
  SITE (102): Xaa equals any of the naturally occurring L-amino acids
ELLILNFCKCFLLQSMVFAKTCGSWRSQACLVGTSMRSVLNPRVKSGRFVKILPDYEHMAYRDVYTCLLHRYRHILGLWQPDIGPYGGLLNVVVDGLFIIGXMRRAPPICTVHSTSIAFLFYFF

SEQ ID NO: 791 - protein, 21 aa, Homo sapiens
MFKVRGFLSICLVFCWQVTCR

SEQ ID NO: 792 - protein, 47 aa, Homo sapiens
MIFPKICPISPNLVSVLSLVFFWTLLGSRRVCYQFSRLGEVRSGEQL

SEQ ID NO: 793 - protein, 38 aa, Homo sapiens
MLSPSQTPGSCLKWAPSWVTRCTFWTLVVASLAQKGPK

SEQ ID NO: 794 - protein, 124 aa, Homo sapiens [sequence omitted]

SEQ ID NO: 795 - protein, 348 aa, Homo sapiens
  SITE (34): Xaa equals any of the naturally occurring L-amino acids
  SITE (37): Xaa equals any of the naturally occurring L-amino acids
MNMTQARVLVAAVVGLVAVLLYASIHKIEEGHLXVYXRGGALLTSPSGPGYHIMLPFITTFRSVQTTLQTDEVKNVPCGTSGGVMIYIDRIEVVNMLAPYAVFDIVRNYTADYDKTLIFNKIHHELNQFCSAHTLQEVYIELFDQIDENLKQALQKDLNLMAPGLTIQAVRVTKPKIPEAIRRNFELMEAEKTKLLIAAQKQKVVEKEAETERKKAVIEAEKIAQVAKIRFQQKVMEKETEKRISEIEDAAFLAREKAKADAEYYAAHKYATSNKHKLTPEYLELKKYQAIASNSKIYFGSNIPNMFVDSSCALKYSDIRTGRESSLPSKEALEPSGENVIQNKESTG

SEQ ID NO: 796 - protein, 132 aa, Homo sapiens
MLVIQITSVDFHGIPLSVPQSLTRRQCTCRGWKEDEPMSRLCINQGERKSRWKEVGRWRKQQLLLALDDGPEGLSLLVTPLWVLFPYLSVTRFLILIPCCEFGSLCWAIQSSSERAKLVLELRCRWGKRGLS

SEQ ID NO: 797 - protein, 9 aa, Homo sapiens
MPLWAHLAS

SEQ ID NO: 798 - protein, 327 aa, Homo sapiens; identical to SEQ ID NO: 778

SEQ ID NO: 799 - protein, 7 aa, Homo sapiens
MFECYCL

SEQ ID NO: 800 - protein, 130 aa, Homo sapiens; identical to SEQ ID NO: 780

SEQ ID NO: 801 - protein, 57 aa, Homo sapiens; identical to SEQ ID NO: 781

SEQ ID NO: 802 - protein, 9 aa, Homo sapiens
ALWLLLQLS

SEQ ID NO: 803 - protein, 9 aa, Homo sapiens
ALWLLLQLS

SEQ ID NO: 804 - protein, 16 aa, Homo sapiens
FLISLCILIPFLILSP

SEQ ID NO: 805 - protein, 19 aa, Homo sapiens
MWLMMQLLSFFVFLCLLYL

SEQ ID NO: 806 - protein, 19 aa, Homo sapiens
MWLMMQLLSFFVFLCLLYL

SEQ ID NO: 807 - protein, 58 aa, Homo sapiens; identical to SEQ ID NO: 785

SEQ ID NO: 808 - protein, 75 aa, Homo sapiens [sequence omitted]

SEQ ID NO: 809 - protein, 75 aa, Homo sapiens [sequence omitted]

SEQ ID NO: 810 - protein, 75 aa, Homo sapiens [sequence omitted]

SEQ ID NO: 811 - protein, 75 aa, Homo sapiens [sequence omitted]

SEQ ID NO: 812 - protein, 75 aa, Homo sapiens [sequence omitted]

SEQ ID NO: 813 - protein, 7 aa, Homo sapiens
MGLWWRC

SEQ ID NO: 814 - protein, 32 aa, Homo sapiens; identical to SEQ ID NO: 788

SEQ ID NO: 815 - protein, 69 aa, Homo sapiens; identical to SEQ ID NO: 789

SEQ ID NO: 816 - protein, 123 aa, Homo sapiens
ELLILNFCKCFLLQSMVFAKTCGSWRSQACLVGTSMRSVLNPRVKSGRFVKILPDYEHMAYRDVYTCLLHRYRHILGLWQPDIGPYGGLLNVVVDGLFIIVMRRAPPICTVHSTSIAFLFYFF

SEQ ID NO: 817 - protein, 47 aa, Homo sapiens
  SITE (17): Xaa equals any of the naturally occurring L-amino acids
MFKVRGFLSICLVFCWXGHMQVIGYGKGKMPRLLLGWSPSPKFKPPE

SEQ ID NO: 818 - protein, 47 aa, Homo sapiens; identical to SEQ ID NO: 792

SEQ ID NO: 819 - DNA, 131 bp, Homo sapiens
ggaggctgaggcaggagaatggcgtgaacccaggaggcggagcttgcagtgagctgagattgcgccactgcactccagcctgggcaacagagcgagactccgtctgaaaaaaaaaaaaacaaaaactggtg

SEQ ID NO: 820 - DNA, 162 bp, Homo sapiens
agctacttgggaggctgaggcaggagaatggcgtgaacccgggaggcggagcttgcagtgagccgagatcccgccactgcactccagcctgggcgacagagcgagactccgtctcaaaaaaaaaaaaaaaaaaaaaaaaaaaaaaaaaaaaaaaagaacaaa

SEQ ID NO: 821 - DNA, 100 bp, Homo sapiens
ctgaggcaggagaatggcgtgaacccgagaggcggagcttgcagtgagccgagatcgcgccactgcactccagcctgggcgacagagcgagactcccctt

SEQ ID NO: 822 - DNA, 140 bp, Homo sapiens
ggctgaggcaggagaatggcgtgaacccgggaggcggagcttgcagtgagtcgagatcgcgccactgcactccagcctgggcgacagagcgaaactccgtctcaaaaaaaaaaaaaaaaaaaaaaaaaaagaggggaaaa

SEQ ID NO: 823 - DNA, 114 bp, Homo sapiens
gaggcaggagaatggcgtgaaccctggaggcagagcttgcagtgagccgagatcgcgccactgcactccagcctgggcgacagagcaagattccgtctcaaaaaaaaaaaaacg

SEQ ID NO: 824 - DNA, 61 bp, Homo sapiens
atgccactgcactccagcctgggcgacagagtgagactccatctcaaaaaaaaaaaaaaaa

SEQ ID NO: 825 - DNA, 136 bp, Homo sapiens
ggcaggagaatggcgtgaacccgggaggcggagcttgcagtgagccgagattgtgccactgcactccagcctgggcgacagagtgagactccgtctcaaaaaaaaaaaaaaaaaaaaaaaaaaaaaaaaaaaaaaa

SEQ ID NO: 826 - DNA, 123 bp, Homo sapiens
aggcaggagaatggcgtgaacccgggaggcggagcttgcagtgagccgagatcccgccactgcactccagcctgggcgacagagcgagctccgtctcaaaaaaaaaaaaaaaaaatgctgtta

SEQ ID NO: 827 - DNA, 45 bp, Homo sapiens
ccagcctgggggacagagcgagactccgtctcaaaaaaaaaaaaa

SEQ ID NO: 828 - DNA, 368 bp, Homo sapiens
ggcatgggcaaggacttcatgtctaaaacgccaaaagcaatggcaacaaaagacaaaattgacaaatgggatctaattaaactaaagagcttctgcacagcaaaagagtctaccatcagagtgaacaggcaacctatacaatgggagaaaaattttgcaatctactcatctgacaaagggctaatatccagaatctacagtgaactcaaacaaatttacaagaaaaaaacaaacaaccccatcaaaaagtgggcaaagtatatgaacagacacttctcaaaagaagacatttatgcagctaaaagacacatgaaaaaatgcccatcatcactggccatcagagaaatgcaaatcaaaaccacaatgag

SEQ ID NO: 829 - DNA, 2925 bp, Homo sapiens
ctcccgagtagctgggactacaggcgcccgccaccacgcctggctaattttttgtatttttagtagagacggggtttcaccgcgttagccaggatggtcttgatctcctgacctcgtgatccgcccgtctcggcctcccaaagtcctgggattacaggcgtgagccaccgcgcccggctgagatgggtattattaagaaattaagatgtggattaccagggtaagtcatatttcaatgtgcaacctctgcaagtccacagggtgtgatatggacattaaggagatctatggacgaatagcgtatgataccttgacaagttgacaaaatgtaaaatagttgaatggccatagaaaaaaaccagctttttagccccataggccgagggattcaggagggctggctacgggcattttggaatggaagatgttgtaccaacaaatcaagcttaggttcctggcaatttgcccacatataatatgtgaaagttcagatgtgaaataaatctgcggctaatagtaagaacctagccacaggagttaaaacttacggttctgggaccagatggactgccttctaatcttagtcttactacattttagcggtaaaaccttcagcaagttatttagcctccagcatctcagttttctcatctgtaaaatggtgataatgctactcttacattgggttgtagtaggataaaaggagaaaacgtatgtaaaggatttagtagaaacttattaaaattaagcaattattatttctcaattctaagattctaacctgcaaaaggcataaggcagctgctgagaacagggtgagaagatagggattcggtcaggaaaagtcttgtttccctgttgctgttggtggttttgtttgctcatttgtgtgttttttttattaatcattttcacttgtgtttattgacaagcttaatcaataatgccattgacatttagtaaaagtaaatttccttaagtgatctcccaggtagcaatgtttattcattatgtgtggagtagagataggaattattttattgctgcaaatattttattattggtttttcaagttttaaaagtaattttaattttttaatttttgtgagtatatagtaagtgcacatatttatggggtacatgagatattttgatacaggcatatgatgtgtaataatcacatcagggtaaacagggtaagcatcacctcaagcatttgtccttttttgtattacaaagaatctaattatactcttttagttatttttaaatgtacaataaattattgttgactatagttttgccactgcaaacaatagaaggcttcctgatacagcctcctagtcattggagttctatggcagaattcctaaagtttttaagtttcatgagatggctaaattttggtaaatatgatactttctttgaacagatgctacagaggccaatataaaggagtgtaacagagtgacacctgtgatcagtatctctccaactacaaagagtgtcccttaaatttcttctgtgtggttcctctttttttttttttttttttttgagacgaagtctcgctctgtcgcccaggctggagtgcagtggcgcgaacttggctcgctgcaagctccgcctcccgggttcactccattctcctgcctcaccctctcaagtagctgggactacaggtgcctgccaccactcccggctaatttttttttgcatttttagtgagagatggggtttcactgtgttagccaggatggtctccatctcctgacctcatgatccagccgccttggcctcccaaagtgctcggattacaggcgtgagccaccgcgctcggcctgtgtggctcctcttaagtaatactctgcttcgtccatataagcagaggtcagaactggctaagaatttctttatgtgtgtttatcctgatgttttcctactgtcacttttcttttcttatggattagcattgagggaatggtcagatggtgcctgcgtgagtctgattgaaacattttagcggcggggtgcgggggttgatggcatgtgcaatagtttaggatatttgagttagtggcagaatgtagacatgagggtgagtagagagtgcgtagcagagcaagcaattcaggaatctatgttggttaattacttttgttttgtggacattttattctacctgaaaagattatctaggaactacagaaattaatgacgtgtagtggaaactttgcacagtgtaagtgttatccatttacttctcttagtttccaatacaatgactctcctggtagctgtcatacatgataaatataatttcgttaataaaattatattttatataattgcgtactttaaacaagtgatcaatataactcagttataaatgtacagtaacaaagatcaatggataataaatacttctgcgttcattttcatggatacattctatttttgtttgtctcacaagcagtaatcagactatgaatcatgatatagctccataaacacttactttatagcaattcactgatatatgctccaccaaaaaaaattaagagacggatacaagcaatttaaagcttctgtgtgtgtgtgcatgcaaccgatgtgtatggcttttttttttttttttttttttgacacagagtgtcgctctgtcgcccaggctggagtgcagtggcgtgatctccgctcactgcaagctccgcctgcctggttcacgccattctcctgccttagcctcccaagtagctgggacttcaggcgcctgacaccacgcctggctaattttttgtatttttagtagagacggggtttcaccgtgttatccaggatggtctccatctcctgacctcgtgatccacctgcctccgcctcccaaagtgctgggattacaggcttgagcctcctcgcccggcc

SEQ ID NO: 830 - DNA, 102 bp, Homo sapiens
ttttttttttttttttttttgagacggagtctcgctctgtcgcccaggctggagtgcagtggcacgatctcggctcactgcaagctctgcctcccgggttca

SEQ ID NO: 831 - DNA, 22001 bp, Homo sapiens
ggaagtgcaaagaggcgggcgtgccagtccctggacagctacgacgccatgaatatcttgcccaagaagagctggcacgtccggaacaaggacaatgtcgcccgcgtgcggcgtgacgaggcccaggcccgggaggaggagaaggagcgtgagcggagggtgctgctggctcagcaagaggtaagctcggaagccggcagggcggcgctccggggcccagcgcgcaggcgccgcggttgggggccggaagcggaggcgttgcgcaggctcaatgtgccccgtgtgaaattcgggaccaggcgccgatcccactttcgaggacgttgccccgcaaaccttgtgcccacttccacgaaaccttccttgatctcgccctcgtcttagtttttcccccactgatgtatttcacatggctggaacagtgtctagcacaaaagagaagcttaacatttaatgaatccgtgaacccttggacagttcaaggaaattcggatcactttttagtttgcctgcacagcctatttattgagcatctactgtatgctaactacatgccgtgcacctgacttgcggaatccccaataagcactgttcgttcttagaggggcactgtcatctctgttgcacgaagtgagatggcttcagtgaggggaaggcacattttaaggagaggcggacagccaggctccacgccatcgggcgagccctttcgtgcaccgccccctagacacatacacacaaacacgggctttccgtatggctctttaaatctgtttggtgtacacccaactttcatttccttagctagtctgatcctccgccgtgggtgggaggtagtctaggtttttagaatctcagtaggctgctgagcgctgtttgaaatccgcgtcctgaaggcaggggacagggcttcagcagacttggggtagtcacttggagccatggctagaattcagatcgtctggcctaatgcatacctttatggctgttttaattgtctcacttgaggttaggaacccctttggtttaggccagggacctcctcccatacatccttgatgacccgtggtttactatttgaaagggagtttacaaaacccaggcgttgcctcatctgcctaccctcacccccagctaggacaggtgcctcttttaggcgcctagtgctccctttctcataaccccagcaccctggactgccattttctgtggtgggcaccagactcacagttcttgaattacctctaggttctgaatgtcctgcctataactttctccccaggcccgtacagaattcctacggaagaaagccagacatcagaactcactgcctgagcttgaagcagcagaggcgggagccccaggttctggccctgtggacctgtttcgggagctgctggaggaagggaaaggagtgatcagaggcaataaagagtacgaggaagaaaagcgacaggagaaagtaagctggcctcacccacttcatcagaggggccatgaatcgagttggagggagggggcactttagccattggttgtgaccaaggtcaaacaagagtgaacacacagaatttaggaccataccaaggcatgacactcaaaaagcgttggctattgccgtctgggcgcccacaggggttggaggtagatgctagaggtccccagctgctgggcaaaccgctcagttctccaaactggaggagtctcaaacctgatgggcttttaaaaatttaaatcagccggctgtggctcacgcctgtaatcccaccaccttgggaggctgaggcgggtggatcacctgaggtcaggagttcaagaccagcctggtcaacatggtatctctaaaaatacaaaaaaaattagccgggcatggtggtgcgcgcctgtaatcccagggaagctgaagcaggagaatcgcttgacccaggaggtggaagctgcagtaagccgagattgcgccactgcactccagcctgggtgacagagcgagaccccatctcaaaacaatcaaacaaaaagtgaatcaatcgcctcttgctttttggctaagatcaagtgtaaaaggtacatcagtggctgtgcatggtggctcacgcctgtaatcccagcactttgggaggccaacgtgggtggatcacctgaggtcagaagttcaagaccagcctggccaaacatggcaaaaccccgtctctactaaaaatacaaaaattagctgggcatggtggtgtgtgcctgtaatcccagctactcggggggctgaggtaggaggattgcttgaacctgggaagcagaggttgcagtgagccgagatcgtgccactgcactcgagtctgggcaacagagcgagactccatctcaaaaaaaagaggtacatcagctcttgtcatttatctgctgtctctggacttgctgaccccacccatcgctcctctgctttgcttgatcccttcaggcttctcttcaagtctctctgcaaagatgcctgcctctgaacactcaagtggctccacttgtcccctccttcccctgctgttactgtacctgctactgtccccccagggggagctttgcctctgtttgtcttccatccccagcacctggtccaactggttcataacaagccttagatacctgttcgcttagatacctgtgtcagggagacacacctgacaccttgaaagattatatcacatctcttgtatttcctggccccctcaggagaggcaagagaaagctctgggcatcctgacatacctgggccagagtgcagcggaggcacagactcaacccccttggtaccagctacccccagggcgagggggccccccgcccggcccagccccagatgagaagatcaagagccgtctggaccctctgcgggagatgcagaagcatctggggaagaagagacagcacggcggtgatgaaggcagtcgcagcagaaaggaaaaggaggggtctgagaagcagcgacccaaggagtaagaagaccccacctcggcagaccagggcccagaccttcagggcttggcagcagcccagcatgggcactgcagcgtctctggtcaggacagccagggactccgtgaagggctggctaggtggagaagtggttctcagcatgtggtccagggagccctaggggtcctgacaccctttcccggggtgctgtggtgtcaagcctattttcctgacactggtggacttttccactcgtgttctcaggcatgtagtgcaggtttccagaggctgtgtgatggggagacaccctcactctgatggccaatggcagatgcttgtgtccaaactttcttagttttcactaatgatttgcagcatattaagagaacccatttaaacaaaagctcttggggtccttggtttttaagagtataaaggggtcctgagaccaaagagtttgagagctgctgggttagagagtaaaagcaggcttctgtctccaggatgctgcacccctggtctagagggggtacactgcctgtagtcttctttcctctagaaagggaaactgagggccagggggctgctaagtgtgctttcttgacctggagaagcatcagattttaaagactggggaggaccaaagcccacagaagggaaggccagagacgtgcccatggcgtcccagcaccaagtggctgcttccagcaggcctaaggagctgaggctggggtgtgctggatgcagcggggcttccaggcggcagctccctctatgggagaggttgggggaatggcctcctaggggctaccagctttctgacctcactcctctccccacaggcctccatccctggaccagcttcgagctgaacgtctgcggagggaagcagctgagaggtctcgggcagaggccctgctggcccgggtccaaggccgggcactacaggagggtcagccggaagaagacgagacggatgaccggcggcggcggtacaactcccaattcaacccccagctggcccggcgcccccgccagcaggaccctcaccttactcactgactcctgagggggtacaggagaggccgctgctgccagccgtcatataaaactatttattcataaatattttccaaaatgaaaataggtttaccaaaaaatgtccctcactggggaggggaggagggggcagccctcgcccccgggcccccagggtggggctgagaggaaaacctcccggccccctccctgcttcctgggagagggggatgccccgtggcttggggcctccctccagtcttccagggcagggccctcacctgggcagggggatcagcatgcgggggaagggggtgggtagagggaggggccggtgtcactggaggtcccggtcctccaggtagcggtactcaaaggtgaagccttccttcttccgctggccccacttctcgtagtcaaagtagatgtaggtgccctggccgggggagaaggcggtcagtgagtggacgaggaggtggtctgggatctgggccggaccaacagacaaaggggacaattcttagggctgtggatgtgtcaggcaccgggccagctgccctgcacgcacacactctcatccatcctcacaaggttcttcttgggtaggaaatgttatcatgccacttcagcgaggaggaaacggagggggccgcagaggttccaccgaagccagctgccagaacggggccccagccccaggtgtgagtgcacagccttcgtttcctcgagggctgtggcttttgagcacctctcacgtgagtacaggatgcacagcctagcatttaatcttcacaaagacctcgaggcagtgggtactgtcacccttgttctagagaatggaacagtctcagagtctaaatccaagcactctgcagggacattttattggtgacggaagtggtgtgggaatttctgaatgactggatgccctgaaatgtactaacttggaggatggttttgggccaaaccaggaaaggacaggaagtctgtggttaacatctgaggacacaatgggagaggacctaggttctaaatgaatgtcttaagtgcttcaaagatggcaacctgggagaaccaggagaggggactgagttctctgaggacaaggaccttgtactacttcatccccatgaaggggctcggcatcagggaagtatttggtggaaaaaaacatcactgtagaacacaccaactgaaagtaatttgaaaaaaaaaatccatgacactgactatgtagcagtcaccattaagtacttacatgttattaactcatttaatcttcataacaactgcattaggtaggtggtcttccccccatttttacagataagttaattgagacacagaggttcgagtgacttgcctagagtcgcccagctggactgggctgaaacccaggtaggttggttccagagtgtttgcaagcagcaggaatttcccagtattagaacttgagaagcccattcaaaaaaaatagtttcggcactgagcccctgccctgctgagtgctgggacctggaggtgaagtgggggccatcaaggtccctcggcagcagagcccacagcctggtgcagggacacatactgggaaaatcccacaccccaagcgagtgtgcccagcactgcaaaggggaggcactgggctgggtggctccaggaaggtttctttgaggaagggacatttgggctgagacctacaggaggcctaggagctggccaagtggaggatgagagggcggtgttccaggctgagcagacagccagagggaggagtacttggtcaggctgagggactgcgccagctgaaaggtggaggcaagggagcagaggccagcaggggctgcctggagcctggggactctaccccaaccctagcagcgggaagagagggggcggggccctcacctgctcaaactcgtcagtgatggtcttgggctcctcgtgcctctggaaccacatcatgtacttggtgtggaatcgccatgactgcttctttagggccttggctgccagatactgtgccttagtgccctgggggaggaacagtggagagggggatcagggggcccccaaactgggtggggagccaggggaatggggcaggacatcagggctgaaccccggcccccgccacagaccacagttgggctggacaatcctcttggagatggggctgggggcacagaacataccaatgctgatcaggagaaggaaaatgagacaggaggtgaaaattgctttcagagaagctttgagaaggaagaaaaactaatgtgtgatgagagctgagagaggaggcaatttagaaaatttcccaagtggggatgagggtggaggtcactcatgactcactggggttgggagggggctggacagctccccagtggtctccagggaggcctgagaatgtgccgatgagcagagtggggtcggcctagactggggctgctggagcagggctggggaggggccgcgggtgagccagtgggcaactggaagcggggctgaggtgtgcctcagtggaccagcctcgctgtcaacccaagcagttctaacatctctgggctggaaggcggggacggggacaggtggatttggggcaggggcccaggagtgggaatagggagggggtgcggtcccagtggccgcagtggggcacccacctcacccctccagcccgaggggggacggcggcggtggcggcgaagccggggggcccgaggctgccccgggggccctgctgtacctccagatagtagaagatgaagaagagtgtctcggtcgacaggcgctggtagaattccacagtgtccgagtgtgggggtggcatctggtggtggtaggggggcgtcggacaggggttccgggggaggtactgcctgtgagagcaacaggaaggtcagtgccagctgcctactagtcctgtcgtgatcaaaagggtgctcagacatgcatccctgcggggggaggtggtacagaaagacccagggcggtgctgaccttcagtggagagcccaagtcaggggcctggtgctctacccacagcctcacaggttcagccactgcctcctccgtaagactcaagtcccagaccatcccccttccctgtggcccctcaccgaatacgctcagagtcagaggggtgaggcatgtggtgccaggcggcctcttccatggcctgctgatagagctgctccttggtgaggggcacagggcccagtggacagacacccagcgacagcggtatgttcacctctgacagctgcaggggcggctgggctgaggccggaggtgctgatgtactgctcaggatgatgtctgtggggagggtgggggtccggccccctcagtggtgaggatgggtcaggggcagcccctcctctttggcccgctgcttccccaccatcctgggtccctcacctcgctcggtcaggtgcagcgttggcacagggtcctcaatgccagagctgatggctgcccgttccgccatggacttcaaggagctcagaggctcaggggcctggggaggaaacaagaggcctggcctgagcacttgggctgcaggagcaagtgcagcctgacacaggccccagatgctctcacctgccctgtttgggggccgtggagggccaacgacccactccccacaatctacccatgacaggtaaaagcatcaaactgtagggaaacaatcggagaccacgacgcattcatcagcagaggaacgtctcgtgagtgggactctgcagcatggaatactacgccgagattttcaaaatacaagttcgtgacatactacagaagtaaacgccaacctgcagaatatgtacagtgcgctaccatttttgtcaaaggatgtgccaatagtacacgctccttcactagggacacctacacgctgggagagctcccgcctgtcttgaaggaggcaggaggtctacatgctcagctgtctgcctgtgactggcatggggtgactggaatcggggtgggcccagcccggctaggcttcagtctccttgctggaaacaggtaggttgggtctccagccccgcagccacagcctcgtttcctattacaaaggttacagcaggcttctgttccccaaagtcagggctggttcctcccatctcctccagccacgtgcagctgtcccaaaccccagccctgtgctggactctccacaacgagtcagtcgccaaggcttatccattctgtctcgctatatcgcccaggcaggtctcaaactcctgggctcaagctatcctcccgcctctgcctccctaagagctgggattacaggtgtgagccaccacgcccagctatccgtcctgcttctaaaccccactggatggctcccttccctgtcgtgccaccatgtcccacacagcccaggcctgtcctctcctgcccagaccaccctccctctatcctgtcctcaccagccccaggggacctttccaatgaagtcatgttgttccttctctactccaaaccttgccatggttcccgaccacccaccccagcgattcatttttgttgttggtggtgttaaaagatatggaccccttctgaaaatctcaaagctgctgtttccctttttccagaaaaatgcacgcactataaatatcctgtccacctacttctaaaatttgggccgggcacggtggctcacacctgtaatcccagcactttgggaggtcgaggtgggtggatcacctgaggttcggagttcaagacctgcctgaccaacatggcaaaaccccatctctattaaaaatataaaaattagcctggcgtggtggcaggcgcctgtaatcccagctactcagtaggctgcggcaggagaatcgcttgaacccaggaggcggatgttgcattcagctgagattgcaccactgcactccagcctgggtgacagagcaagactctgtctcaaaaaagaaaaaaaaaaaaaattaatgcttctgttgggccagaaactgttccaagagctttatgaggatgatttagtcttccaaataaccctacatagtaggtataatcgtgactattgccgtttcccagatgaaggcacagaaaggacaatgccaagacttggacctggacagcctgggcgcgcacactgcctcctggacagcctgggcgcgcacactgcctcctggacagcctgggcatacacactggtccccccatggaagctgcgctacagtatactggctcacaagccaagccccagctcctgaccctcgatgatcaggaccccaccgtcctatcctgctacacccactatctcagccctgcagctggtggcactgtctcctgcagagtggacacctctctcctctctgctgcatcctgcccagcttcctaagcacacaggcagatgcatgctcctcctaaagcacctcctgaagcccttcctgcagctgttagcccccctgcctggtccaggtctcagcttaaacatcaccccctctcagaccttcctgggcctgtctcccaggtcaggtcagatgcccctcggtgggcccaccgcaaccttccctgcagctgccccagcagggaagcttcctaaagggtggaaccaggctgcattcacccaaccagtctttctacttgtgcagaaagtacaccagtctatgccttgtgaggacaaacggggacagaaactgagggcctgcgggggggatgaagatggagacccagagagagcaagcaacaagtgcaaccaagagaaaggaaaagagacccagagaaacagagctttggagggaacaagagaggaggtatgagagcccccagagatcaaggtcacggggagggtggtacagaaagacctggagaaagagcaagtgtgagaaggggacagaaagccagagaaagagatccagaaagagggtgggggcagggggtgcagctagagacctggaggaaagaaacaacagagtcaggacacagaggctcgggggatgtccgaggagcccaccttgatttctggggcggtgctgaactgtggaggcccattgagcagggcaccggctgccttggcatcactgaagctgggcgttggggagctgggaggattcacaggcagtggcaccaggaggctgggtccccctgagttgttccctgagcctggggccacgcccccagcccccgttggggctgccgcactgggttccttcctggagagagagcatggaagagggggttgagaggagggtccctgagggtgggatgggcagagaggcctggctggagagaggggagactgcacagatcagatgggatctgagaggggcaggtgagggcagacagatgggagaaagaagtggttctctgggcaaacaaaggcagagcccaatctttggaatggtttctcatcagcagagcagagctgtgggggtgggggtgaggattctcgggtgctccaccaggccacaggctgatcaaaaccacttgccctgggcaggtgttcacagggcccactcccccttgggcaggccagctggagctggggtgagggggcaggaagcaggcctttcctttgtgcacactgatctttcttagggcattcttcgggaaacaggcagacccagtggaatggtctgagctaagatttgaaggagtggctgcagaggaataaggacttcgggacaattcactttgaaaagtgaaacagtgaccctccggtggcagtcaattggcctcaggcaggtaacagaaatggggaggaaagggtatggggctcttgagaaaacttccacttagatgagaacgtattttagaatgttctgaagggcaaagcagggaggctgatgtagtttccttgctggaaagaagtgggggtgtaacacccgagggagatggaggatagcgcttggccattcccagcagcaagggcggggggttcagaacccaccgatgcgggggtgaggcgcctgcgcctctctgtttcaaaaggctgccatcccaaccctgccgatggccgagacactcacgaggtgctgggaggtgggttgtgggggccggaaggggggcccaaggcctggctgctggcattgttgcccccactgctgctcaaagccacctctgccgggctgtctgccacaactgagctgtaacctgggaacaaagagtaaatggaaagggctgctgcctgctgcccagccccgcccacgccccccaccccgctgcctcctcactcactggtggcgccattctgcttgccagcccctccaccggcactgctgttactactgctgctgctccctccacctccgctgccgccgcctccgcctccgctaggctggacgctggggggccggggctgggtcgtgctgggcccactgggagctggtggggccacagcctgggcatagggagcaggggtgcccgagttgtggctgggagctggactggccttggggcccagggcacttgggggtgctgcgggggcggggaccccattgttgccaggagtggtgctcaaggcagaggcagcaggcggggggccggaggggtaggtgggcggcacagctggggactgagggtgctggttgctgtggacaggcttggagccgtttttggctggagactgcgggtgggagagagcagagggtcaggacccagtgggccagctggtctccctcaccacccccacctcaggctccatctttgtcccagcagcctcctctctggcctcgctgcccccacctgctcctgccctcttggggacctgggtgaccttactcaccctcatggcttcaatcaccttcatgcttaaaacactcacactgatttccagcctgcccagcttcccaagtcctgcctggacaccgccccatggacacccccacagggatctgacacacaacttaggttgtcagccagagaagatccatctgttggaagccagaggactagtgggaaacacttaagtgttctcaatatgagattagctggagccgcctaatgtccaagagtagaaggaaaaacagctggaaattggatagtaattctgaatgtcacctgaagggtcacagaagctactcacagggctggaagttaccagcactccagaaagtggtgggagggtaaatgtgctcatggtatccctaccgcaggcaatctgtggacagcactccggctgctgagcctaaccacctcctgggcttctttccagccaccccacaggcaccttgcgcttaccaagcgcccaacaggactgactacccacttctctcctgggcatcgctgcttggcagtgggggcctgggaaggtggcagagcccagcctggcccctggagtacctgcctcagtgtctctcctcatcacctcctggccctgttgcccgccctcactactacctgcgggtccccttagtctccacaccagcctcctcaatgcccactcagggtgtccccttggaaccatccatcccgttagcccacagaggggcctcaggcccatgctgctcctgcctaacattgttctgtagcagcgtttccgaaagcgtgctcctgtcctgggagatgttaaaggagttgaagaagcactgcccgccaccgtctcctctcagaaatttgcagtgtgtattatcagcacagcaaaggccccatcgcttcctaggcttattggactctggaggccactcaggtccacaaagcctgagcccctcagcctgacagtcccagtccctgtgctcacagttgggcccctggccctgcagacctggccagactcatctctcctcacttccaaactttctgtcacaacttgcccatgttactggctgccacctctccctgccaggcaaactcacctgactgtgaagcccagggcactccacagcagcatctcctgactgcctggccaggccaagggtgacctgtgtgctacccccttgaccacagcaccagtcacctgtccacttgccctgcccacctgccctcagggcagcactgatttctgagccacctgtgtccaccagcccagcacagtggccggcgctcaggcctcaagatgcctttgggaagcaacagaggagtgaatggcgtgcccacccggtccaggctcacacccacctggctgacttcactgtctgtggaacgtcccctcttcttatcatcttcagagttttcctgaggtaggggaggcagaatagaaacctgtgtgacctctggggctctgatggagaaccgccaatctctgaatgccccggggacctgggcccaattgactgccattgcggccccagagctggtcaaatggctgtccttaatctgcctggagaaaccatctcaattcaggctctccagtcttcttgttttctgggagccagcactgacccaccagcctcttaaggatctgggaacctgctctccacagggaagccaacccttggatccctgcccaaggtggccagctacccagcctcctcaggcagcccaggcaccggcccctcccacttcccagatccaggacctaaactggcgcgggatgcaccctattgctctttatgtcctttagggacccagatataggaccttagcgtgtgctccaagagcctagaccctggatacctagatctgtgtttcctcaattacgctcccatagccactttggagtgacccagatttgtctcctcgagtcctgccctgctggaaacacaaggtactagtgtcccgtggggcctcaccgtggtacagttggctgggctgggcgggatgggagagctggaggtggttgaggtgggcgtgctgctggactggttgaagatctcatcctccatgtggctgtggctgggaggggaggtggcgaccagcgcctgtgctgtgggggcagaagaagggcatgcttagctggctcacacagcccattctgggccctcacttcctgtgccacgatcagccccagggcctcacgaatgtcctcgaggtccaggtcatcgtagagaaactcgttctcctcgaagtcggggtcctgggatgagtcaacatagtactcaacgtcgtccttgatcttgcggatggcgtcaacgaggatggagtcattgtccagcatgcgcaggatggtctctagcatgcgcacgtggtagcggtgcttctcgatgtgccgcttcaagccctcaatccggtcctgcttctgctggcgagcccagggccaggctcaggggctgcagagcacctgcttggcccctcctgcccccacagaacctgtcctcagtccctgacccctgtggagacccaaagcctccacgccatccccttcggggtggggcagtatggggtccacccaccctctgagccctgtggggaccaatcttagccttgacatcttgggatcccactgctccctcctctccccacacctttctggctccaggagtccttggaaacctctaaaagacccagaggtccttgtgccatcccacgacttggcctccatctgcacctcacctgacagcccagatttctcaactgagcccgcccaccactgtgactgcctctggcatacagataccctccgacctgctccagcagtaacaatgataacccccatttgtgaggagcttgctgtttagaattgtgatatctgtcatcactaggcccccaaccctacccatttatccctgagagagcccagattcctaagcctcgctcctgccctcccctcaaggcccctttaggatttaacatcttagccttggttccaaatctctgctctgttcaaggacccatcatctccccgaaagcccctggttcccaaacccctcagagtctgacacccaaccctgtcatcttccacttcctgaccctctcccacccacagcttccctgaggacccggctctcccctccctgtctttctggtttcagcaagtctgtacagtttgtatccctttgaactcataccccacaatcccggattttagaacctgggaccccaacatccagctttgtcccagactcctgtcttccttcaggcctggttctctgccttctccatgttctgccttgtctctacccactgtgctctccctaggaccagggccctctgggtgccaggaggcctcttgccatgggtgtccttcaggtctcacttttactctgtggcccaagctcaacctgcactcaccttcccccaagtcgctcctcttcacaaaggccccacggtctacccagacacccaggggagcctgagattctgtctgacctccttcctgccccacgcgtgcagctgctaagccctcccaatcctgtctctcaaatccctaatcccggctgttggccctgtccgcctgaggaatccaggccccaactcccaggagcataaatgactggcctcctgctggccagcccattcccatgcccatccccatcccaaaggtgtcgggtctccctcactcacatccttgtcgcccttcttcttgcgtgtctgcactgacagtgactccacttcactctcaaactggtccacctgcatgttgagcgtgtcgatggtattctaggggagggagaggaagaggaagcccatcagctagggttccgcctacacccagggctcaggatcctcagagttcacctcctcttctctaccccaactcaccgtgagccactggccaacctcttccttctccttctgggcaggatctaccttctgggccaggcccaggccctctttgctgtaagctttggttttggtctctcgttccacaactttgaaccgttccatttgctgtagagagtgcagttggcaggggggctctcaaaggtgggaaaggagctgactaagggccagcagacactccgacctgagcctcgtgaccctactttctgagctctgagtccgctgcctcttcacttcccttaggtgcagaaaccttacttctcttgaggacctctggggtctggccgctctgcctccgccccttgggatctcaagaatctggtgaccttcccacctctctgggactcaggctctgggctcctaccgtctcaatgagcttgcggttgtctataagctgcctcttgtccttgatctcgttggacgctacccatgtcttgatttggtccctcagccgctgcagatgggaaaagcaagaaagtcagacctcaggacccaggaactggggcccacagctccttctccctgggacccagcagtccactctcccagttccctctaccctcaggacaaaggcgtccaggcccccagccccctcacttgtagcttcttaatctccttctttaggtcagcctcatacttttctttctggttcgcgttggctgcattgtggagctgagggatggagagaattgagaagtcagtgtgggaggggatgtcccagtacccactccagtgattcttccttatgctagggactcgaggaccccccccaacccctacccccaatccatcttagagctgattctcttaggtcctcagcatctgcatatgtagcccctcccgctggtcaacacccagaggtcctgagccgccttcctgtgccctcctctctgaagacccagattattagggtctcagcccctgtaccttctgccaaatatcttcaaactgctccacgccctcggacaccttcttgaggcagcgatcaatctcacctggccagggaggaacaaggctgtgagaatcctgcccaggtggcaggtatctaaagagcagtcctcagaagagggagcatgtggctacaggtgcagcaggaagtcagtctagtaccttggagtttgcgcttgtccgccatcttccctgccctacagacgcactctcttcatactctcttggagacggacgctgctaggagagattggagaggaattaacacgtattccctggctggtaaaaacccagagacatggacctagtcagcatagtgaggtaggtgggactggtaaagagaagaagcatttgctatctgacaagagaccagccccagttctcctgatgctcgcttgactgcccagcatagtgtctggccaacaggggaccccataagtttgttgaaacaagaaaagttacatacttttttgtgtgcctctgactcaggaagtggaaaattcctagagcatggagtaccttctccccagaatacactcaaaaaggtttttcagagcaggacagtcatgctgcacacagctgatgactgggatggaggcattagccctggaaatcacacttcctactcagaggggctgggcagaggtggctaggagaggtcatccctcagacaagtcaggagacaaatgaaactggcagctcacagagaagggcgtgtgtgtgtgtgtgtgtgtgtgtgtgtgtgtgtgtgtaagctgtaggtaggagaagaaagattgggggtgggggaaaacgacggcgagcagagatgccgaaagctgtgaagagctgaacccgctcatgcagacagggctgaatgccaagtagaagggactcaaaccaccaagacatttattccagagcaggatccttaaaccaaaaggaaataacactcctaacccaaagaagctaataccaagaaggcttagagatttgggggcagaaggcagtacccaagagagacctgggagaagacagaaatcttactaagataagagggtgcaaaggtaccgcagctgtgagggagccgatctgcactcatggaggaatcccatagcaagtggattggtaatttagagtcagggagacatagaccatcagggcaggaacccaaaacttcaagagaggagcgtctttattttaaaggaagttacctggaacccagagaagactgaggtcaaaagggagttccaaggagctttagtccaagggaagacataccttagggcctgacagcgagaccaggggagccctgggaagagaggcttatgcctcagaagaagacttctgagataccagcggagattgccctcttcccctccagggagggggcctacaatgaaaagcacagttccctgggatccacgggccgctcccactctacgtgtgcagggcagggaaccctggagtagtcacttactgtaaagacagaaacagccccatactgaggaacaagagcctcaatacagagggaagtcacaccaaaagagtcctcacccacaaagaagggaacatctggcaaacagtgctatccaacagaactttgcaatgctggaaacactctatttgcgcatatctgttggccactgaacatctgaaatgtggcaagtgtaatggaggaactgaatttttcatttttaactagttactaatcaccacatgtgactagcagcaaccatatgggacggatatgctttagaacaagaagcccataaaggacagggctggtaccttacccccagggagaattttcccaacaccgcagggacccattctgggtgataataggtaggggtgctaccttacacttgagggaatttaaatctcctcagtaaaaggcccaacctaaagaaagccgcagcagcccccgcccaggtcagctatcacgccctacctggggaatctctaagaaggcaaagcaaccaacaaaaggacccaggagaaggtgccacagtggggattcaggctgaggaggggaaagcccctttgacccagggagctcacacaaggcaagggcctggacaccagagctcaggtgtgcagggatcctcaccaaagtccaacaccccaacacagaaaagcctcttactgcatagggggaacaagaatgtgaaacgagagtttacactccctctttccatcccaagaacccaacagagggtcatgggcaggtgctccagcccagagagagaagaggtctcatggtctacacccctaaacaaggcaatcaacaccttaggcaggtgacgccctccctgtgtctccacacggaaaggactggtatcctagtgcagaggaagaatacccacagagaggagaccacactgtggcagcaagagaaggaagtcctggaggggtcacaagccagaaggaggggaacaagagcgctaacccagggaggtgatgtttcagacagaacagtgtgacatcgaagtcggctacagctgagacccagtgaggaggcagctcctccacagagaaggggcaagtgccagaggcccagggtacttgtcccctagagaggctggagccttagccacagtagagacaacaccttccccgctaagaaaatccttatatcatgagggtatctgtacctctggtccccccagcaaaggaccagagagaagggaagctggagcctgagtctcgaagcagagacgccgccagagaagaaagagccccatttgctgtagtcaggggggcatccaccaagatcctccaaggaaggtggtgatcgcaggtccactctcaggcgtgaagaacctgtgctccagcagcaaaggctctccaagagcactgaggaatctgggaacctcggcccaggaggagacttacccaagaggaacacacatccccacagggaagggacccacaaggcgggtggcggggcggggggaggtgagcaggacaccagcctcacaggagccaacacgctaaaatcagagccaaaaccagtaaagaagagccccccagacttcatctcagggaagatgataccaccacacaaagactcgaggagggaggggcaggaggtcagccctgggaaactaacaccgggtggtccttaaccttgggggccgtcatgtgcccacagagtggtctttgtcatgaggcacctttgatctgggagagcttccgcctctgcagcaaggagctctgagaagtgatgttgaagggtgatccttaacccaggtggctgctgacgtggccacacagaggctctgagactccagaagaaggatgcgttagggcctggggtagaggtagtcatctccactgagatgccccatgccaagggtggggggctggaatctcccaccttggaaagtctacaccagagaagtctctggtcccagggacagggtctacagtggagtctcccgcttgagactcaggtatcttacatccacacagccaggaaactatgccttaccccatacagtgacaaatcaagagggggttttggaagcatgagccgggggcacctgcatccgagaggggtcctcagccttacggtggggacacatgcagaggcgtggacacctcaaatccagaaaagcagccataccaataccaaggatggcaagaaccttatccctgggggaggtgacaccaagaaagggtccttaccctggagagaaggcacagccccagagggaagagcccccacctcgcagtacaggaacccgggtctaggaagcttcctactctcatggggtaccagcagcggggccagaaggcgaaacccttgttctccaactgctgacacccagcgtaagggtagatgggaagtcaacaaacccacagtgtgggatctgatgcaaatatcaagggcagtgggcttcttggtccttggagagctgacaccctaaaggaggagactggtgtgaagatggaagaagcctcatactcaggcaggggtgaagggagggaggggagacatcaaaacccctcaccaaaaggacaggagagctcaccccggggtgggtggccgccctgcactgagaggcagggactgctcagaaagaggggctggtgctgcccgcagtgggagctcactaacatggacagcgtggcggcttagtgtctttcaccaggcacctgagcgccaggggatcccagcagcccccagcaacaagaccacagtggtcctgatatcactgggagacgcccacacccagaaggtcggagagtcacgatgcaggggagttcaaggctgcaaagccaggggcagacgccaggatcaaagaagtgtgagagctgagaccagacgtgggccacactgaggacggtcctgtaccccaggtgggggaaagccaaactcccccaaaaaggcaggcgcccagtgcagcgggatggcgaggctggagccacccagggcgctactcgctatgagagggaagagctgcagactacagaggtggaaacttcggcaaaggctccaactaacggggagtttctcctccactcctctcccaagaggctcccatccgatacagacgggcagctggaactgagatccaggggcgaggctgccgcgtcccgggacgccagtgaggagggatgcggaggcgcctcggtcctgggaagggtgactcccccacccagctggggtcctcgtcccgaccaccaccccccctccccgccaccgtcgagggagaagccccggcgcggagctgccccacaacgcgaaggaccgaggccgaggggggcaggcacctgagccccgagagggcgggcacctgggaccaggggcgcctccatccttccagccaggagccataccgacgcggagaggggcgggcacctcgcgcccgggaggcttcgcaccctcacacccctaccggggggcccgacgcgatgccacgcggggaggcggcggcgggcggggcccggggctccgggctcgcggaaggacccccgggaggcgctgaggaacgtgaaagaggcgcaggaacgggagggcgagagggagggagccgccccccgccgggagccccgcgctgcagaggcggcggcagggggcaggcgaggggaggccatgtcgcgacagacggcggtgtcgccagggcgggaggcggcggggagggcggacgatggcgccggggggaggaagggaaggggtccggcccagtcgagcctgacgctctcaccacaggagctggcgccgccgctgaggagcgtatcgcgacaggcgggggaggcgagcgcccgccgcctttttctcgcgccccgggcccgggcgctatcgcgatagcggcgcgtatgtcggatagtgggtttgtttgattgggcccggggttgttctgacgacgggggtcggggctcaagggaggccgcggcgtctgccgatggctccgcggaagctgaccgggccc

SEQ ID NO: 832 - DNA, 13994 bp, Homo sapiens
  misc_feature (156)..(156): n equals a,t,g, or c
  misc_feature (10132)..(10132): n equals a,t,g, or c
  misc_feature (11830)..(11830): n equals a,t,g, or c
ggaagtgcaaagaggcgggcgtgccagtccctggacagctacgacgccatgaatatcttgcccaagaagagctggcacgtccggaacaaggacaatgtcgcccgcgtgcgacgtgacgaggcccaggcccgggaggaggagaaggagcgtgagatngggtgctgctggctcagcaagaggtaagctcggaagccggcaggcggcgctccggggcccagcgcgcaggcggcggttgggggccggaagcggaggctttgcgcaggctcaatgtgccccgtgtgaaattcgggaccaggcgccgatcccactttcgaggacgttgccccgcaaaccttgtgcccacttccacgaaaccttccttgatctcgccctcgtcttagtttttcccacactgatgtatttcacatggctggaacagtgtctagcacaagagagaagcttaacatttaatgaatccgtgaccccttagacagttcaaggaaattcggatcactttttagtttgcctgcacagcctatttattgagcatctactgtatgctaactacatgccgtgcacctgacttgcggaatccccaataagcactgttcgttcttagaggggcactgtcatctctgttgcacgaagtgagatggcttcagtgaggggaaggcacattttaaggagaggcggacagccagctccacgccatcggggagccctttcgtgcaccgccccctagacacatacacacaaacacgggctttccgtatggctctttaaatctgtttggtgtacacccaactttcatttccttagctagtctgatcctccgccgtgggtgggaggtagtctaggtttttagaatctcagtaggctgctgagcgctgtttgaaatccgcgtcctgaaggcaggggacagggcttcagcagacttggggtagtcacttggagccatggctagaattcagatcgtctggcctaatgcatacctttatggctgttttaattgtctcacttgaggttaggaacccctttggtttaggccagggacctcctcccatacatccttgatgacccgtggtttactatttgaaagggagtttacaaaacccaggcgttgcctcatctgcctaccctcacccccagctaggacaggtgcctcttttaggcgcctagtgctccctttctcataaccccagcaccctggactgccattttctgtggtgggcaccagactcacagttcttgaattacctctaggttctgaatgtcctgcctataactttctccccaggcccgtacagaattcctacggaagaaagccagacatcagaactcactgcctgagcttgaagcagcagaggcgggagccccaggttctggccctgtggacctgtttcgggagctgctggaggaagggaaaggagtgatcagaggcaataaagagtacgaggaagaaaagcgacaggagaaagtaagctggcctcacccacttcatcagaggggccatgaatcgagttggagggagggggcactttagccattggttgtgaccaaggtcaaacaagagtgaacacacagaatttaggaccataccaaggcatgacactcaaaaagcgttggctattgccgtctgggcgcccacaggggttggaggtagatgctagaggtccccagctgctgggcaaaccgctcagttctccaaactggaggagtctcaaacctgatgggcttttaaaaatttaaatcagccggctgtggctcacgcctgtaatcccaccaccttgggaggctgaggcgggtggatcacctgaggtcaggagttcaagaccagcctggtcaacatggtatctctaaaaatacaaaaaaaattagccgggcatggtggtgcgcgcctgtaatcccagggaggctgaagcaggagaatcgcttgacccaggaggtggaagctgcagtaagccgagattgcgccactgcactccagcctgggtgacagagcgagaccccatctcaaaacaatcaaacaaaaagtgaatcaatcgcctcttgctttttggctaagatcaagtgtaaaaggtacatcagtggctgtgcatggtggctcacgcctgtaatcccagcactttgggaggccaacgtgggtggatcacctgaggtcagaagttcaagaccagcctggccaaacatggcaaaaccccgtctctactaaaaatacaaaaattagctgggcatggtggtgtgtgcctgtaatcccagctactcggggggctgaggtaggaggattgcttgaacctgggaagcagaggttgcagtgagccgagatcgtgccactgcactcgagtctgggcaacagagcgagactccatctcaaaaaaaagaggtacatcagctcttgtcatttatctgctgtctctggacttgctgaccccacccatcgctcctctgctttgcttgatcccttcaggcttctcttcaagtctctctgcaaagatgcctgcctctgaacactcaagtggctccacttgtcccctccttcccctgctgttactgtacctgctactgtcccccagggggagctttgcctctgtttgtcttccatccccagcacctggtccaactggttcataacaagccttagatacctgttcgcttagatacctgtgtcagggagacacacctgacaccttgaaagattatatcacatctcttgtatttcctggccccctcaggagaggcaagagaaagctctgggcatcctgacatacctgggccagagtgcagcggaggcacagactcaacccccttggtaccagctacccccagggcgagggggccccccgcccggcccagccccagatgagaagatcaagagccgtctggaccctctgcgggagatgcagaagcatctggggaagaagagacagcacggcggtgatgaaggcagtcgcagcagaaaggaaaaggaggggtctgagaagcagcgacccaaggagtaagaagaccccacctcggcagaccagggcccagaccttcagggcttggcagcagccagcatgggcactgcagcgtctctggtcaggacagccagggactccgtgaagggctggctaggtggagaagtggttctcagcatgtggtccagggagccctaggggtcctgacaccctttcccggggtgctgtggtgtcaagcctattttcctgacactggtggacttttccactcgtgttctcaggcatgtagtgcaggtttccagaggctgtgtgatggggagacaccctcactctgatggccaatggcagatgcttgtgtccaaactttcttagttttcactaatgatttgcagcatattaagagaacccatttaaacaaaagctcttggggtccttggtttttaagagtataaaggggtcctgagaccaaagagtttgagagctgctgggttagagagtaaaagcaggcttctgtctccaggatgctgcacccctggtctagagggggtacactgcctgtagtcttctttcctctagaaagggaaactgagggccagggggctgctaagtgtgctttcttgacctggagaagcatcagattttaaagactggggaggaccaaagcccacagaagggaaggccagagacgtgcccatggcgtcccagcaccaagtggctgcttccagcaggcctaaggagctgaggctggggtgtgctggatgcagcggggcttccaggcggcagctccctctatgggagaggttgggggaatggcctcctaggggctaccagctttctgacctcactcctctccccacaggcctccatccctggaccagcttcgagctgaacgtctgcggagggaagcagctgagaggtctcgggcagaggccctgctggcccgggtccaaggccgggcactacaggagggtcagccggaagaagacgagacggatgaccggcggcggcggtacaactcccaattcaacccccagctggcccggcgcccccgccagcaggaccctcaccttactcactgactcctgagggggtacaggagaggccgctgctgccagccgtcatataaaactatttattcataaatattttccaaaatgaaaataggtttaccaaaaaatgtccctcactggggaggggaggagggggcagccctcgcccccgagcccccagggtggggctgagaggaaaacctcccggccccctccctgcttcctgggagagggggatgccccgtggcttggggcctccctccagtcttccagggcagggccctcacctgggcagggggatcagcatgcgggggaagggggtgggtagagggaggggccggtgtcactggaggtcccggtcctccaggtagcggtactcaaaggtgaagccttccttcttccgctggccccacttctcgtagtcaaagtagatgtaggtgccctggccgggggagaaggcggtcagtgagtggacgaggaggtggtctgggatctgggccggaccaacagacaaaggggacaattcttagggctgtggatgtgtcaggcaccgggccagctgccctgcacgcacacactctcatccatcctcacaaggttcttcttgggtaggaaatgttatcatgccacttcagcgaggaggaaacggagggggccgcagaggttccaccgaagccagctgccagaatcgtccccagccccaggtgtgagtgcacagccttcgtttcctcgagggctgtggcttttgagcacctctcacgtgagtacaggatgcacagcctagcatttaatcttcacaaagacctcgaggcagtgggtactgtcacccttgttctagagaatggaacagtctcagagtctaaatccaagcactctgcagggacattttattggtgacgaagtggtgtgggaatttctgaatgactggatgccctgaaatgtactaacttggaggatggttttgggccaaaccaggaaaggacaggaagtctgtggttaacatctgaggacacaatgggagaggacctaggttctaaatgaatgtcttaagtgcttcaaagatggcaacctgggagaaccaggagaggggactgagttctctgaggacaaggaccttgtactacttcatccccatgaaggggctcggcatcagggaagtatttggtggaaaaaaacatcactgtagaacacaccaactgaaagtaatttgaaaaaaaaaatccatgacactgactatgtagcagtcaccattaagtacttacatgttattaactcatttaatcttcataacaactgcattaggtaggtggtcttccccccatttttacagataagttaattgagacacagaggttcgagtgacttgcctagagtcgcccagctggactgggctgaaacccaggtaggttggttccagagtgtttgcaagcagcaggaatttcccagtattagaacttgagaagcccattcaaaaaaaatagtttcggcactgagcccctgccctgctgagtgctgggacctggaggtgaagtgggggccatcaaggtccctcggcagcagagcccacagcctggtgcagggacacatactgggaaaatcccacaccccaagcgagtgtgcccagcactgcaaaggggaggcactgggctgggtggctccaggaaggtttctttgaggaagggacatttgggctgagacctacaggaggcctaggagctggccaagtggaggatgagagggcggtgttccaggctgagcagacagccagagggaggagtacttggtcaggctgagggactgcgccagctgaaaggtggaggcaagggagcagaggccagcaggggctgcctggagcctggggactctaccccaaccctagcagcgggaagagagggcggggccctcacctgctcaaactcgtcagtgatggtcttgggctcctcgtgcctctggaaccacatcatgtacttggtgtggaatcgccatgactgcttctttagggccttggctgccagatactgtgccttagtgccctgggggaggaacagtggagagggggatcagggggccccaaactgggtggggagccaggggaatggggcaggacatcagggctgaaccccggcccccgccacagaccacagttgggctggacaatcctcttggagatggggctgggggcacagaacataccaatgctgatcaggagaaggaaaatgagacaggaggtgaaaattgctttcagagaagctttgagaaggaagaaaaactaatgtgtgatgagagctgagagaggaggcatttagaaaattcccaagtgggaatgagggtggaggtcactcatgactcactgggggttgggagggggctggacaggctccccagtggtctccagggaggcctgagaatgtgccaatgagcagagtggggtcggcctagactggggctgctggagcagggctggggaggagccgcgggtgagccagtgggcaactggaagcggggctgaggtgtgcctcagtagaccagcctcgctgtcaacccaagcagttctaacatctctgggctggaaggcggggacggggacaggtggatttgggacagggcccagggagtgggaatagggagggggtgcggtcccagtgccgcagtgggggacccacctcacccctccagcccgaggggggacggcggcggtggcggcgaagccgggggcccgaggctgccccgggggccctgctgtacctccagatagtagaagatgaagaagagtgtctcggtcgacaggcgctggtagaattccacagtgtccgagtgtgggggtggcatctggtggtggtaggggggcgtcggacaggggttccgggggaggtactgcctgtgagagcaacaggaaggtcagtgccagctgcctactagtcctgtcgtgatcaaaagggtgctcagacatgcatccctgcggggggaggtggtacagaaagacccagggcggtgctgaccttcagtggagagcccaagtcaggggcctggtgctctacccacagcctcacaggttcagccactgcctcctccgtaagactcaagtcccagaccatcccccttccctgtggcccctcaccgaatacgctcagagtcagaggggtgaggcatgtggtgccaggcggcctcttccatggcctgctgatagagctgctccttggtgagggcacagggcccagtggacagacacccagcgacagcggtatgttcacctctgacagctgcaggggcggctgggctgaggccggaggtgctgatgtactgctcaggatgatgtctgtggggagggtgggggtccggccccctcagtggtgaggatgggtcaggggcagcccctcctctttggcccgctgcttccccaccatcctgggtccctcacctcgctcggtcaggtgcagcgttggcacagggtcctcaatgccagagctgatggctgcccgttccgccatggacttcaaggagctcagaggctcaggggcctggggaggaaacaagaggcctggcctgagcacttgggctgcaggagcaagtgcagcctgacacaggccccagatgctctcacctgccctgtttgggggccgtggagggccaacgacccactccccacaatctacccatgacaggtaaaagcatcaaactgtagggaaacaatcggagaccacgacgcattcatcagcagaggaacgtctcgtgagtgggactctgcagcatggaatactacgccgagattttcaaaatacaagttcgtgacatactacagaagtaaacgccaacctgcagaatatgtacagtgcgctaccatttttgtcaaaggatgtgccaatagtacacgctccttcactagggacacctacacgctgggagagctcccgcctgtcttgaaggaggcaggaggtctacatgctcagctgtctgcctgtgactggcatggggtgactggaatcggggtgggcccagcccggctaggcttcagtctccttgctggaaacaggtaggttgggtctccagccccgcagccacagcctcgtttcctattacaaaggttacagcaggcttctgttccccaaagtcagggctggttcctcccatctcctccagccacgtgcagctgtcccaaaccccagccctgtgctggactctccacaacgagtcagtcgccaaggcttatccatcctgtctcgctatatcgcccaggcaggtctcaaactcctgggctcaagctatcctcccgcctctgcctccctaagagctgggattacaggtgtgagccaccacgcccagctatccgtcctgcttctaaaccccactggatggctcccttccctgtcgtgccaccatgtcccacacagcccaggcctgtcctctcctgcccagaccaccctccctctatcctgtcctcaccagccccaggggacctttccaatgaagtcatgttgttccttctctactccaaaccttgccatggttcccgaccacccaccccagcgattcatttttgttgttggtggtgttaaaagatatggaccccttctgaaaatctcaaagctgctgtttccctttttccagaaaaatgcacgcactataaatatcctgtccacctacttctaaaatttgggccgggcacggtggctcacacctgtaatcccagcactttgggaggtcaaggtgggtggatcacctgaggttcggagttcaagacctgcctgaccaacatggcaaaaccccatctctattaaaaatataaaaattagcctggcgtggtggcaggcgcctgtaatcccagctactcagtaggctgcggcaggagaatcgcttgaacccaggaggcggatgttgcattcagctgagattgcaccactgcactccagcctgggtgacagagcaagactctgtctcaaaaaagaaaaaaaaaaaaaattaatgcttctgttgggccagaaactgttccaagagctttatgaggatgatttagtcttccaaataaccctacatagtaggtataatcgtgactattgccgtttcccagatgaaggcacagaaaggacaatgccaagacttggacctggacagcctgggcgcgcacactgcctcctggacagcctgggcgcgcacactgcctcctggacagcctgggcatacacactggtccccccatggaagctgcgctacagtatactggctcacaagccaagccccagctcctgaccctcgatgatcaggaccccaccgtcctatcctgctacacccactatctcagccctgcagctggtggcactgtctcctgcagagtggacacctctctcctctctgctgcatcctgcccagcttcctaagcacacaggcagatgcatgctcctcctaaagcacctcctgaagcccttcctgcagctgttagcccccctgcctggtccaggtctcagcttaaacatcaccccctctcagaccttcctgggcctgtctcccaggtcaggtcagatgcccctcggtgggcccaccgcaaccttccctgcagctgccccagcagggaagcttcctaaagggtggaaccaggctgcattcacccaaccagtctttctacttgtgcagaaagtacaccagtctatgccttgtgaggacaaacggggacagaaactgagggcctgcgggggggatgaagatggagacccagagagagcaagcaacaagtgcaaccaagagaaaggaaaagagacccagagaaacagagctttggagggaacaagagaggaggtatgagagcccccagagatcaaggtcacggggagggtggtacagaaagacctggagaaagagcaagtgtgagaaggggacagaaagccagagagagatccagaaagagggtgggggcaaggggtgcagctagagacctggaggaaagaaacaacagagtcaggacacagaggctcgggggatgtccgaggagcccaccttgatttctggggcggtgctgaactgtggaggcccattgagcagggcaccggctgccttggcatcactgaagctgggcgttggggagctgggaggattcacaggcagtggcaccaggaggctggtccccctgagttgttccctgagcctggccacgcctcnccgcccgttggtgctgccgcactgggttccttcctggagagagagcatggaagagggggttgagaggagggtccctgagggtgggatgggcagagaggcctggctggagagaggggagactgcacagatcagatgggatctgagaggggcaggtgagggcagacagatgggagaaagaagtggttctctgggcaaacaaacgcagagcccaatctttggaatggtttctcatcagcagagcagagctgtgggggtgggggtgaggattctcgggtgctccaccaggccacaggctgatcaaaaccacttgccctgggcaggtgttcacagggcccactcccccttgggcaggccagctggagctggggtgagggggcaggaagcaggcctttcctttgtgcacactgatctttcttagggcattcttcgggaaacaggcagacccagtggaatggtctgagctaagatttgaaggagtggctgcagaggaataaggacttcgggacaattcactttgaaaagtgaaacagtgaccctccggtggcagtcaattggcctcaggcaggtaacagaaatggggaggaaagggtatggggctcttgagaaaacttccacttagatgagaacgtattttagaatgttctgaagggcaaagcagggaggctgatgtagtttccttgctggaaagaagtgggggtgtaacacccgatggagatggaggatagcgcttggccattcccagcagcaagggcggggggttcagaacccaccgatgcgggggtgaggcgcctgcgcctctctgtttcaaaaggctgccatcccaaccctgccgatggccgagacactcacgaggtgctgggaggtgggttgtgggggccggaaggggggcccaaggcctggctgctggcattgttgcccccactgctgctcaaagccacctctgccgggctgtctgccacaactgagctgtaacctgggaacaaagagtaaatggaaagggctgctgcctgctgcccagccccgcccacgccccccaccccgctgcctcctcactcactggtggcgccattctgcttgccagcccctccaccggcactgctgttactactgctgctgctccctccgcctccgctgccgccgcctccgcctccgctaggctggacgctggggggccggggctgggtcgtgctgggcccactgggagctggtggggcacagcctgggcatagggagcaggggtgcccgagttgtggctgggagctggactggccttggggccagggcacttgggggtgctgcgggggcggggaaacattgttgccaggagtggtgctcaaggcagaggcagcaggcggggggccggagaggtaggtgggcggcacagctggggactgagggtgctggttgctgtggacaggcttggagccgtttttgctggagactgcgggtggagagagcagagggtcaggaccagctgggccagctggtctccctcaccacccccacctcaggctccatctttgtcccagcagcctcctctctggcctcgctgcccccacctgctcctgccctcttggggacctgggtgaccttactcaccctcatggcttcaatcaccttcatgcttaaaacactcacactgatttccagcctgcccagcttcccaagtcctgcctggacaccgccccatggacaccnccacagggatctgacacacaacttaggttgtcagccagagaagatccatctgttggaagccagaggactagtgggaaacacttaagtgttctcaatatgagattagctgagcccgcctaatgtcccaagagtaagaaggaaaaacagctggaaattggatagtaattctgaatgtcacctgaagggtcacagaagctactcacagggctggaagttaccagcactccagaaagtggtgggagggtaaatgtgctcatggtatccctaccgcaggcaatctgcggacagcactcgggctgctgagcctaaccacctcctgggcttctttccagccaccccacaggcaccttgcgcttaccaagcgcccaacaggactgactacccacttctctcctgggcatcgctgcttggcagtgggggcctgggaaggtggcagagcccagcctggcccctggagtacctgcctcagtgtctctcctcatcacctcctggccctgttgcccgccctcactactacctgcgggtccccttagtctccacaccagcctcctcaatgcccactcagggtgtccccttggaaccatccatcccgttagcccacagaggggcctcaggcccatgctgctcctgcctaacattgttctgtagcagcgtttccgaaagcgtgctcctgtcctgggagatgtcaaaggagttgaagaagcactgcccgccaccgtctcctctcagaaatttgcagtgtgtattatcagcacagcaaaggccccatcgcttcctaggcttattggactctggaggccactcaggtccacaaagcctgagcccctcagcctgacagtcccagtccctgtgctcacagttgggcccctggccctgcagacctggccagactcatctctcctcacttccaaactttctgtcacaacttgcccatgttactggctgccacctctccctgccaggcaaactcacctgactgtgaagcccagggcactccacagcagcatctcctgactgcctggccaggccaagggtgacctgtgtgctacccccttgaccacagcaccagtcacctgtccacttgccctgcccacctgccctcagggcagcactgatttctgagccacctgtgtccaccagcccagcacagtggccggcgctcaggcctcaagatgcctttgggaagcaacagaggagtgaatggcgtgcccacccggtccaggctcacacccacctggctgacttcactgtctgtggaacgtcccctcttcttatcatcttcagagttttcctgaggtaggggaggcagaatagaaacctgtgtgacctctggggctctgatggagaaccgccaatctctgaatgccccggggacctgggcccaattgactgccattgcggccccagagctggtcaaatggctgtccttaatctgcctggagaaaccatctcaattcaggctctccagtcttcttgttttctgggagccagcactgacccaccagcctcttaaggatctgggaacctgctctccacagggaagccaacccttggatccctgcccaaggtggccagctacccagcctcctcaggcagcccaggcaccggcccctcccacttcccagatccaggacctaaactggcgcgggatgcaccctattgctctttatgtcctttagggacccagatataggaccttagcgtgtgctccaagagcctagaccctggatacctagatctgtgtttcctcaattacgctcccatagccactttggagtgacccagatttgtctcctcgagtcctgccctgctggaaacacaaggtactagtgtcccgtggggcctcaccgtggtacagttggctgggctgggcgggatgggagagctggaggtggttgaggtgggcgtgctgctggactggttgaagatctcatcctccatgtggctgtggctggggggggaggtggcgaccagcgcctgtgctgtgggggcagaagaagggcatgcttagctggctcacacagcccattctgggccctcacttcctgtgccacgatcagccccagggcctcacgaatgtcctcgaggtccaggtcatcgtagagaaactcgttctcctcgaagtcggggtcctgggatgagtcaacatagtactcaacgtcgt

SEQ ID NO: 833 - DNA, 5365 bp, Homo sapiens
gtccacgtgcggctgcgccagcgcatcatcttgtacgaattaaaggtgcgattagggagcggggtctgcaactgggtagggaccagacaggaccgggctgagataacgcacagggcctaactcggtgatggggcctccggagagatgctaagcagctccttctccaagaaaggcaggtcctggggaatgagaaggttgagaggaggccgagatagggctgcccgagctccaagcgtgtaggaaaaggatgcgccagggctgggatcggtggctaatgcttgtaaccccagcactttgggagaccgagacaggtggatcgcttcagtctaggagttcgagaccagcctgggcaacatagggaggctccctctctaccaaaaaaaaaaaaaaaaagtttgtttttttttaagtaagcacaagaagcgggcggggcctaaggcaatttggttcaaagttaagtgatgggagcggccagcagggcgtcttgatacagctgaactggaacttcaggccaggaataaagcgcagggccacctgggggcggagcctctgatgggcagggctgaccaggggcgggtcttgggatgctgggcggagcctcaggggcggggcctggggtgctgagattgaccgcggagggatgggggcttgggttgctggatccggccgcgaaggggcggggctgtaaagggccgctggtttcctggagcgggtggaaccaggactgcagaggttgttagcgggtggggagacggctgcatcagttcacgttaaggaggatctctggagagccagacctggggaaccgggaggcccgcgccttgggaaatggagtccaagcgggcatctctcctgccttcaggtggagctggaggagacagtggtgcggcgccaggctgcggtgcggacgctgggccagcaagccagggtttggttggtgcgggtgctgctcaacctgctggtggtcgcgctcctgggggcagccttctatggcgtctactgggctacggggtgcaccgtggagctgcaggtgcggacggtcttggaagaggaagccagggggtcctggaacctacatttccaacggtggagggaggggacggaagtttgggatgccagagatcttagagaggaagtatgggagagggtatgttcggaccctggacttagggattttaaaggaaaaagagaggctgggcgcggtggcttacacctgtaatcccagcactttgggaggctgaggcgggcggatcacgatgtcaggagttccagaccagcctgaccaacatggtgaaaaacagtctctactaaaaatacaaaaattagacgggcgtggtggtgggcgcctgtaatcccagctactcaggaggctgaggcaggagaatcacttgaacccgggaggcagaggttgcagcgagccgagatcgcaccgctgcattctaggctgggcaacagagcgagactctgtctcaaaaaaaaaaaaaaaaagaagaagaagaagaagaggccggggggaggaccttaagcttggctcctccaggaccccaagcctctactcatggtccatcccgctcccaggagatgccccttgtccaggagttgccactgctgaagcttggggtgaattaccttccgtccatcttcatcgctggggtcaattttgtgctgccgcccgtgttcaagctcattgctccactggagggctacactcggagtcgccagatcgtttttatcctgctcaggttccagcctcacggggatggctgggaatgatgaagggtgggggcggtcagagggatgttggcgctgacaggtaagacacggaaatcctgctgataccgaatccagggattcaaatcctgactctgttggccaggtgcagtggctcacacctgtaatcccagcactttgggaggccgaggctgaggtcaggagttcgagaccagcctgacaaacatgatgaaaccccgtctgtagtaaaaatacgaatattagcccggcggtagtggcttctgtagtcccagctactcgggaggctgaggcaggagaatggctcgagcctgggaggtggaggttgcagtgagctgagatcgcgccactgcactccagtccgggtgacagagtgagaccctgtctcaaaaaaaaaaaaaaaaaaagaaagaaagaaagaaagaaatcctgattctgtcactgggcctcagcttcatctgtgagatgggttgaatgcgggcgcgttccactgagaagggaactgccacatggtgggtaccgggtcagggcccattctctgccttccccccttcaggaccgtgtttcttcgcctcgcctccctggtggtcctgctcttctctctctggaatcagatcacttgtgggggcgactccgaggctgaggactgcaaaacctgtggctacaattacaaacaacttccggtgagaacggcatgggtgtgcgtgggactcttgggtccctgaaggaaagatggagctgggtgggtccagactcttggtttgggcggagaggggagcttggggtgctggaacactctcccaagggtatgaaagtttgaaaaacgaggacccccagagaaagtattgacagggtctcataggcttgcgatgtggagactcggacgcgtgggcctccaggtgcccgggtcccgagttctttctgatatatttcttccttcttcagtgctgggagactgtcctgggccaggaaatgtacaaacttctgctctttgatctgctgactgtcttggcagtcgcgctgctcatccagtttcctagaaagtgagagccccgccccttgctgtggccccgcccctctaggacgaggccgtgccccatcgcgctgttcttttcaccgcgcacctttttaccattcccgcctctgcctgctccctttgcttgccctaggtccgcagatctccccgctccccgcccttgttttagtgggttacttccctctggccccgacggcggcgacatctgggtcccttctagtcctcaggacccgccctctggacacaccccctccacgtggagtcctgaaagtcccgcccccccccccccaaccaatacgcatgcttcctattggcgggcggggcggtggaggcggggaaactccaggccgccactcccctgactccggcccggccccgccccgtccttcaggctcctctgtggcctctgtcctggggcgctgggtcgtctggcggggacccaggagttccaggtgcccgacgaggtgctggggctcatctacgcgcagacggtggtctgggtggggagttttttctgccctttactgcccctgcttaacacggtcaagttcctgctgcttttctacctgaagaaggtaaggggtaggggggacccttgggtctgaggcaggaggtattggggcccgcactcctgggtcaagggcaaggaagatcctgggggcctggattactcggtcctgagagaggagggggttggaggacagactactgcatctgagaggaggggtctagggcattctgacttatatgtctgaggatctggggactcagactccggggtcctagatgaggaaggggctcagactcctggttcggaaaaaaggagaggcaggtaggccgggtgcagtggctcacgcctgtaatcccagcacttcgggagactaaggcgggtggatcacctgaggtcaggagtttgagaccagcctggctaacatggcaaaaccccgtctctactaaaaatacaaaaaaaattagccgggcttagtggcaggcgcctgtaatcccagctactcaggaggctgaggcaggggaattgcttgaaccagggaggtgaaggtcgaagtgagccaagatcgtgccactgcactccagcctgggcgacagagcgagactccgtctcaaaaagagaaaacaaacaaacaacaacaacagcaaaacaaattagccgggagtggtggtgcacacctgtaatcccagctactcgggaggctgagacacgagaatagcttgaacccgggaggggaggctgcagtgagagccactgcactccagcctgggcgacagagcgagactctgtctcaaaaaaaaaagcctgggcgacagagcgagactctgtctcaaaaaaaaaaaaaaaaaaaatggaggcacagactcttgtgtttcagagcccttttctccgtgccttcccccaccagcttaccctcttctccacctgctccccggctgcccgcaccttccgggcctccgcggcgaatttctttttccccttggtccttctcctgggtctggccatctccagcgttcccctgctttacagcatcttcctgtaagtgcgagaggctcccgcctctctccctccctctctccccattcagtgttcagactcctggcactatgtgagcccagcctgtcttgacttcaggatcccgccttctaagctttgtggtccattccgggggcagtcgtccatctgggcccagatccctgagtctatttccagcctccctgagaccacccagaatttcctcttcttcctggggacccaggcttttgctgtgccccttctgctgatctccaggtgagacggcccagacttctgggtctgggtttgaatgcgtgtgatctgggggccaccacctgcgtccaagagaggagaggcttgggcgtgggagcaggcaacgtactgagtctgagggaggaggcctaggctcctggactgctgggtccgaaggaggaggtgggcgggacgtaggactcctggatctgaaggcggaggggctgggagactgaactccttgagcccagacgaggaggggcttaggcgtccacatccctggcttcgaaggagccagacgtttggatataatggaagagcgtgtcaggagtggcttccgttcctgtctccttcagcatcctgatggcgtacactgtggctctggctaactcctacggacgcctcatctctgagctcaaacgtcagagacagacggtgagccaggcgggtccctgagagggcccctggggaacatggaaaggggttggggaagaggattgtctcacctccacctctctttgccccaggaggcgcagaataaagtcttcctggcacggcgcgctgtggcgctgacctccaccaaaccggctctttgacccccgcagcccacgtcccgctttcagaccccaggcccattgtaagcctaggtcacaacatctgtaaactaggagaactggagaagactccacgcccttccagctttggtatctggagatttccagggcccctcgccgccacgtcctgactctcgggtgatcttccttgtatcaataaatacagccgaggttgctgagcgcgctttgaaa

SEQ ID NO: 834 - DNA, 5360 bp, Homo sapiens
gtccacgtgcggctgcgccagcgcatcatcttgtacgaattaaaggtgcgattagggagcggggtctgcaactgggtagggaccagacaggaccgggctgagataacgcacagggcctaactcggtgatggggcctccggagagatgctaagcagctccttctccaagaaaggcaggtcctggggaatgagaaggttgagaggaggccgagatagggctccccgagctccaagcgtgtaggaaaaggatgcgccagggctgggatcggtggctaatgcttgtaaccccagcactttgggagcccgagacaggtggatcgcttcagtctaggagttcgagaccagcctgggcaacataggggggctccctctctcccaaaaaaaaaaaaaaaaagtttgtttttttttaagtaagcacaagaagcgggcggggcctaaggcaatttggttcaaagttaagtgatgggagcggccagcagggcgtcttgatacagctgaactggaacttcaggccaggaataaagcgcagggccacctgggggcggactctgatgggcagggctgaccaggggcgggtcttgggatgctgggcggactcaggggcggggcctggggtgctgagattgaccgcggagggatgggggcttgggttgctggatccggccgcgaaggggcggggctgtaaagggccgctggtttcctggagcaggtggaaccaggactgcagaggttgttagcgggtggggagacggctgcatcagttcacgttaaggaggatctctggagagccagacctggggaaccgggaggcccgcgccttgggaaatggagtccaagcgggcatctctcctgccttcaggtggagctggaggagacagtggtgcggcgccaggctgcggtgcggacgctgggccagcaagccagggtttggttggtgcgggtgctgctcaacctgctggtggtcgcgctcctgggggcagccttctatggcgtctactgggctacggggtgcaccgtggagctgcaggtgcggacggtcttggaagaggaagccagggggtcctggaacctacatttccaacggtggagggaggggacggaagtttgggatgccagagatcttagagaggaagtatgggagagggtatgttcggaccctggacttagggattttaaaggaaaaagagaggctgggcgcggtggcttacacctgtaatcccagcactttgggaggctgaggcgggcggatcacgatgtcaggagttccagaccagcctgaccaacatggtgaaaaacagtctctactaaaaatacaaaaattagacgggcgtggtggtgggcgcctgtaatcccagctactcaggaggctgaggcaggagaatcacttgaacccgggaggcagaggttgcagcgagccgagatcgcaccgctgcattctaggctgggtaacagagcgagactctgtctcaaaaaaaaaaaaaaagaagaagaagaagaagaggccggggggaggaccttaagcttggctcctccaggaccccaagcctctactcatggtccatcccgctcccaggagatgccccttgtccaggagttgccactgctgaagcttggggtgaattaccttccgtccatcttcatcgctggggtcaattttgtgctgccgcccgtgttcaagctcattgctccactggagggctacactcggagtcgccagatcgtttttatcctgctcaggttccagcctcacggggatggctgggaatgatgaagggtgggggcggtcagagggatgttggcgctgacaggtaagacacggaaatcctgctgataccgaatccagggattcaaatcctgactctgttggccaggtgcagtggctcacacctgtaatcccagcactttgggaggccgaggctgaggtcaggagttcgagaccagcctgacaaacatgatgaaaccccgtctgtagtaaaaatacgaatattagcccggcggtagtggcttctgtagtcccagctactcgggaggctgaggcaggagaatggctcgagcctgggaggtggaggttgcagtgagctgagatcgcgccactgcactccagtccgggtgacagagtgagaccctgtctcaaaaaaaaaaaaaaaaaaagaaagaaagaaagaaagaaatcctgattctgtcactgggcctcagcttcatctgtgagatgggttgaatgcgggcgcgttccactgagaagggaactgccacatggtgggtaccgggtcagggcccattctctgccttccccccttcaggaccgtgtttcttcgcctcgcctccctggtggtcctgctcttctctctctggaatcagatcacttgtgggggcgactccgaggctgaggactgcaaaacctgtggctacaattacaaacaacttccggtgagaacggcatgggtgtgcgtgggactcttgggtccctgaaggaaagatggagctgggtgggtccagactcttggtttgggcggagaggggagcttggggtgctggaacactctcccaagggtatgaaagtttgaaaaacgaggacccccagagaaagtattgacagggtctcataggcttgcgatgtggagactcggacgcgtgggcctccaggtgcccgggtcccgagttctttctgatatatttcttccttcttcagtgctgggagactgtcctgggccaggaaatgtacaaacttctgctctttgatctgctgactgtcttggcagtcgcgctgctcatccagtttcctagaaagtgagagccccgccccttgctgtggccccgcccctctaggacgaggccgtgccccatcgcgctgttcttttcaccgcgcacctttttaccattcccgcctctgcctgctccctttgcttgccctaggtccgcagatctccccgctccccgcccttgttttagtgggttacttccctctggccccgacggcggcgacatctgggtcccttctagtcctcaggacccgccctctggacacaccccctccacgtggagtcctgaaagtcccgcccccccccccccaccaccaatacgcatgcttcctattggcgggcggggcggtggaggcgtggaaatccaggccgccactcccctgactccggcccgccccgccccgtccttcaggctcctctgtggcctctgtcctggggcgctgggtcgtctggcggggacccaagagttccaggtgcccgacgaggtgctggggctcatctacgcgcagacggtggtctgggtggggagttttttctgccctttactgcccctgcttaacacggtcaagttcctgctgcttttctacctgaagaaggtaaggggtaggggggacccttgggtctgaggcaggaggtattggggcccgcactcctgggtcaagggcaaggaagatcctgggggcctggattactcggtcctgagagaggagggggttggaggacagactactgcatctgagaggaggggtctagggcattctgacttatatgtctgaggatctggggactcagactccggggtcctagatgaggaaggggctcagactcctggttcggaaaaaaggagaggcaggtaggccgggtgcagtcgtcacgcctgtaatcccagcacttcgggagactaaggcgggtggatcacctgaggtcaggagtttgagaccagcctggctaacatggcaaaaccccgtctctactaaaaatacaaaaaaaattagccgggcttagtggcaggcgcctgtaatcccagctactcaggaggctgaggcaggggaattgcttgaaccagggaggtgaaggtcgaagtgagccaagatcgtgccactgcactccagcctgggcgacagagcgagactccgtctcaaaaagagaaaacaaacaaacaacaacaacagcaaaacaaattagccgggagtggtggtgcacacctgtaatcccagctactcgggaggctgagacacgagaatagcttgaacccgggaggggaggctgcagtgagagccactgcactccagcctgggcgacagagcgagactctgtctcaaaaaaaaaagcctgggcgacagagcgagactctgtctcaaaaaaaaaaaaaaaaaaaaatggaggcacagactcttgtgtttcagagcccttttctccgtgccttcccccaccagcttaccctcttctccacctgctccccggctgcccgcaccttccgggcctccgcggcgaatttctttttccccttggtccttctcctgggtctggccatctccagcgttcccctgctttacagcatcttcctgtaagtgcgagaggctcccgcctctctccctccctctctccccattcagtgttcagactcctggcactatgtgagcccagcctgtcttgacttcaggatcccgccttctaagctgtgtggtccattccgggggcagtcgtccatctgggcccagatccctgagtctatttccagcctccctgagaccacccagaatttcctcttcttcctggggacccaggcttttgctgtgccccttctgctgatctccaggtgagacggcccagacttctgggtctgggtttgaatgcgtgtgatctgggggccaccacctgcgtccaagagaggagaggcttgggcgtgggagcaggcaacgtactgagtctgagggaggaggcctaggctcctggactgctgggtccgaaggaggaggtgggcgggacgtaggactcctggatctgaaggcggaggggctgggagactgaactccttgagcccagacgaggaggggcttaggcgtccacatccctggcttcgaaggagccagacgtttggatataatggaagagcgtgtcaggagtggcttccgttcctgtctccttcagcatcctgatggcgtacactgtggctctggctaactcctacggacgcctcatctctgagctcaaacgtcagagagagacggtgagccaggcgggtccctgagagggcccctggggaacatggaaaggggttggggaagaggattgtctcacctccacctctctttgccccaggaggcgcagaataaagtcttcctggcacggcgcgctgtggcgctgacctccaccaaaccggctctttgacccccgcagcccacgtcccgctttcagaccccaggcccattgtaagcctaggtcacaacatctgtaaactaggagaactggagaagactccacgcccttccagctttggtatctggagatttccagggcccctcgccgccacgtccctgactctcgggtgatcttccttgtatcaataaatacagccgaggttgctgagcgcgctttgaaa

SEQ ID NO: 835 - DNA, 2811 bp, Homo sapiens
gttcaccttgtcatcaaaagccagaaccgacctcagggccagtccacgcagcctagcaatgccgcgggaactaacactacctcggcgtcgactcccaggagtaactccacacctatttccacaaatagcaacccgtttgggttggggagcctgggaggacttgcaggccttagcagcctgggcttgagctcgaccaacttctctgagctccagagccagatgcagcagcagcttatggccagccctgagatgatgatccaaataatggaaaatccctttgttcagagcatgctttcgaatcccgatctgatgaggcagctcattatggctaatccacagatgcagcaattgattcagagaaacccagaaatcagtcacctgctcaacaacccagacataatgaggcagacactcgaaattgccaggaatccagccatgatgcaagagatgatgagaaatcaagacctggctcttagcaatctagaaagcatcccaggtggctataatgctttacggcgcatgtacactgacattcaagagccgatgctgaatgccgcacaagagcagtttgggggtaatccatttgcctccgtggggagtagttcctcctctggggaaggtacgcagccttcccgcacagaaaatcgcgatccactacccaatccatgggcaccaccgccagctacccagagttctgcaactaccagcacgaccacaagcactggtagtgggtctggcaatagttccagcaatgctactgggaacaccgttgctgccgctaattatgtcgccagcatctttagtaccccaggcatgcagagcctgctgcaacagataactgaaaacccccagctgattcagaatatgctgtcggcgccctacatgagaagcatgatgcagtcgctgagccagaatccagatttggctgcacagatgatgctgaatagcccgctgtttactgcaaatcctcagctgcaggagcagatgcggccacagctcccagccttcctgcagcagatgcagaatccagacacactatcagccatgtcaaacccaagagcaatgcaggctttaatgcagatccagcaggggctacagacattagccactgaagcacctggcctgattccgagcttcactccaggtgtgggggtgggggtgctgggaaccgctataggccctgtaggcccagtcacccccataggccccataggccctatagtcccttttacccccataggccccattgggcccataggacccactggccctgcagccccccctggctccaccggctctggtggccccacggggcctactgtgtccagcgctgcacctagtgaaaccacgagtcctacatcagaatctggacccaaccagcagttcattcagcaaatggtgcaggccctggctggagcaaatgctccacagctgccgaatccagaagtcagatttcagcaacaactggaacagctcaacgcaatggggttcttaaaccgtgaagcaaacttgcaggccctaatagcaacaggaggcgacatcaatgcagccattgaaaggctgctgggctcccagccatcgtaatcacatttctgtacctggaaaaaaaatgtatcttatttttgataatggctcttaaatctttaaacacacacacaaaatcgttctttactttcattttgattcttttaaatctgtctagttgtaagtctaatatgatgcattttaagatggagtccctccctcctacttccctcactccctttctcctttgcttatttttcctaccttcccttcctcttgtctccccactccctccctctttgtttccttccttccttatttcctttagtttccttccttagccgttttgagtggtgggaatcaatgctgtttcactcaaaagtgttgcatgcaaacacttctctttattctgcatttattgtgatttttggaaacaggtatcaaccttcacagttgggtgaacaagtgttgtcctacagatgtccaatttatttgcatttttaaacattagcctatgatagtaatttaatgtagaatgaagatattaaaaacagaagcaaattatttgaagctctctaatttgtggtacgatattgcttattgtgactttggcatgtatttttgctagcaaaatgctgtaagatttataccattgatcttttttgctatatttgtatacagtacagtaagcacaattggcactgtacatctaaaaatattacagtagaatctgagtgtaatatgtgtaaccaaaatgagaaagaatacaagaaatgtttctggagctagttatgtctcacaattttgtagaatcttacagcatctttgataaacttctcagtgaaaatgttggctaggcaagttcagttaaaatatagtagaaatgtttatcctggtatctctaagtatacatttaattgtacagaaaatttacagtgtaacattgtgtcaacatttgcagattgactgtatatgaccttaatctttgtgcagcctgaaggatcagtgtagtaatgccaggaaagtgctttttacctaagacttccttctcagcttctcccataaagagaccctaatatgcattttgatttgtaattggaaatgtaactttcactgaaagtgtcatgtgatgtttgcattacttttaactgctatgtataaaggaaagtgtgtcttttgacttcatcagttatttctcttgtgcacagagaaaaatgcattaaaaatgactaaaaaaataaaaaataaaaaatggataaatcttttctttttgcctttttgccctag

SEQ ID NO: 836 - DNA, 4723 bp, Homo sapiens
gggatctgttcgattcaggctttcacccttttactgccttacagattgctaatatacattctccattggtcttttaatgtcgtttacagaagctgactctctaccgcctccttctctccgtctcaccctctctgcctcgcctgctctgtactgttctgttctcttctctctctccctttgtttctctctctcccttttttcttttcagtgcagaagtttttaattttgaccgagccaaatctatcaatctaggcctggcgccgcgtcagcagagggggcggggaggcgagcgcggaactgggggaggggaaggggcggggatcagcaggcggagcggctgccagagttgctgggagtgcgcgcggtcggatcacaaggcggcggcggaggaggcccagagaccggagcgcggagacctcagccagcggcctacgcccaggcctttctccaccggaggaccagggaaccgcagtcttcatcacagaggtaccgtgctccgcgctccccgcctgacccggcccagcccgctgcggcggtgcctccttccttcctccttccctcgcgctctctctttcgcccgcccgcgccttccctgcccgcctgcgtcaccgcggccgccatggctgagaatggcgagagcagcggccccccgcgcccctcccgcggccctgctgcggcccaaggctcggctgctgccccggctgagcctaaaatcatcaaagtcacggtgaagactcccaaagagaaagaggagttcgcggtgcccgagaacagctcggttcagcagtttaaggaagcgatttcgaaacgcttcaaatcccaaaccgatcagctagtgctgatttttgccggaaaaatcttaaaagatcaagataccttgatccagcatggcatccatgatgggctgactgttcaccttgtcatcaaaagccagaaccgacctcagggccagtccacgcagcctagcaatgccgcgggaactaacactacctcggcgtcgactcccaggagtaactccacacctatttccacaaatagcaacccgtttgggttggggagcctgggaggacttgcaggccttagcagcctgggcttgagctcgaccaacttctctgagctccagagccagatgcagcagcagcttatggccagccctgagatgatgatccaaataatggaaaatccctttgttcagagcatgctttcgaatcccgatctgatgaggcagctcattatggctaatccacagatgcagcaattgattcagagaaacccagaaatcagtcacctgctcaacaacccagacataatgaggcagacactcgaaattgccaggaatccagccatgatgcaagagatgatgagaaatcaagacctggctcttagcaatctagaaagcatcccaggtggctataatgctttacggcgcatgtacactgacattcaagagccgatgctgaatgccgcacaagagcagtttgggggtaatccatttgcctccgtggggagtagttcctcctctggggaaggtacgcagccttcccgcacagaaaatcgcgatccactacccaatccatgggcaccaccgccagctacccagagttctgcaactaccagcacgaccacaagcactggtagtgggtctggcaatagttccagcaatgctactgggaacaccgttgctgccgctaattatgtcgccagcatctttagtaccccaggcatgcagagcctgctgcaacagataactgaaaacccccagctgattcagaatatgctgtcggcgccctacatgagaagcatgatgcagtcgctgagccagaatccagatttggctgcacagatgatgctgaatagcccgctgtttactgcaaatcctcagctgcaggagcagatgcggccacagctcccagccttcctgcagcagatgcagaatccagacacactatcagccatgtcaaacccaagagcaatgcaggctttaatgcagatccagcaggggctacagacattagccactgaagcacctggcctgattccgagcttcactccaggtgtgggggtgggggtgctgggaaccgctataggccctgtaggcccagtcacccccataggccccataggccctatagtcccttttacccccataggccccattgggcccataggacccactggccctgcagccccccctggctccaccggctctggtggccccacggggcctactgtgtccagcgctgcacctagtgaaaccacgagtcctacatcagaatctggacccaaccagcagttcattcagcaaatggtgcaggccctggctggagcaaatgctccacagctgccgaatccagaagtcagatttcagcaacaactggaacagctcaacgcaatggggttcttaaaccgtgaagcaaacttgcaggccctaatagcaacaggaggcgacatcaatgcagccattgaaaggctgctgggctcccagccatcgtaatcacatttctgtacctggaaaaaaaatgtatcttatttttgataatggctcttaaatctttaaacacacacacaaaatcgttctttactttcattttgattcttttaaatctgtctagttgtaagtctaatatgatgcattttaagatggagtccctccctcctacttccctcactccctttctcctttgcttatttttcctaccttcccttcctcttgtctccccactccctccctctttgtttccttccttccttatttcctttagtttccttccttagccgttttgagtggtgggaatcaatgctgtttcactcaaaagtgttgcatgcaaacacttctctttattctgcatttattgtgatttttggaaacaggtatcaaccttcacagttgggtgaacaagtgttgtcctacagatgtccaatttatttgcatttttaaacattagcctatgatagtaatttaatgtagaatgaagatattaaaaacagaagcaaattatttgaagctctctaatttgtggtacgatattgcttattgtgactttggcatgtatttttgctagcaaaatgctgtaagatttataccattgatcttttttgctatatttgtatacagtacagtaagcacaattggcactgtacatctaaaaatattacagtagaatctgagtgtaatatgtgtaaccaaaatgagaaagaatacaagaaatgtttctggagctagttatgtctcacaattttgtagaatcttacagcatctttgataaacttctcagtgaaaatgttggctaggcaagttcagttaaaatatagtagaaatgtttatcctggtatctctaagtatacatttaattgtacagaaaatttacagtgtaacattgtgtcaacatttgcagattgactgtatatgaccttaatctttgtgcagcctgaaggatcagtgtagtaatgccaggaaagtgctttttacctaagacttccttctcagcttctcccataaagagaccctaatatgcattttgatttgtaattggaaatgtaactttcactgaaagtgtcatgtgatgtttgcattacttttaactgctatgtataaaggaaagtgtgtcttttgacttcatcagttatttctcttgtgcacagagaaaaatgcattaaaaatgactaaaaaaaataaaaaattaaaaaatggataaatcttttctttttgccttttggccctaggatcgtgtttaggaggattatcccaccccgagattatataaatcttatcctatatttctctaacttatatggttttatttagaaaatgttttgtcctgtctggaattatcttgatgtatggatttaggtattctaacttttttgccccaaagggttagccagttgttaacatatttaccttttcccccaacatatgaaatgtcatacatgtatatactttattctgtgtttggattccctttagttccattgaacattgtggcaccagtacaccagcctgtagatgagttagaaatgggactttgtatcttttaatgtgagacctcctcttgatcttttttattttttacaatattctgacgattctgacatgtttattttaccagatgaattttacagttaatagattcttcccccaaaaatatattgagaatttggttgggattctcttaaattgatatgactgtgaggactacagaattgcattgctttccagaaacatgttgccttgtttctgaaaaactttatatatccttcaagagagttttacttaaatcctatataatttgtaataaatatgttcctaggtaatacagacatacagggaacacgttgatactgcttattggagcttttaatatgttacctatgtggtcatttttgctatataggagaagaatttatttgcatcgattattttaaattggcaatttattgaaatctattaattttagagatattcatttgatccttttgagtttttccaggtgagaaatcctatcaattatgttataattatatgttttccttttcaaaatttataacataatttctgactgcatgggttaaacattttcataacagtgctaaataataaaggtggcaggggcatttttgtcttgtttctcattttagccagaatgtgtttgctacagcaattccaaattgtgttttgtgaaaaaaaaatattcttctgggagacaaggaaatacatttgcaa

SEQ ID NO: 837 - DNA, 4045 bp, Homo sapiens
cggcccaaggctcggctgctgccccggctgagcctaaaatcatcaaagtcacggtgaagactcccaaagagaaagaggagttcgcggtgcccgagaacagctcggttcagcagtttaaggaagcgatttcgaaacgcttcaaatcccaaaccgatcagctagtgctgatttttgccggaaaaatcttaaaagatcaagataccttgatccagcatggcatccatgatgggctgactgttcaccttgtcatcaaaagccagaaccgacctcagggccagtccacgcagcctagcaatgccgcgggaactaacactacctcggcgtcgactcccaggagtaactccacacctatttccacaaatagcaacccgtttgggttggggagcctgggaggacttgcaggccttagcagcctgggcttgagctcgaccaacttctctgagctccagagccagatgcagcagcagcttatggccagccctgagatgatgatccaaataatggaaaatccctttgttcagagcatgctttcgaatcccgatctgatgaggcagctcattatggctaatccacagatgcagcaattgattcagagaaacccagaaatcagtcacctgctcaacaacccagacataatgaggcagacactcgaaattgccaggaatccagccatgatgcaagagatgatgagaaatcaagacctggctcttagcaatctagaaagcatcccaggtggctataatgctttacggcgcatgtacactgacattcaagagccgatgctgaatgccgcacaagagcagtttgggggtaatccatttgcctccgtggggagtagttcctcctctggggaaggtacgcagccttcccgcacagaaaatcgcgatccactacccaatccatgggcaccaccgccagctacccagagttctgcaactaccagcacgaccacaagcactggtagtgggtctggcaatagttccagcaatgctactgggaacaccgttgctgccgctaattatgtcgccagcatctttagtaccccaggcatgcagagcctgctgcaacagataactgaaaacccccagctgattcagaatatgctgtcggcgccctacatgagaagcatgatgcagtcgctgagccagaatccagatttggctgcacagatgatgctgaatagcccgctgtttactgcaaatcctcagctgcaggagcagatgcggccacagctcccagccttcctgcagcagatgcagaatccagacacactatcagccatgtcaaacccaagagcaatgcaggctttaatgcagatccagcaggggctacagacattagccactgaagcacctggcctgattccgagcttcactccaggtgtgggggtgggggtgctgggaaccgctataggccctgtaggcccagtcacccccataggccccataggccctatagtcccttttacccccataggccccattgggcccataggacccactggccctgcagccccccctggctccaccggctctggtggccccacggggcctactgtgtccagcgctgcacctagtgaaaccacgagtcctacatcagaatctggacccaaccagcagttcattcagcaaatggtgcaggccctggctggagcaaatgctccacagctgccgaatccagaagtcagatttcagcaacaactggaacagctcaacgcaatggggttcttaaaccgtgaagcaaacttgcaggccctaatagcaacaggaggcgacatcaatgcagccattgaaaggctgctgggctcccagccatcgtaatcacatttctgtacctggaaaaaaaatgtatcttatttttgataatggctcttaaatctttaaacacacacacaaaatcgttctttactttcattttgattcttttaaatctgtctagttgtaagtctaatatgatgcattttaagatggagtccctccctcctacttccctcactccctttctcctttgcttatttttcctaccttcccttcctcttgtctccccactccctccctctttgtttccttccttccttatttcctttagtttccttccttagccgttttgagtggtgggaatcaatgctgtttcactcaaaagtgttgcatgcaaacacttctctttattctgcatttattgtgatttttggaaacaggtatcaaccttcacagttgggtgaacaagtgttgtcctacagatgtccaatttatttgcatttttaaacattagcctatgatagtaatttaatgtagaatgaagatattaaaaacagaagcaaattatttgaagctctctaatttgtggtacgatattgcttattgtgactttggcatgtatttttgctagcaaaatgctgtaagatttataccattgatcttttttgctatatttgtatacagtacagtaagcacaattggcactgtacatctaaaaatattacagtagaatctgagtgtaatatgtgtaaccaaaatgagaaagaatacaagaaatgtttctggagctagttatgtctcacaattttgtagaatcttacagcatctttgataaacttctcagtgaaaatgttggctaggcaagttcagttaaaatatagtagaaatgtttatcctggtatctctaagtatacatttaattgtacagaaaatttacagtgtaacattgtgtcaacatttgcagattgactgtatatgaccttaatctttgtgcagcctgaaggatcagtgtagtaatgccaggaaagtgctttttacctaagacttccttctcagcttctcccataaagagaccctaatatgcattttgatttgtaattggaaatgtaactttcactgaaagtgtcatgtgatgtttgcattacttttaactgctatgtataaaggaaagtgtgtcttttgacttcatcagttatttctcttgtgcacagagaaaaatgcattaaaaatgactaaaaaaaataaaaaattaaaaaatggataatcttttctttttgcttttggcctaggatcgtgttaggaggattatcccacccgacgataatataaatcttatcctatatttctctaacttatattgttttatttagaaaatgttttgtcctgtctggaattatcttgatgtatggatttaggtattctaacttttttgccccaaagggttagccagttgttaacatatttaccttttcccccaacatatgaaatgtcatacatgtatatactttattctgtgtttggattccctttagttccattgaacattgtggcaccagtacaccagcctgtagatgagttagaaatgggactttgtatcttttaatgtgagacctcctcttgatcttttttattttttacaatattctgacgattctgacatgtttattttaccagatgaattttacagttaatagattcttcccccaaaaatatattgagaatttggttgggattctcttaaattgatatgactgtgaggactacagaattgcattgctttccagaaacatgttgccttgtttctgaaaaactttatatatccttcaagagagttttacttaaatcctatataatttgtaataaatatgttcctaggtaatacagacatacagggaacacgttgatactgcttattggagcttttaatatgttacctatgtggtcatttttgctatataggagaagaatttatttgcatcgattattttaaattggcaatttattgaaatctattaattttagagatattcatttgatccttttgagtttttccaggtgagaaatcctatcaattatgttataattatatgttttccttttcaaaatttataacataatttctgactgcatgggttaaacattttcataacagtgctaaataataaaggtggcagtggcatttttgtcttgtttctcattttagccagaatgtgtttgctacagcaattccaaattgtgttttgtgaaaaaaaaatattcttctgggagacaaggaaatacatttgcaa

SEQ ID NO: 838 - DNA, 27968 bp, Homo sapiens
caggagaacctcatgctttccatcctgcccaagcacgtggctgacgagatgctgaaagacatgaagaaagacgagagccagaaggaccagcagcagttcaacaccatgtacatgtaccgtcacgagaacgtcaggtacgccggcccggggcgcgggctctgatggcagagcaggctgtggagggctgcatctttgtgggacccgctaggtgctgtgggcttcaagaggttttccagggactagaagcaaggcctcccacagcattcatcagcctggcggaggaagctgccagcagatgttgaagctacagtgtgctctaggctgcttggtccaaccccatcatagaacagatatcacctggagcggggaagggactcctgtgaggtcacccagctgttgagggccagcactggggctagagccctgacctgtgattctaggaagaaggatgagttcagcctgggcaggagtgggcagtgtggggtggtccccaggcaccacagggagggaggcctgcaggggaagtctgctaggacaagtgcaaggtcagagccctgactttacctggaagggtcagggtctcactgtctgggggtcgtgagggaggaccttctcctgccctgatcctggctgccctgtgggttggagagggagctggcagtggggtcgggtacacctggctgcctggagcgtcacccccacggttccttcctcatgcagcatcctctttgccgacatcgtgggctttacccagctgtcttctgcctgcagtgcccaggagcttgtgaagctgctcaacgagctctttgcccgctttgacaagctggcagctgtaagtccctggccccgcctggctctccagcggggcctgccctcatggcctctgcctggcccccatccccggccccatgattttctcccactgtccttcctctgctttcttggccactcctccctcactgaggaggggctggagcacaggccaggccctcccctttcagaaataccaccagctgcggattaagatcctgggcgactgctactactgcatctgcggcttgcccgactaccgggaggaccacgccgtctgctccatcctcatggggctggccatggtggaggccatctcgtaagtgggatgcctctgggagggaggctcccagagcaagggccccggccctggacccagggagaagcaggtcttccgcgctggccatggcccctgggtgggggatctgctggaagcagagactgggacacagcactggttgatgggtggcgcaggctcccgctctagaagctgggatgtggcttaccttcctcacagcccaggggacctgcgaggctcccccagcctgtggggcacacttttccagccttagtccacgtattctctttttgccagaagttgcagttgtgaattttctcacgcctcctcacacttgctgggacccccacaggggctccccatctctcctcagtgttttctcaccgtgacccccgaaggcactgccctctccatctcgtgatgcagtgactgtaagaccctggcagaggggctcagggatgaggctggatcccaccccggcctctgtgctccagccttaggctgtgagggaggcaaactctcctgccctcactgtcccctactcttgcccctgctccaagtgggcttgcagctctcggatgggcagtccctctggttgacttccagcctctgcgggacccggggtgacatcaggcaccaacacggaaagggaagctcctgccgaggcccctcccccatgggatggagtccaggaagttgcctgctctttacccccttctccgagggggcggctttgcatttttaccatcttccaggttaaagcccgtctagtattgccctggaaagaaagcagtgtggcctttaccccaggggtggtagtccaggaactctaacattctctccctgccctgtcagacacgttcaggcagggggctgttcacggctattttcttcacctctgtgtctgcagcaccttgaacgtgcctggcacatacttgatgctcagtgaaatattaactgcacgaatgaataaaagagtaattggcagagagaaactgaggcccctcgggaagtggggatagggaggaaagtcgcttggtgccctcgtcctgctggcctgtgatgcctgactctgggctggccctggcctgccttaccccccacccaacaccaagctgtggggaccttgccaggccccctcttgtggaggggaagaggcccacaatgaatttctcctgcaggagcaggggcagctggctgcctcgtgaaggccacaccctgaccctcctttctgtgtgtacctggcaggtatgtgcgggagaagaccaagactggggtggacatgcgtgtgggggtgcacacgggcaccgtgctggggggcgtcctgggccagaagcgctggcagtacgacgtgtggtcgactgatgtcactgtagccaacaagatggaggccggcggcatccctgggtgagtgccattccaagggggcaggtttgaggactggggaggggaccgtcccctccatcccccagggctgtgaccctgatgagggacagggggcctcagagaaggcctccctacaaccccggaacagcattcctcctgtctcgccctggtcctggccctggctaaggccgttctgacctgccttggggtgaggcctctttgggcctgatattggatgtggcttttccttcctggaccctgcagtagcctgtcctcctgtcccctttaccgacttagggggctgcctcccctttacccactaagggggctgccccagctctccttatgtcagagcccaggtctccccaaagggagagtaatgagcagtcatcagctagcgggctcgcaggcagcgttttgcaggtcgcagtgcgattacacgccttacttgagctcccttacaggataatggaggccctgcctttagcagggcgaggctgagggaggatcagcccagccttccccatctgggccagggagcttccttcagtggcatttaggattcttggcctcagtggtgactcctcagaaacaggttttattatctcttggcagcaggggttgcaactgagaaacgtgcaaggtgggggataattggatcttgtggctcacgcctgtaatcccagcactttgggaggccgaggtgggtagatcacctgaggtcaagagtttgagaccagcctgaccaacatgacgaaaccccatctctactaaaaatacagaattagtcgggtgtggtggtgtgcacctgtaattccagctactctggaggctgaggcaggagaattgcttgaacccgggaggcagaggttgcactgagccaagatcaagccactgcactccatcctgggcgacagaacaagactctgtctcaaaaaaaaaaaaaaaaaaattccttatcgcatttgatctgctttacagcggatcaaagattgaagaaagattgtactcctgtgtcgtggctccaacactgaggctgagatgggagtaagtgccatacggcccacacagctagttagcggcccacacagctagttagcggcccacacagctagttagtggcagaactgcctccacttggcctctgccccacatgcccgagagacacggggccgagcagcagccggtgcagccgtggtccgtggactgtcccctgggggtgtgagggccacctctggccgacgctcagggcctctctctctgcaatccaggcgcgtgcacatctcccagagcaccatggactgcctgaaaggggagtttgatgtggagccaggcgatgggggcagccgctgtgattacctagaagagaagggtattgaaacctacctcatcattgcctccaagccagaggtgaagaaaacagccacccagaatggcctcaatggctcggtgagttccccaccccaccccacccaccccacccaccccacccctggattagggggttggaaaggaggagattaaggaaagattgcagaagaggtggcaggacccagcagtggctggctgtgagaggtgagtggcaggctggcacccttcccaagggagagctggtttctgggggagatggtgagtgtaattcatggcaggttgcaatggaggtgactgaagcatatcccaagaccacatccaggagggggccgctggagatgtgtcggtggcgcccaggagagcagctgggttggggctcagggtctcctgcatggaggaagtgagtgaagccacaggagtgacgtggatgctcagggagaggctcagagaggagggtgggggtggggtgactggtcatgggggaggaggaccaaggccaggaaggtttcctgagtgggaaatgagggaggaatgagatagaagtaatagagcaggggtgtctaatctttcggcttccctgggccacattggaagaagaagaattgtctcgggccaaacaaaaaatactgtgggttgaacaagcttgcaatcgtgcatcctgtgggcctgccctctggtctttttgtgggatcccccgaatatctacagacctgaagcactcagcagcttccccaggtctgtccaccaacccccaaacacctcctgtcagtctgattagaaaccaccagcagctgttgcagaaatggatccctttaccatcccctgctgaatctggaggttgtcttattttttgtaatctcatgtcaaaaccctttcctccagttatgagagtccatctaacaagacttggaattaaggagcttggtgactgtcagggaagtcgtgtcatttgagactgctctatggctgaggctttgcctaattatggctaaagcaaagcccactctggtgaggctgccggagtgaaggctgatactccccgctgattctaacctcgatgtcagtctcatccagtgtcattttaaaggctgtctctgacaactcccaaatttgtatctccacccccagtgtcttccctgcactcaacatacagccacttgtacgtctccatttgtacatataataggtatcttaaatgccacctgcccaaagctcctgccctccttcccactccataacctgctctccctcggtcttcccatctcagttaatggcagttccatccttttattaacaactgctcagaccaaaaagtttgaaatcatccttgacgcctcactttgcaatccacaagcaagttctgtggcctcagattgctctctaatcccaccgcctcccacgcccttgtcacttccagacctgtccacgccactctcatcccatgcccagatcatggctgagctctcctttcctctaggccctgcccaatggagcaccagcttcctcaaagtccagctcccctgccctcattgagaccaaggagcccaacgggagtgcccacagcagtgggtccacgtcggagaagcccgaggagcaggatgcccaggtatgtgcagggctcagggcagggggtcactgagggccagatgcgggcaggcaccaggaagcaatacgttcctgcagcaggagtcctgtgctggggagacctggccaccacccaggacctgctcctgcttagcactgtaaccatggacaggtcacccctccagccccgcaaaaccccactgtctcctcatcagttacatgccggggtgagtaaggtcaaaagaggtgcttagctcggaggcctttgtagctctgatggcccggaatcctgtagatttgagatcagtgaggacatccatggaaaattatataggatctgagaccattttggaagtgagatatcagacctggactcacccctctggctaggttcaagccccacaagttccatgcaagatgggatatttccttagcccccaaaggcgaggaattagcatgctgtcccagagtgcagggtgcctcttggggagcacccagaactggtccctgaccgcagggcgtctggagcacgttcactgatggaggtcagtgctgcagagatgggatgtctgccctgctcgggctcaccgcgtgagggggacaggagagctggccctggtgccattagagcagatgccgtagaacaagagggtagatggggctcagggtaaattaggtttttcttgagtcccccaacattcagtaacttttccttgttgcagttttcttgatagaaagtgggggtccagactcagggcactcactagcaaggaggacacagatgcagctttagcagcctgatttttcgggccctgaccctcagccagggccacgctgctcccggatctgcttcaggaacaggttcccgctgctgccacagaccatccacgtgattttacagaaggggaagatgtggctggggaaacattatctggggtcaaactgtcaaccagtggcacacctgtgcctgtgcttaagaccagggagtcttttttttttttttttgagatggagtcacgctgtcacccaggctggagtgcagtggcgcgatcttggctcactgcaacctctgcctcccgggtgcaagagattctcctgcctcagcctcccaagtagctgtgattacaggcgtgtaccaccatgcctggctaatttttgtatttttagtaaagatggagtttcactatgttggccagtctggtctcaaactcctgacctcaagtgatccacccacctcagcctcccagagtgctgggatgacaggcgtgagtcaccgtgcccggccccagggagtcgtgactgtggctcccagatgcactgttgaacccgttcagacagctctcagcccgtctcagtgactattcagactgatggctgtgtcatcacagccaggattcctgtttttggagttgatgctttttctttggaactgggaataaaagggtagtgggtgccccagctccacctacccgccccttgtcagccctctagtgatgaggacattcttctctctcccatcactttccccctcagatcttcctttccaaatgagccagatgtgagttcctttaacagttccctgaagccctagagttgggagccattcatgtccccaggctgccaatgtatatggcccccacatcaatacagcaggaagtgccaggactgcctcagcccagcagctgtctccgattacaggtctcctgctcaggagccaggggctgctccctacaatgctgtcattagcggaccctccctgcagagctctgggtggggggcccggggagccaggaaagactggagctttgggtgtagatccaggccacatggagccacgtgggagcatggggaagacttcccggaaagggattttagagctggagggattggtcctccgagtatgccctcttttgttcctttcctcctccacctctgtctttcccagctcttccccaccactctgtcccatctgccccactcacgctgcctccctggctcacaggccgacaacccctcattccccaacccacgccggaggctgcgcctgcaggacctggctgaccgagtggtggatgcctctgaagatgagcacgagctcaaccagctgctcaacgaggccctgcttgagcgagagtccgcccaagtgtaagcgccacccggaagcgtccaggcccaccactcctcccgggccctgacaagggattcaggaaactgagcatcccaaatacggcccccctgctaggccaaggcagatgtggcatttgggattcatggggcttgttcccactgcagagtaaagaagagaaacaccttcctcttgtccatgcggttcatggaccccgagatggaaacccgctactcggtggagaaggagaagcagagtggggctgccttcagctgctcctgcgtcgtcctgctctgcacggccctggtcgagatactcatcgacccctggtgagggaggggccggggagggccacgagtttcctcggctgcggtggtgccgggcggggggcgggggcaggtgtctcagcgggagcctgacattggggagcaagccagtctctgctccctgacccccactgggacggcccccacaggccccaggagtgctagacggcaccctgggcatccttccttttccctgccccgcgttttggagcagtcctagcgtcagaatggggatctggccaggatcaagagagctgagggacagaggcctccagaaggctggagaccttggctagatgggcccacactgattcttgggacaaagatggggacactgcgtcagtctcagtcaccaaggctgacctggcccctctcttggctcatcttggtaaagatagattttaggctgtgggcacagactgacgccctctctaacgcagcagtaggtcctccagggcaaggtgtggcctcctggagtccccagctggtgaagccctgtctgagggtgacgaccactctcttgttctccctttctcccctcggccaatcggggattccccgtcacagaggaggggtctggaaccctgctgggattacagtttgtcaggagccttgggctgggtcacactatctaaggttgcgggtgtgtgaccacgtgcaggccactgcaggctccggcagcatctgtttcctcatctgtgaaatgaggagaacaacccctgccctagcggacactcacgactgtggtgaggctcaaattcactcattccataagtattgattggttgtctgcttcatgcgtggggatcaagggctggggctatggcagcgatgcggcacacagaaacccctgctctcgtgaaacttgggttctggtaggggaagctacaggcaaaagcaattaaacaattaaaatatgcatccatgcgagagtaagtactgcagacacagggaaggcaaggaagggaggcgggtatgctgctggggagctttgttttgttttgtttgcattttgatgtgggatggtcagagcaggacttgctggcaggataatatttcagtaacgcctggaagcgggtgaggggcgagccttctcctatctgggggacacctgcttcggatagaggtgctgaggctggagtggcctggcccctggaggcacagtgaggaggcatcgcattgggaacgggccacaggaagagtagcaggagtccagcacagacgtggggcctcctacacgccactgcagggtgccagcttccactcttaacacaggaggccgccagaacaagggagcagaggagtcccctgttgtgacatatgcctggagaggctcactcctgctgagaacagcgcttagtgagcacagcgggagcagtgagaccaaatagcggcccagacaagccactgtggtggccaggccaggccgaggatagaggaggatcagtggttggattccgtcgatagatgctgaatgtattttggagacagagctgacaggatttgctggcagattggttgtggggcgtgagtgtggagttgaggatgtctcctgggcttctgatctgagcaactggcaggacgggggtgccgttaaccaagatggggacaaggtggaaagatgagagtggagaggcaaagatcaggagtttgctttgggacacgtgaagtttgcagtgcccacaagccaaggaggccagcatccatgatctggagtttggagggcgggtggggttggagacgtgaacctggcatcaccagcatgcaggctgtgctgcaacacgagacttgctgagctcaaggcagcgtgtccagatgcagagacagaaaaggactcaagaaaccaagcgagaaaagtgtctcaaggaggggtgagaggtgactgaaaatgggacatggatttagctaccaggaggcttctggggctcttggcaaggacaccttccagggaggggttaaacgggaatgggtgtgagcagagggtatagagaacaggtttccgggagttgtcaggttaaggtggatgtgttgagtgtgtccactgtgaagctgggggtggctgtcacaggcagactcttagcccccggcagcgagggagtgatgctgctccgtgctctgtcctttcagcacagcgacatggcaggggtgcattcctaagatccctgcccaagtttatcctgggctgtgcccaggccacctgtgagttgttccctctctgggaaatgtcccaggcagcagctgcagctggagagtggcccgctcccaggccggcactcagctggcggcccgtctcatcagggcctttgtcctgttctgcacggcaggcagcagcaattccctggcaccgcgtggagctgtacaggctcgtgctgtgctgagaggcctccccgtcccctgcccccggctcctgtcccctgccccctgcccccttcccccggtccttgtctgctggcccctgcccccggtccctgtctgctggcccctgcccccgcccctgcccccagtccctgtccgctgccccctgcccctgcccctgtctgctgtcccctggccactgtccgctgtcccctggcccctgtccgctgtcccctgccccctggcccctgtccactgtcccctgccccctgtccgctgtcccctggcccctgcccccatccccgtcccttcctctcctagcccctcaccccatctcactgtcccctctggcctctcccaattgtcttctctctgtcacaggctaatgacaaactatgtgaccttcatggtgggggagattctgctcctcatcctgaccatctgctccctggctgccatctttccccgggtaagaggcacttttctactgagctcagaagcctctggaagtgagtggcactccctgtaaaactgggcagtgatggagttattctttctgtcaaatctgacaggcagacactcctctgttaggacggtccaggcacttgcccatccattcattcaccatcagcagagcactccctctggctgggccaccaggctgtggcaggctgtggtgggccacggctgggccgtggtgggccttgttgggccgtggcgctgcagcacgtatgagtacggcagagtctgggtaaacaagaacctgggtagagaggaagtggagggccggctggaaggtgggttggccccgatggtgaaggcccttagaagccagactaaagggattaaaactttctcctgtaaggcactgaggtaccaagcagagttttttttttttttaatcagaatgacaaaggtaaagcagtgtttaggaacataaatctgacaggtggctcgccaggtcacttggagccaggataggcaggagtagctggccagagacgagcagccctgaaaactgttcctgccctggcctcacctcgtcaccacgtctgctgtggaaagggctgcgacctggaggctgtgctgttgaacaggcacatcgaggaggtccaacacagcgtcagaactcccacgccctcttctcagctctgccccttggtcagctgtcaggtgactcccaggcagagtccgttttgaggctcctgggactggaatacgggaccagcctgagttgctgtcagtcacgtcgcaggagaaaggactggcaaaggctcatggcccttgaaattctgttccttctaggcctttcctaagaagcttgtggccttctcaacttggattgaccggacccgctgggccaggaacacctgggccatgctcgccatcttcatcctggtgatggcaaatgtcgtggacatggtgagctcctgctgtccttgttgaagggacgcccctgttctcagtggagaagggcttctgtttgggtcacacaagcagtttctcagtccatccctccaccgtcatgtagctttggagtggctcttaggttcccaaacacatcatccccacctagtggaaggagtcttgtccctgtcatccagggagcctctgggatggacttgtttccttgaagctcctctcccagagtccgagagcacagttccatgtgcccaggcctgtgctaggtaccttatgtatgttgattcatttaatctgtgaaaaagtcctgagcagttgtaccagtatctgcagtttcatagggagaaactaactctcaaaaagggtaattggttgggcgcggtacgtcacgcctgtaatcccagcactttgggaggccaaggtgggcggatcacgaggtcaggagttcgaaaccagcctggccaacatggtgaaaccccatctgtactaaaaatacaaaaattagccaggcatggtggtgcacacctgtaatcccagctacttgggaggctgaagcaggagaatcgcttgaacccaggaggcggaggttgcagtgagccgagattgagccgctgcactccagcctaggcgacagcaagactccgtctcaaaaaaaaaaaaaaaaggtaattcacttgctctaggtcacacagccaggaagtgacagagtccagaatggaggcagttctaagtcccagtcctgtgtattcttcctccctgagggggcagccaaatgctttcttggggaaaagggacaggagttgggagcccagatctattggtttagaaccactgggcacgtattgagcactacatgcctggagctgtcatcagtgttctcttgtcagttgtcacggcctcctctaattgtggtagtaccatatacactatcttccttttttttcaaatataatgttattgttgtactttaacaattggagcacacggtgccgggcgcagtggctcacgcctgtaatcccagcactttgggaggccaaggcgggcggatcacgaggtcaggagatcgaaatcatcctggctaacacagttgaaaccccgtctctactaaaaatacaaaaaaattagccgggcgtggtggcaggcgcctgtagtcccagctactcaggaggctgaggcaggagaatggcgtgaacccgggaggtggagcttgcagtgagccgagattgtgcactgcactccagcctggcaacagagtgagactttgtctcaaaaaaaaaaaaaaaaaaaaaaaaaaaattggagcacacaaatacaaccaacatggagacttattctgccagtggtataagtgaaaaagctccagggctgcagctaatcagaagtccagtggggggccgggcgcggtggctcacacttgtaattccagcactttgggaggctgaggcaggcagatcacttgaggtcaggagtttgagaccagcctggccaagatggtgaaaccccgtctctactaaaaatacaaaaattagccagccacaatggcacgagcctgtaattccagctacttgggcagctgaggcaggagaatcgcttgaacctgggaggtggaggttgcagtgagccaagaatgcaccactgcacgccagtctgggcgacagagcgagactccatctcaaaaaaaaaaaagaaaaaaaagaataagtctactgggaatgaggagttaggggctccagagcctaccttggccaggggttgctggtgcccactacccagggaagagaagccccaggccccctgcatgtcacaacatgcctggaacctggcacccaggtgtggaggtcaccactgcatggggtcctggacactgtacaggacacctggagatgctgtcactcatggaggggtaaaaagctagggaggtgtaacaactgctcatgctagaatgacatggcgggaatcgcgcaagcaagacaaggttgccctgtgggtgaaagttacaaaaagggggggttgattccggttctggatgcgctttctcccggccgcatctgcccagtagcagaaccagtaaagaatccagaaggcagtgaacatccccccaatggaaggatttgggcagagactagctgtcatcacggggaggctgtgagtggggctcatggtcccgtggcccctcctgaagcaacagtgtgatatggggaagaacatgttggatttgaagcctaaagacttggctcctacttttggcttttctgcttgctaattgtgtttgggcaaatctggcccgagttttctgtacaatagggacagtactaaaaatactcgagagagtttttgtgaatgtcaaatgaggcaacggcgaggctcttagctgcagttactaactttcatatgattagtccctggtaaatttccccatctttcccggtatttctgggggagccgcgggaggtggcagctgagcgtgcactaccatgcacagccctctgtgaccagcacctgctgttctcttgaacgtgtgtccctgcccgccgtcctggcctccagctcagctgtctccagtactacacgggacccagcaatgcaacggcagggatggaaacggagggcagctgcctggagaaccccaagtattacaactatgtggccgtgctgtccctcatcgccaccatcatgctggtgcaggtcagccacatggtgaagctcacgctcatgctgctcgtcgcaggcgccgtggccaccatcaacctctatgcctggcgtcccgtctttgatgaatacgaccacaagcgttttcgggagcacgagtaagatgaagcgtgactggggatctgtattgtctccttcctcccgcccgcaaagtcctcagttcaagctcatgggcctgtgctgaggtggctttctgccactaggggtcctcaaaggcttgttcaagaaccagttcctggctgctcacagacgtatcactgtttggctaggacctgagaatagattcttcccattctccccgagtggaggacttgggataccccggtgcctggctgggcatcaggctcttgttcccagatggggcctgactgtgctgttatctgtccaacagcttacctatggtggccttagagcagatgcaaggattcaaccctgggctcaatggcactgacaggtaagggccacggcttcccctcctggcctgcactcacagcccttcttctagagacaggaatataacaggcccaagccccgggatctcaccctcccgggaggcacgtgacctgatacgtgcaggttagagaagctggcatgggttcctccaggagggctgcagcagtgcagtgaggagggaaggaaataccaggtggatggcagctgcatgtaactggctggcaggacagacaggcagcaggaaaatgaggagggaggaagacgctttggatttggacctggcttctgagcctgcagcaggcagtaattctctgtgggtcacaggcaggtccgtttccatgagttgcaatttcatctcttgaggaggatactgaaccagaagttctctaaggtccctgccagtgccaaggttttaaaattttatgattccatgacttgaacagaccttcaaggaagtttagaaataaaaagatgacctaatagaagaggggtaaaacctgcatagcccttagcaaaagaagaactctaaatggccactaataaatggcactcaagtaatcaaggaaatgccagttacaccctagtgagataccatcacacacgtaccggtccagataactctgacaatatcaagtacaatagtaactcttacactcctggtgggagtatgagttagtacaaccgtgttagaaaatattttgatctatttagtaaggttgaaaataaacctgtgtcccagcaattccactcctacatacacacccacgcagacgtgtgtatatgtgtatatatatatatacacacatcttagagaaattcatgcacatactcatgtcccaggatatatgtatgagaatgtccaaagtggcactgttcgtaatagacataccccctcccccaaaacaaatgaaaacaacccaaatgacatcaacaggaaatggatacataactggtatattcatgcagtgaaataccatacggtaatggaaactaaccacagctccacataaaaatatgtatgaacaaggtaaaaagccatggtgagattgtaccccagtcccatggctatgaaatcccatcactgatgtctcttgcttctccaaattcctgcatggttgtagctacctctgtgatcagtcaggcaatgcagtgtttcttaaatacctggggagcagccctgatgtgaataccaggtgcagccaggaggggccaggggttgcctggctgttggagaggagcccagtgagttaagaaaattttactgcccgggggagcccgacttgatgtgaaagggcctaaggagccggggtgagctctagggctggggtggcaggaagcagcaccatctagttggagggaatcaggccccctccaggaggcagatgacagccctttcagttgcacacgctctgcccagcaggctgcccctggtgccttccaagtactctatgacggtgatggtgttcctcatgatgctcagcttctactacttctcccgccacgtgagtgccgcctgcacgatccccgctctgtgcccacagcccacagcgctcctgagaagcagccctgggacctaagagcccaagctcctaaggaatggggcttcccttcacccagccccacacgtgagcctggtcaggccaccgccttctctattcaggctccttcctcagtcacacaggaagacagttcctcacctcttccgtccgaccccctccaggatggtgaaggaagcatgggagtgaaggtgggaggggatagagtgaaggcacaaacatcttgaatcaaatcaatatcccctaggccaggggctcatggcccccgcactccccgtggcgctgagggacattaacacaactgaccacagagccagaagagaaagagaagggagctgatggactttctgttgggttaaaaggaaaagagaaggccggtgcagtggctcattttgggaggctgagggtggaggatcacttgagtccaggagtctgagaccagcctgggcaatatggtgaaaccctgtctctactaaaaaatacaaaaattagccaggcatggtggcccgcacctgtaatcccagctacttgagaggctgaggcaggaggattgcttgaatctaggaggttgaggctgtagtaagctgagatcacaccactgcactccagcctgggtgacaaagtgagacaccccccccgcaccccccccccccccgccacaaccaccgcactcaaccggacaaaaaaggaaaagagaaggaagagagggaagagaaagatcctctgtacttagggcccaatgttagttcaagtgccccctactggctttccagggaagtacagccttcccaagccacttcttacccaaatggcgcctgctagaaagggggactccaccctgagttgggagatccccactgctgccacctccacgagacagacctgcagctgaaattaggtcccaagaggccccctacacacggaaggcctcctggatctctgctgtaattacggaggctgggaaccgcaccactattgggtggccttttgatgaggtgcaatctttgcagggtcttacttcccttgccatttagccatcttccttccagcctttccaaggggagttcctccattcacgttcctgtttttcttctttttttgagactgagtctcactcttttgcccaggctggagtgcagtggtgcgatctcggctcactgcaacctctgcctcctgggttcaagttgattctcctgcctcagcctcccgagtagctgggattacaggtgcccgccaccatgcccggctaatttttgtatttttagtagagacagggtttcaccatgttggtcaggctggtctcgaactcctgacctcaggtgatccgcctgcctcggcctcccaaagtgctgggattacaggcatgaaccgccacgcctggccattcctgtttttcatccttctatccagtggccagcttagagcacatgcctcgccttgtctgtgtctgtaggtagaaaaactggcacggacacttttcttgtggaagattgaggtccacgaccagaaggaacgtgtctatgagatgcgacgctggaacgaggccttggtcaccaacatgttgcctgagcacgtggcacgccatttcctggggtccaagaagagagatgaggtgaggggtgtggtctcagcccggaaccatgaggccatttgtctccatctgttctttctttcaggcagcccccgctgggcccaggccttctcagggacaggggactggggcctaggtagggctgaacctaaacagcaaacacaaataagcaaaagaggaatttctccggcctcttataaagtgcactgctgtaggcatcgtgatgtgggccgtacagctctgaggccatgtgtcagaagacaagactttggctagagcccacctttctgttgcctgtgaacttctccaaacagagtggttcccagctctacggtaccctcgtcttcacagctggggctgttagaggaactagagaagctgttttaaaatttattcaaagtagtggccgggcacagtggctcatgcctgtaatcccggcactttgggaggccgaggcgggtggatcatctgaggtcaggagtttgagaccagcctgggcaacaaatagtgaaaccctgtctctactaaaaaatacaaaaattaactggacgcggtggtgcacacctgtcgtcccagctactcgggaaactgagacaggagactcacttgaacccgggaggtggaggttgcagtgagctgagattgtgccactcaactccagcctgggtgacacagcaagactccatctctcaaaaaaaaaaaaaaaaagtagcgatgagctatttttaaattattcagagttggaataatctacagccgggcatggtgacatgtgtctgtggtcccagatacctggtgttcaaggccgcagtgtgcttcgatcatacctaattgtgcttgtttactgccactgcactccagcctgggaaacacagcaagacccactcttaaaaaaaaaaaaaaaaatgctggaataatctgactgatgtgtgagtccaaaaagctgagtgcacatgtcatgcatggaagatagatgcatttctccaacacatcatccagtcagtcggacatgctttgagcacgttgtccgcacctctttttaggagctgtatagccagacgtatgatgagattggagtcatgtttgcctccctgcccaactttgctgacttctacacagaggagagcatcaacaatggtggtattgagtgtctgcgtttcctcaatgaaatcatctcagattttgactctgtgagtgcccatcccaccctgcactctggccatgaagccggcccattccacatcacatcctacaataggctgcagaggccagagaaactggcttcattttcccagataagccccttccgcaatacatggacttctgcagccacctggaactgctgggctggggaaggggaggtgaggtgggagcccgggaaatcacccacagggtcacaggataaggataaggactggccaagcaacatctcgagacctctctgtcctgggactgtctcctcaaattcagagccggtcagcattgactgggtgacctgtataccagggagaatgcttttacacacgcgcggagcccccctaggagactgccgattttatgtcagtgttgaggttgtggaaacaggcccagaaagttaggaagttctcccaggatcatgtggcagataagcggtagactaagtaacaactttgataggaaagtgtctcttgggtttagtggggtccttgtaaacaggtacatctgtcactgggttgggtcattcctctcccttgactgctgacaattctttcctgaatcctggcctcagctcctggacaatcccaagttccgggtgatcaccaagatcaaaaccattggcagcacgtatatggcggcttcaggagtcacccccgatgtcaacaccaatggctttgccagctccaacaaggtagctaaccccagtagccagagagatgaggctctgcccccaaggcaagagattggcagcccagacctagcatgggggaaataagaactgctgtgcaaagtggtcccagacacacaccaccagcaccacgtaaatataaataagaaatagggtttattgagaaagttcggcaagcagagaaacagaacagacacacaaccccctgctgttcacagctcaggcctaagatggttgtgttctgtggccaggccccctaaggctctgtgctttcataggaactggagagcaattgtcaacaagggaaactgaaagcatggccttcagaactctggctgacggcagcctgttcttttgttaagctaatttagacctttgttcagctaccaggagagaaaattaggtgtaggagccctggtcccaagctctggtcttaaaacaccatcatcctgctttacctctacaaccatcccacggccctattatatggatgaggttaaagaaacacgtccaaggcgggtcatccccctccagtgcttatcacctagttgagggatccaaacaaggacaacctgacaaaacctaaggaccaggaccaggcccagccaaggtgaaggggtccgcctcgtggtcagactcacaggtccgtctcctctgctcaattgcccagtctttgcctagacctgctacgtgaactttgtcacagtggcaagtcagagctagcgtggctgcgactcctttgtgggaggaaaagtaaggccttgaacatctaggtgtagggaatccacccccagaacactgccagggaaggcagcagagcaggctgctgcagtgagcggcccctgacactttctccacggtcccctggcacaggaagacaagtccgagagagagcgctggcagcacctggctgacctggccgacttcgcgctggccatgaaggatacgctcaccaacatcaacaaccagtccttcaataacttcatgctgcgcataggtgagcacccccagctggcctgccccgcagcaggctcccttcccatgcaggggcctggcccaccaccaggagagacatgaggctcaggacaactgaggcaattcgggtggggaggttcacgcactcacagggcaaggagacctgaaagacctttagtccagacgactctagatgactaaaccaaaaacccagctgatgtgatgatccgactatactgtgcctactgttacaatagaagcttggcctgcctggctgagaagtgagtttgtgatccatttccagaggggttgctgtgcctgctgaggacatggcttcccagacaggcctgctctttgaaaggagttaagatcacctgctgcttctactgagggggtatcattcctgagtgaggtcccaggagacttgaaataccagctgtgttagaagctggccactaccatgccgagtaaatctgcatatggggggggggtggcggctgacacctaacaagcacacggataaacaggagatgtgatttccaccctccaatagcatacagccaagttgaatgaggacaatgatgtgttacattaggagctttgtggtacaggtctggagaggagatggcttctgaggcccataacaaggtgtggcctgtggctgtgctgaactttatgcctctaccctaggcatgaacaaaggcggggttctggctggggtcatcggagcccggaaaccacactacgacatctggggcaatacagtcaatgtagccagcaggatggagtccacgggggtcatgggcaacattcaggtatgtccagtggcacagctggcacgtgctcagactcggcatgagaacaaaaccggaacagtgctttcccacgtgcccctgcctcccaccctggccctgaacagtaagtccagaggcagagacgtggggcaagtggaaaagaatctctgcaatagctagcctcagcacaggaagaaacacttccacccatccacaaaatctgggctgaagttctagatgcatatggcctacctttgggtatgaaccttctaataccttgtgatctgtctcagtggcgtctggcagaaaagctccacgaaaggggcaaagggacagaagagcaggcagtggcagtttccaggtaacagtgctgccacccaggtgaccatggccatcctaggagagaagtctctggatgagaggaggcccccagccagtcactccagggttctccttcccacccgctgctcgccacgggtggaagggcttggccctgggaggtttggggagtgtcccgtactgcttgggacccatggatcagtgctcggctccaaccacccaaagcccccacccgccctcagtctaggctccccccgtaacgccacgttcttgctccccctccctctccaggtggtagaagaaacccaagtcatcctccgagagtacggcttccgctttgtgaggcgaggccccatctttgtgaaggggaagggggagctgctgaccttcttcttgaaggggcgggataagctagccaccttccccaatggcccctctgtcacactgccccaccaggtggtggacaactcctgaatggcctcgagcctgcaacagtccaaaccggaagggagaatttattttttgaaactgaaggaagtcccgaccttcctggattgaagtgcacactcatggactttaggtttagaaacctcctcagccttcatttgttcgtggatgtgtgagctctgagggtggccctgctattcctgtgtgtgcctgtagtgtccccagcataggggtcttaggcatagggctgaacagtccttccagagccctcgttccaatccctgccgtccttgcccctgaggggccctgaccactgtgagcaggagggtggcagagctgggacaaagctgcctttgccgctgggctttccgggactgtggagggagcacaggcggggaagctccacttcagacagggcttggtggggcaggacatggctcccattttgaagggaggtctccatgtggtccgagtgaggtgagacggccctcgtcctggtgttcctgatcatcttgaaaggttcttctggaactcctgtccccttagtcatgagaacagaaagtgcaatatttcctttcacctggcaggggaggggggatttatttctgaaagaaaaatatataaacagatcttctacatttatatttttaatcttctgttaaatacactttccgatattgccttgccttttgagctcttgctacagtcgcctttgctactgctttaagagaatttacaggtattgataaagaacaagactgttttattaaaagctttattcaacttgaaagtgattgtggaaattctgttaatatcacttatctgaggagtgctggtactttgctgactcatgccactggtccccaccacaggcctggaaggcaagagcttgaaggtctcatcatagctcactgtaccccggaacgcctgctgcctggccctgtctcttttattcttaaactttcttctaaagggtactccaagctggctttaatcccctgcactgttcctggagctctcccacacggaggttacttcgtggccattgcagggttaagtctgaacgtggccttgggccagtcatgactcctatctgtgcctgggcaagggagggctacaggagaacctggtcagccagacacaggttttcatatctgtgagtgacccacacgccaaggaaccagaggtgccagcaggtcagaggcccgtggttacggcaaatcaggacactaaccggagagcctgcaggagagggaagacccggggggcgcctgagtccccctgagttaatgggcagatttctaactaactaactgtgctttttcagaggggacttcctagtacattcacagctctactaaacttttaggaaacaaaatatgagacacactgaactctgattattttatcctactgctttctcacaccatatttataaagcagtggcctagaatacactgcgcctaaccaaacaaacactgaagaacttccttttcaaaagtttcaaacaggaaaatgaggaaaaattacttaaagctttcataaaagctaaaaatactttccttttaaaaaaaaaaaaatattgggtcttccttattatcttcattagtgaatgtgggttatttttccatttatttagatcagtgtttctcaacagaatcaagctattgcagtttgagtggagtgctacatttctgtgagagccctttctgaaaattttaggatttttggcatctctattcctggcattaaattagtagcagttactgtgacaacttaattgcctggtctttcccagagttaatgccctcaataatttgatatttttccataagtacttcttgagtgatacacctttttcaaaaaatggcttttattgccccacaaatgattttcaactaaaatgtatgatcaactaatacctttaaaaaacatcttgagcattttaagaagggaccaggtgatcatgggaattgttcaaaaatgccagtgtctatactcaaacctgctcttccatccagatgaacaggtaggtgtctgttttcatcagaagggtgatgtacccttcatcagacagtactacccacctggtactgtcttcagtactggttacttacctctgatgtgctcccagtgcagtgaaaacaatctattaggagaccagactcatatccaacttttctccttttcttgtaaatgaggcaaacacttgatgcaagggcttcgtacagaacagagtttcatgagatgctcgttgctcctcccatgaagtggataatacttccactcctaaaaagaaagattccatcaatctcattcagtgcagctgggggaatcggagcctggatcactgatattcaatctcattcagtgcagctgggggaatcggagcctggatcactgacattcaatctcactcagtgcagctgggggaatcggaacctggatcactgatattctggacccactggacccatacagcttttttttttggtctggactaaggctgccccttactggaccaatgcaatctagagactggggactggaatctaactgcgcagagaaatcaaagaccgatggtgtgaaatctggggcagcttcaaaatttctgcctcctaaaaacatttcacccaatttttcattattgcccatgtcacatttaactgaaacaggttcaccaaaaaatctctctctcagccagtctggaaggatttccatttagagactgctccgtagggaggagtaagtgtgtgctgacgtgtcatgtccatttgtcttcacagtgaaatgagtcttctggctccatccaccataactgacccatgactcagccttatcattaggtgtctttcctgaagcagggcccccagtgaaaacaaatcataggctgcgagaacactgctgaggtgggtgggcaaaggagaagggaaaatggggacaatcatgtttaccatttacaaagaggaaggaaaagactggtagaaacaagaatgttctatcttaccggtctgagtaatgtacagtatataaacagagaaagtgtctcaagaggtctacttcatggattctacctattttccctgtttcactcaaataaactgggatatgagaatttctgcactgaggcacccttcttaccttgacatgtcacggtgacgtcagtgggaagagttgctgtgaggtccttatacagcaatctagcacagaacgggaaggactgaccccctggatccagtttgtaagtaaatgacagcaagttacacagtgggtttctctgcaagggcccagtcaggagggctgcaaagtcactctaagaggggtgaggaacaaaacgaagtagaggatgactgcagttccaaaggtggtgtttactgacccttcaattacgtcaaccaaaaagaggcccatcgattacatttcagagaaataaatgagggacagaaaaaggtctgaaaaaaggactaatgaaaaagatgcctaagataactaagagtcactggcagcctggaaaggcctataggcctaaatggccaggggtacagcttcgcaagagactgtttctgcagaaacttcactgacgttacacggctaagatgcttcatgactgcatccacatttcaatttaagttaaatctacagctgagagcttcagagttactccaaatccatagagggggaaatgctaagcttgtaggaggcacttacagcctatttgcattaatttcctatctacttttttcacccaaccttagctcaactgcaacccaaaaaggtaggctagagtttaggggaagatggacagcattgttccatggcactgcagaaacctttcttctctaatgagatctatacccaaggttcagcaaggcactcggtatggtacatagtaggcacgccataaatccctgatggatcaaaagtatagcaactgcactctgtacaatcttacgataaaagcttgaagaccaccattcaggggtgcataatcctttaaccagtacccaggcttcaacgccatccagagtttcaaaagaaaagagggtgggatagtgcttttatataaataagaaacaagcatcggaaaggtaacggtcaaacttctaactcacagttaggaaacactgaaaatacaaaaaacatcccccttttaagttgatcttgggcccacggatgaggcatataacatcccagagagatacctgaagccggtctgcctggtacttcctcccagagtaagcattcaggtactcgcagagactgaacaggaagtgctggatgttggtctgtaaatattttgcagctatctcttccaggggaatgaagactgggactgaatggtgatgtatccggagtggtttctgtatgacaaggtccacaaaataggaatccaataggttcccctcaaaagcagtactgatgcagacacaaactcctcggctggtcagtttaccactgaggcctgaggcaaacaagaagacacctcaatagacagcaggccaaggtgatgtcttactcatctgtgcctccagtagcttccacagtgcctagaatatgtacactttgtacacaaatgtttgttcaatgagtatcataggctcattcttccccttggctccggctcactttgagactgagttgttaaaaccatggaagaatggtaaaaatgaaaaaacaacctaaatgtcaaactattgagaaatttttttttttttttttttgagatagggtttcactctgtcacccaggctggagtgcggtggcacgatctcagctcactgcaacctcaacttcctgggcttaaatgatcctcccatctcagcctcccaaacagctgggaccacaagcgcatgccacctcacctggctcatttttaaatttttagtagagatgaggtcttgctatgttgcccaggctggtctcgaactcctggactcaagtaatcctgcctcagcctcccaaagtgatgggattacaggcataagcaaggccaaaaatttaatttatagctattctttatttctgagtgtgaagtaatttgtcagagtccccagttcttcccacaactatcttgtggcatagatgggagaataaatccctatttacggtgaaacggagacttggaaagttcaaactatttcactagtggcagaaaacaagccagcagtaaagacagttctagtacaaggtctggcacatgacgaactgttaagatgagtggaataagccagccaccaactgagctgctgtacaaaggggccagtcaatcttgtaggtgaagataggcctacaaatagcacgtcagctgtgtgtgtgtctgtgtgtgtgtgtgtgtgtgagtgatgagggcagagggtgtaaaatactataaattatgaaataattccaggactgataacacatctagcaaactaactcactagaggcagacccagactaaattaggttaaaaaaacaaacaaaacctgtaaaatgatatgcctgcagaatggctttcacattttccaatttctcttccaatgcttcttgctcattgatctcc

SEQ ID NO: 839 - DNA, 545 bp, Homo sapiens
gggctccaaggcttacgctgctagctatggcccagcagaaggtaccaggctgacccgccctctgagaacaactatgcaagctggataaaataccaaaaagaaacaagcaagcaaagagagcaaatggtttgaaggcattccagaaggatccaaatagccaggattggagagtactgacaaatgctctgagctggcttccctgcagcctctggcctcagagcatttccttattcatatgcaaggcacactgggccacatagaaaggcataaactagactccgcagcagtctcatccggaacaaacactggacattaatggtatcaaagcagactttctacgggccaagattccatagaaacaggaactcaacgttctgcttgcaatcttccctcccggcatttgctaattcctaagctgcacaggtgtgactggggactgagaaaccaaacggaaagaagctgctaaaggggaaaaagccaagcagagattttgctagaacaaaatgtggatttcagggcctgccagggaacaggagccttaatag

SEQ ID NO: 840 - DNA, 3350 bp, Homo sapiens
tattaatatgacatttgtcattgtcactgatttttttaaaaaagcaatgcacatgttggttgtggctgttttccgcatgctatcttcatatctaaatgcttcattaattatccgagcctccggagaattaactctattacgtttgtatagtaagtttgtaaactgcttggcaaactgattaagaaataatttgcaataccgtgctactaaagtggcaggtttctggtagaaattgtgcgagtccaatttggagttttaagttccttgattgatgaaactaaaaaggcaattttggaaaaagagagggggaaaagtagatcacttatcttagcaaacggttgaaaatatgtctgtcctctgtggccccaaatccagtgaaagaaattctcccagtaaaagttgcttcctaactctgtttttctcagaatacctcttacctttctcaaagaaagcttcaaccaccatcatcagaaagaaggtggcctaaaaactgacacatggccagtgcccggaggggtctggaggcataagtctagatgcccagagagcatccaggcactgaactgctcagagcttgagatgaaatgacatacaagcttcagggtaaaactgtctactagcaagattacctccctcaattctaccattgcagatttcttctgaccccaaatgcaaccttacagagaatgctgaatgaggaaggccaattccttacaatgatggcagaacccccaagcgaatgccctattgaggagaaggacatcactgtatttggaattctgcctgctagtgatagctcacacatcacatcccagaatcccactcccaatgcattatttcctgaggcaagaacttaaggtcctcacctaattcctccatcacaaccattaactcttattggacaagctcctcctgtgagtagggcctgtactcacttcctcttagatcataattccatcttcaagagactgatttccagaatagtaatctttttccagcgttctctcttctccaatgccctggttgttatttttcccacctctcctaatattgatcttcttgtcttttggttagaactgcaacttcggagttgagttcatttcctattgctgctcaattcagtagcaacatagctggcttgttcccagacccaggaagtataagtcattgacagtttcctgagtggctctgccaatccataccacccttggtactgtgaaaaggcttcttggcagccaggtggcattgaggatggtattcagggcgctttccttctgtcatatagttgtgggatctctaccaagtgtgaaggtgaatgaggtaagggagatcagaaccatgcttcctggtttttcatacatccaaggaagaagtcctggtgtgggttgtttgacaccttctttccactttcaccttttattttttattccttcctttctacccccaaccagtcgagcaaatgagcaattttgtgtttctaatacaggatctggaagtagtgctttctaatcctcatttcctgtaggatgttcctgcactataacaagattatgttttcttccttctgcagcagctttctgcttcttgggtactactagctattgttcaattcaggtgaggcctgtgatgacatatatgtagcatgtgctctgcgctccctgcaagctgagcagatacaaccaatgcatcactgtatactcttgctgagaatgtggatgcagcctcacagatctttgcaacactccaaccagccaggaccagttgatcagaactgatcttattggtctgataaccaatcttatttgtgaactgattcatatctgtctttccactcttggttctcttgccgtagaacaaaaacagtttaggaagcataattacgaacatttaggaaccaatatgtataagtaattcggagactccaattcacctgcccctcccccatcccaggttgtggaggctcgaggaagctgacttcttaggctaaaggacaaaaaaatctctttacctccttggccattttcatgttctctgccaattactataggcagtcttcattttgcagaggtgaggtaagacttcatcttattcttcatgtaatcccaccttctaacaaaaaataaataaatatttaaattccaaggagaagtgttctttgtgtatttctagcagaaaacagatgcttaagcctaagaaggaagatccgtccatgacaaaggaaagtggaaaactgaaccagttatctgaatacttcatgccaggacagttgctattagcaactgttttgcaccttcagggctttaaaatgggctctgcagacagcatttgcatatgcaagactcagtagccaagcctccactgccaattgttgaaggcagtttcagatcgccaccttttgaggtacatttctttaagcacaagagaagtagaaatggcctttgccttgtctccagtggtttgtccctctggtgcctcagcagataccagagcttattcttatgaccatttggaagtagtcctcaaagtaaagatcaagaaaaaattggattctttttccattttctcataatagtagcctagtcaacacaagactcccataaaatatgactcactattgggagccatactattttataagcttacttcctgctgacaaaactagctttcctcaaggaaatataaaggaggggaaagtcacatagtgttaggaaaacattcctgtgttttgaatacgatgaatccataggatagagaaaaatctgcttgttctattctgagagttctctgagatatcccttcactctgcttggcatttggccattgatattcaacaggtcactgaccaagcttttctaaatttttcagagagagttacttaccagtaaggtctgttcttaaacctacctagttgattttcatatctttccataaagtgtcatgattctgtcatagaccctgacttaacattgtaaggactatgagtcctccattttttaattaatttttttttagcaaattaggacttcggcaggttttcctctcctaaactcattctttcctccacaggattgctttgtccatctcctgctttcatttcaagtgcataaacaaaacctcaaagggcctgggaaggtgaggcaggccagagtctgtgttctgtgttgagtgtcaagctatttgttaagaaggtctgcaacaggcctttggtgtgggctctgccagagactgttctgaacactttgcttgagatccgtgccctgtaaaatggatatgatgttttactgatgtctgtaatacatttgtaaacttccaataaaatttgaataaaagaaatgttgccattcttctca

SEQ ID NO: 841 - DNA, 3349 bp, Homo sapiens
tattaatatgacatttgtcattgtcactgatttttttaaaaaagcaatgcacatgttggttgtggctgttttccgcatgctatcttcatatctaaatgcttcattaattatccgagcctccggagaattaactctattacgtttgtatagtaagtttgtaaactgcttggcaaactgattaagaaataatttgcaataccgtgctactaaagtggcaggtttctggtagaaattgtgcgagtccaatttggagttttaagttccttgattgatgaaactaaaaaggcaattttggaaaaagagagggggaaaagtagatcacttatcttagcaaacggttgaaaatatgtctgtcctctgtggccccaaatccagtgaaagaaattctcccagtaaaagttgcttcctaactctgtttttctcagaatacctcttacctttctcaaagaaagcttcaaccaccatcatcagaaagaaggtggcctaaaaactgacacatggccagtgcccggaggggtctggaggcataagtctagatgcccagagagcatccaggcactgaactgctcagagcttgagatgaaatgacatacaagcttcagggtaaaactgtctactagcaagattacctccctcaattctaccattgcagatttcttctgaccccaaatgcaaccttacagagaatgctgaatgaggaaggccaattccttacaatgatggcagaacccccaagcgaatgccctattgaggagaaggacatcactgtatttggaattctgcctgctagtgatagctcacacatcacatcccagaatcccactcccaatgcattatttcctgaggcaagaacttaaggtcctcacctaattcctccatcacaaccattaactcttattggacaagctcctcctgtgagtggggcctgtactcacttcctcttagatcataattccatcttcaagagactgatttccagaatagtaatctttttccagcgttctctcttctccaatgccctggttgttatttttcccacctctcctaatattgatcttcttgtcttttggttagaactgcaacttcggagttgagttcatttcctattgctgctcaattcagtagcaacatagctggcttgttcccagacccaggaagtataagtcattgacagtttcctgagtggctctgccaatccataccacccttggtactgtgaaaaggcttcttggcagccaggtggcattgaggatggtattcagggcgctttccttctgtcatatagttgtgggatctctaccaagtgtgaaggtgaatgaggtaagggagatcagaaccatgcttcctggtttttcatacatccaaggaagaagtcctggtgtgggttgtttgacaccttctttccactttcaccttttattttttattccttcctttctacccccaaccagtcgagcaaatgagcaattttgtgtttctaatacaggatctggaagtagtgctttctaatcctcatttcctgtaggatgttcctgcactataacaagattatgttttcttccttctgcagcagctttctgcttcttgggtactactagctattgttcaattcaggtgaggcctgtgatgacatatatgtggcatgtgctctgcgctccctgcaagctgagcagatacaaccaatgcatcactgtatactcttgctgagaatgtggatgcagcctcacagatctttgcaacactccaaccagccaggaccagttgatcagaactgatcttattggtctgataaccaatcttatttgtgaactgattcatatctgtctttccactcttggttctcttgccgtagaacaaaaacagtttaggaagcataattacgaacatttaggaaccaatatgtataagtaattcggagactccaattcacctgcccctcccccatcccaggttgtggaggctcgaggaagctgacttcttaggctaaaggacaaaaaaatatctttacctccttggccattttcatgttctctgccaattactataggcagtcttcattttgcagaggtgaggtaagacttcatcttattcttcatgtaatcccaccttctaacaaaaaataaataaatatttaaattccaaggagaagtgttctttgtgtatttctagcagaaaacagatgcttaagcctaagaaggaagatccgtccatgacaaaggaaagtggaaaactgaaccagttatctgaatacttcatgccaggacagttgctattagcaactgttttgcaccttcagggctttaaaatgggctctgcagacagcattagcatatgcaagactcagtagccaagcctccactgccaattgttgaaggcagtttcagatcgccacctttgaggtacatttctttaagcacaagagaagtagaaatggcctttgccttgtctccagtggtttgtccctctggtgcctcagcagataccagagcttattcttatgaccatttggaagtagtcctcaaagtaaagatcaagaaaaaattggattctttttccattttctcataatagtagcctagtcaacacaagactcccataaaatatgactcactattgggagccatactattttataagcttacttcctgctgacaaaactagctttcctcaaggaaatataaaggaggggaaagtcacatagtgttaggaaaacattcctgtgttttgaatacgatgaatccataggatagagaaaaatctgcttgttctattctgagagttctctgagatatcccttcactctgcttggcatttggccattgatattcaacaggtcactgaccaagcttttctaaatttttcagagagagttacttaccaataaggtctgttcttaaacctacctagttgattttcatatctttccataaagtgtcatgattctatcatagaccctgacttaacattgtaaggactatgagtcctccattttttaattaatttttttttagcaaattaggacttcggcaggttttcctctcctaaactcattctttcctccacaggattgctttgtccatctcctgctttcatttcaagtgcataaacaaaacctcaaagggcctgggaaggtgaggcaggccagagtctgtgttctgtgttgagtgtcaagctatttgttaagaaggtctgcaacaggcctttggtgtgggctctgccagagactgttctgaacactttgcttgagatccgtgccctgtaaaatggatatgatgttttactgatgtctgtaatacatttgtaaacttccaataaaatttgaataaaagaaatgttgccattcttctca

SEQ ID NO: 842 - DNA, 6438 bp, Homo sapiens
tattaatatgacatttgtcattgtcactgatttttttaaaaaagcaatgcacatgttggttgtggctgttttccgcatgctatcttcatatctaaatgcttcattaattatccgagcctccggagaattaactctattacgtttgtatagtaagtttgtaaactgcttggcaaactgattaagaaataatttgcaataccgtgctactaaagtggcaggtttctggtagaaattgtgcgagtccaatttggagttttaagttccttgattgatgaaactaaaaaggcaattttggaaaaagagagggggaaaagtagatcacttatcttagcaaacggttgaaaatatgtctgtcctctgtggccccaaatccagtgaaagaaattctcccagtaaaagttgcttcctaactctgtttttctcagaatacctcttacctttctcaaagaaagcttcaaccaccatcatcagaaagaaggtggcctaaaactgacacatggccagtgcccggaggggtctggaggcataagtctagatgcccagagagcatccaggcactgaactgctcagagcttgagatgaaatgacatacaagcttcagggtaaaactgtctactagcaagattacctccctcaattctaccattgcagatttcttctgaccccaaatgcaaccttacagagaatgctgaatgaggaaggccaattccttacaatgatggcagaacccccaagcgaatgccctattgaggagaaggacatcactgtatttggaattctgcctgctagtgatagctcacacatcacatcccagaatcccactcccaatgcattatttcctgaggcaagaacttaaggtcctcacctaattcctccatcacaaccattaactcttattggacaagctcctcctgtgagtagggcctgtactcacttcctcttagatcataattccatcttcaagagactgatttccagaatagtaatctttttccagcgttctctcttctccaatgccctggttgttatttttcccacctctcctaatattgatcttcttgtcttttggttagaactgcaacttcggagttgagttcatttcctattgctgctcaattcagtagcaacatagctggcttgttcccagacccaggaagtataagtcattgacagtttcctgagtggctctgccaatccataccacccttggtactgtgaaaaggcttcttggcagccaggtggcattgaggatggtattcagggcgctttccttctgtcatatagttgtgggatctctaccaagtgtgaaggtgaatgaggtaagggagatcagaaccatgcttcctggtttttcatacatccaaggaagaagtcctggtgtgggttgtttgacaccttcttttcccactttcaccttttattttttattccttcctttctacccccaaccagtcgagcaaatgagcaattttgtgtttctaatacaggatctggaagtagtgctttctaatcctcatttcctgtaggatgttcctgcactataacaagattatgttttcttccttctgcagcagctttctgcttcttgggtactactagctattgttcaattcaggtgaggcctgtgatgacatatatgtagcatgtgctctgcgctccctgcaagctgagcagatacattcaatgcatcactgtatactcttgctgagaatgtggatgcagcctcacagatctttgcaacactccaaccagccaggaccagttgatcagaactgatcttattggtctgataaccaatcttatttgtgaactgattcatatctgtctttccactcttggttctcttgccgtagaacaaaaacagtttaggaagcataattacgaacatttaggaaccaatatgtataagtaattcggagactccaattcacctgcccctcccccatcccaggttgtggaggctcgaggaagctgacttcttaggctaaaggacaaaaaaatctctttacctccttggccattttcatgttctctgccaattactataggcagtcttcattttgcagaggtgaggtaagacttcatcttattcttcatgtaatcccaccttctaacaaaaaataaataaatatttaaattccaaggagaagtgttctttgtgtatttctagcagaaaacagatgcttaagcctaagaaggaagatccgtccatgacaaaggaaagtggaaaactgaaccagttatctgaatacttcatgccaggacagttgctattagcaactgttttgcaccttcagggctttaaaatgggctctgcagacagcatttgcatatgcaagactcagtagccaagcctccactgccaattgttgaaggcagtttcagatcgccaccttttgaggtacatttctttaagcacaagagaagtagaaatggcctttgccttgtctccagtggtttgtccctctggtgcctcagcagataccagagcttattcttatgaccatttggaagtagtcctcaaagtaaagatcaagaaaaaattggattctttttccattttctcataatagtagcctagtcaacacaagactcccataaaatatgactcactattgggagccatactattttataagcttacttcctgctgacaaaactagctttcctcaaggaaatataaaggaggggaaagtcacatagtgttaggaaaacattcctgtgttttgaatacgatgaatccataggatagagaaaaatctgcttgttctattctgagagttctctgagatatcccttcactctgcttggcatttggccattgatattcaacaggtcactgaccaagcttttctaaatttttcagagagagttacttaccagtaaggtctgttcttaaacctacctagttgattttcatatctttccataaagtgtcatgattctgtcatagaccctgacttaacattgtaaggactatgagtcctccattttttaattaatttttttttagcaaattaggacttcggcaggttttcctctcctaaactcattctttcctccacaggattgctttgtccatctcctgctttcatttcaagtgcataaacaaaacctcaaagggcctgggaaggtgaggcaggccagagtctgtgttctgtgttgagtgtcaagctatttgttaagaaggtctgcaacaggcctttggtgtgggctctgccagagactgttctgaacactttgcttgagatccgtgccctgtaaaatggatatgatgttttactgatgtctgtaatacatttgtaaacttccaataaaatttgaataaaagaaatgttgccattcttctcagccctccctcactttccagattttaggggtggtctctgcctttgagcatttcaacaaagaaaagaaaggacacaggtatggagggatgagttttactatgaaatattaacctgattgtttaaatcagggtttctaagcctcagcaatattgacgtcttgtgctagttaattctcggttgcagagggctgtcctgtgcattgtaggatgtttagcaacatcgctgacttctactcactagatgccagtagcagcccccagaaactgtgacaactaaaaatgtctcccatcacaaccattaggatggcagttattaaaaataacaacaaatgtgggtgaggatgtggagcaattggaacacttgtacactgttggtgggaatgtaaaatgatgtagtgctgtggaaaacagtatggcagttcctcaaaaaaaattaaaaatagaattactaccatatgctacttctgggctatacccaaaagaattgacagcagggtctccaaagagatacttgtacacccatattcataaaagcagcattcacaatatccaaaaagtgggagcaacccaaatgtccactgatggatgaatgtgtaaacaaggtgtggtgtatacatacaatggaatattattcagccttaaaacggaaggaaattctgacacatgctacaacatggatgaaccttgaggacattttgctaagtgagataagccagtcacaaaaagacaagtgtatgattccatttatctgaggcacctagagtcaaattcatagagacagaatgtagaagagtggttggttgtcagggactgaagggaggagggaatggggagttactatttaatgggtatagagtttcattatggcaagatgaaaagagttctggagacgggttgcagaacaatgcagatgaacttaatactactgaactgtacacttaaaagtggttaagatggtaaattttatattatgtttatttaaccacaattaaaaatgtctccacacattgtcaatgtctccctgttgagaaccactggtttcaatgcattgccttcttagtgtctttgttccttgagaattcttgaaactgattcctacccaggccacacagttaattttcagttattagcaagaattgaaagcagcagatgacccaaaaatatttgtgtttgcttttaagcaaataataagtggtctgtctggagaattacatccatgtctgtgttctggttagggcagcattaacactgactgggagccaggaccaaggcagcatgtaaattcaatttccccgtgtctgatccacaacattagggacttgctggatgctataatatcatctattcattcattcaacaaatatttatcaaaaggctttctctagccaggaaccgttctaggtgcttggaatacaataatgtgcaaaacaaacaaaaatccctaccttaaaggagtttacaaactttactttcaactaggcaagacattcggaatagtaagtagtcttacccaccctagctaatcacaaggacttgggagtggcagacaacaagagttgtttcattgtaagacattctaagagcttttgaataaaaacttgaactggaaatggcaattgtgcctgttctgcttacagacatgccatagagcatggcctgcaggcaaccatggtttttaatatacagcctccctgtttcccctcttcagccaaaatgattgtagtcaggtatagcaccctaccagcaatcttataagcatgataagctggacttatcagattcgctctctcaagaatacaggctgggcacagtggttcatgtctataatcccagcactttgggaggctgaggtgggaggatcacttgaggccaggagttcaagaccagcctgagcaacatagcaagacccgcccccgcccccatcgcctccgtctctatggaaaaagaacaaaaacaaaaaccagtagctggcataatggtgcaaacctgtagtcccaggtactgaggaggctgaagcaggaagataacttgaggccgcaatgacttatgactgtgccactgcactccagtttgggtgacacagtaagagactttgtctctaataagattaaataagattataaaccaagaaattctgagagaatgaggcagctggcagtgggagtggaagctaagagaatgtatggggaggaaccaggaggtggagtccagcacaggagcaacaaggtaagaggaaggatgaggaagcagatgcaacaaataagcaaaagtctaggctgagagcagatctaagagcaaagacaagagatcagaatggacccagaggagctggtcctcaggacttcctcacctccaaacagatcctagttcctgccctggaggtacccctctagggttaccatttgattttggtccttcacatacccctccccactgtgcctatgtattgtgacaatacatacctatgtaacctctttgggctcaagagttccttgcaatcccaattaaaacatatgaaggatcccatatgcactaaatgccagttgtgcaccttttattttggccccatgttcctttaacattttaaatgtcatctcagccacttgctacttgttgatcttgggaaatgtccatatcctctttgagcctcagttcttaatctattaaatgagataataacagaagagtcattattgggttattgtgtggatgtactggaataatacgtgtaaagctcttagtgctacctgtcattataaaagctcaggccgggcgcggtggctcacgcctgtaatcccagcactttgggaggccgaggcgggcggatcacgaggtcaggagatcgagaccatcctggctaacacggtgaaaccccgtctctaataaaaatacaaaaaattagccgggcgtggtggcgggcgcctgtagtcccagctactcgggaggctgaggcaggagaatggcgtgaacccgggaggcggagcttgcagtgagccgagatggtgccactgcactccagcctgggcagcagaacgagactccgtctcaagaagaaaaaaaaaaaaaaaaaaaaaaaaaaaaaaaaaaag

SEQ ID NO: 843 - DNA, 941 bp, Homo sapiens
ttttttctatacaaatttgttacatgtcagtgagacctttttcaaaggaacatattcaatttggctttttgtggctgaaaaaacataactgttagacccaaagcattttatgctccgttccatcttaaggagccatccttaagtctgctcccaccctcagtagaatttattttctacaaagtggtagtaatttttttttaaattgcaaatgtaatttttgccaattagagaaaccaaccggtgtcagtaaaattctgtgagaaatgccatccctgctgggaatgttgaagttacttaatgttgatctatcccttggggaaagtaaaagtgactgtgagtggtgccattgtgtgatgtcagcatgacgttgttttgaatgtggcattatgttctggtgctcatgtttcctggattgtattatctgctttcctttaccaaggcagacagaactgctgccttagcctgacaaccggttgtcctcaaagcaaatgaacttaagcatttgggattgagggacagaaggattctgagggggctctgcgagggacggtgtgtgacatgtcatgcctggagaaggaacaaggctatttgaaaacagaaggcaggtcaagggtagaagttaaaggagaatctgaaggcaggtcagggaaaagaagaactggaaatgaaacagaggacaggtgacaaccacctcgaagagctcccagagattgtagaaagagtccagtgtaaccagcttagtaaccagagtatctggattacccaggaaggttgagctgctgagatttcagtggtgcaatgtctttaaaaaaacaggctttgttgggagggtatttccattttgaactttgaggactgttggtcagaaaatgggctcaaaagtgagtttgcttaatgaagacatttaacggttgtgctgtttatagtaaaataaaactccc

SEQ ID NO: 844 - DNA, 432 bp, Homo sapiens
agcaaataataagtggtctgtctggagaattacatccatgtctgtgttctggttagggcagcattaacactgactgggagccaggaccaaggcagcatgtaaattcaatttccccgtgtctgatccacaacattagggacttgctggatgctataatatcatctattcattcattcaacaaatatttatcaaaagggctttctctagccaggaaccgttctaggtgcttggaatacaataatgtgcaaaacaaacaaaaatccctaccttaaaggagtttacaaactttactttcaactaggcaagacattcggaatagtaagtagtcttacccaccctaactaatcacaaggacttgggagtggcagacaacaagagttgtttcattgtaagacattctaagagcttttgaataaaaacttgaactggaaa

SEQ ID NO: 845 - DNA, 941 bp, Homo sapiens
ttttttctatacaaatttgttacatgtcagtgagacctttttcaaaggaacatattcaatttggctttttgtggctgaaaaaacataactgttagacccaaagcattttatgctccgttccctcttaaggagccatccttaagtctgctcccaccctcagtagaatttattttctacaaagtggtagtaatttttttttaaattgcaaatgtaatttttgccaattagagaaaccaaccggtgtcagtaaaattctgtgagaaatgccatccctgctgggaatgttgaagttacttaatgttgatctatcccttggggaaagtaaaagtgactgtgagtggtgccattgtgtgatgtcagcatgacgttgttttgaatgtggcattatgttctggtgctcatgtttcctggattgtattatctgctttcctttaccaaggcagacagaactgctgccttagcctgacaaccggttgtcctcaaagcaaatgaacttaagcatttgggattgagggacagaaggattctgagggggctctgcgagggacggtgtgtgacatgtcatgcctggagaaggaacaaggctatttgaaaacagaaggcaggtcaagggtagaagttaaaggagaatctgaaggcaggtcagggaaaagaagaactggaaatgaaacagaggacaggtgacaaccacctcgaagagctcccagagattgtagaaagagtccagtgtaaccagcttagtaaccagagtatctggattacccaggaaggttgagctgctgagatttcagtggtgcaatgtctttaaaaaaacaggctttgttgggagggtatttccattttgaactttgaggactgttggtcagaaaatgggctcaaaagtgagtttgcttaatgaagacatttaacggttgtgctgtttatagtaaaataaaactccc

SEQ ID NO: 846 - DNA, 780 bp, Homo sapiens
ctttcaagacaatggatgtggatatggccgaggaacatgccagggcccagatgagggctagatgaatatcggggatgaagcgctgattggacggtggagctgggatgacatacaagtcgagctcctgacctgggatgaggacggagattttggcgatgcctgggccaggatcccctttgctttctgggccagataccatcagtacattctgaatagcaaccgtgccaacaggagggccacgtggagagctggcgtcacgagtggcaccaatggaggggccagcaccagcgtcctagatggccccagcaccagctccaccatccggaccagaaatgctgccagagctggcgccacgttcttctcctggatccagtaagagtttcggtagagaaatgagactctgcaggagggctgcggaggggggtgagatgtcagagggagggccggggtgggggcgctgggggcaacggcaacagcatggacggacacttattttgttacgtacacccctccctggttcgcgtgtgtccacggatgttgtcactttggtttcttgtgcttttataggcaccgttgacgaactgcagcgatcttactggccaagccagagcgcctcctctcagattccttctcgacacagcaccctaggcggcttcttcctgtcagtcggaggtggcatgcaagatgaagctctctttgctcttcctgctttcattttgtgcttttccttgtgttttcatgttttgggtatcagtgttacattaaagttgcaaaattaat

SEQ ID NO: 847 - DNA, 1262 bp, Homo sapiens
  misc_feature (395)..(395): n equals a,t,g, or c
gtacctggaatacaagaagatccccaacagcaacccacctgagtatgaattcctctggggcctgcgagccgccatgagaccagcaagatgagggtcctgagattcatcgcccaggtaagggagcgcctctgttgggtgcccggcacgggggtggtgctctccacaccttgcttgtttcttggtcgaggcctccttcccattaccccgtattccagtgagggtacaaacactcacagaggcacctgagcaccctacacaaggtcacagatggggcaaaatcccaggtctggcacaggagagtaggagccccaatccctgtggtcctgatttttgccatcattgcacaaagcacacgggagggggtgaggcgggcgcgggtgctcagccagtgtggngtagctctgtgtctatgcctgccctttttctcctcagaatcagaaccgagacccccgggaatggaaggctcatttcttggaggctgtggatgatgctttcaagacaatggatgtggatatggccgaggaacatgccagggcccagatgagggccagatgaatatcggggatgaagcgctgattggacggtggagctgggatgacatacaagtcgagctcctgacctgggatgaggacggagattttggcgatgcctgggccaggatcccctttgctttctgggccagataccatcagtacattctgaatagcaaccgtgccaacaggagggccacgtggagagctggcgtcagcagtggcaccaatggaggggccagcaccagcgtcctagatggccccagcaccagctccaccatccggaccagaaatgctgccagagctggcgccagcttcttctcctggatccagtaagagtttcggtagagaaatgagactctgcaggagggctgcggaggggggtgagatgtcagagggagggccggggtgggggcgctgggggcaacggcaacagcatggacggacacttattttgttacgtacacccctccctggttcgcgtgtgtccacggatgttgtcactttggtttcttgtgcttttataggcaccgttgacgaactgcagcgatcttactgggcaagccagagcgcctcctctcagattccttctcgacacagcaccctaggcggcttcttcctgtcagtcggaggtggcatgcaagatgaagctctctttgctcttcctgctttcattttgtgcttttccttgtgttttcatgttttgggtatcagtgttacattaaagttgca

SEQ ID NO: 848 - DNA, 1568 bp, Homo sapiens
acagaggctagtagcacagagctgacttcacccagagtgatgggcaggcacctctgtggactggggcactcccctccagccaccagtcaccatcactgcagagactcatgcggtggcaaaggctgcttccccctccttcttactgacccccaccatccttcctttatgtgtctttaaaaaaatcccaacagcacacaatgcttcttattcctttttcttctctccatccctccatcactgccctagttcaagctcctccccttcctgcctgggctgttgcagggctttctctcccagtctttctgcttctggccctatctgtctccatccttgctacacacagctactgggaggatcattccaaaacacaaatctgagagagtcttcccttgccctcagcataaagactagactccagccaggcctaggaagccctgctcaagccagagtccacctacctgggccctctctcctatttcccattctgctactctgcttaacacacatggaatttatgccaaactacttggtgctctcaaaacatgccatggtgtcttttgcctctgtgtcttcacatattgtgtgtctctgcctgaaatgcttttccccgccttgataacctggtgaacttccagtcattccttgctgatgcagacagatgggtgagtgactgtacaccttcctctcccttgctaccttccatcagagaggctgggaagcaaaccgtccacttccccagcctcccttgcagtgaggggtgcccacatgagagacattgtctggcaccagcccttccccactgctttctgtcttgaacccagatgtgatgcctggtgcagctgcagccatctcatgaccatgtcgcaacaaacaccacacgacccaagtgacaagatgaacagtgcctggatgcctgatgacacggttcagctgccaggccaaccccaagcagccaacctctggaattctcaggagataattaaacattgataagactgaagacactgtgaatcaaattgcctgtcacttgcaactaaaagcactcctgattgacactgggcctcacctcaagcactcactactcactgaagtccttctggatccctgctcctagtacaccttgcacaagcccatctcagcacttgtcctgttcactatattagatttgctcattgtctccctcccccattatactgagaccttttagaggaaagagactgagtctttccactttaatctttagtacctagcccagcccctagcacacagcaagtcttcagtaggtagatttgtagaatataggtctattttccagccttatattgtaattttatacttacagtatttttattacaagctgcctccattccttattttaaaaaggcaagagaaacctagatgtccatcaataatggactggataaagaaaatgtattatggccgggtacagtggttcacatctgtaatactagcactttaggaagctgaggcaggaggattgtttgagcgcaggagttcaagacaagcctgggcagcacagtgagaacctatctctacaaaaaaaaaaa

SEQ ID NO: 849 - DNA, 1569 bp, Homo sapiens
acagaggctagtagcacagagctgacttcacccagagtgatgggcaggcacctctgtggactggggcactcccctccagccaccagtcaccatcactgcagagactcatgcggtggcaaaggctgcttccccctccttcttactgacccccaccatccttcctttatgtgtctttaaaaaaatcccaacagcacacaatgcttcttattcctttttcttctctccatccctccatcactgccctagttcaagctcctccccttcctgcctgggctgttgcagggctttctctcccagtctttctgcttctggccctatctgtctccgtccttgctacacacagctactgggaggatcattccaaaacacaaatctgagagagtcttcccttgccctcaacataaagactagactccagccaggcctaggaagccctgctcaagccagagtccacctacctgggccctctctcctatttcccattctgctactctgcttaacacacatggaatttatgccaaactacttggtgctctcaaaacatgccatggtgtcttttgcctctgtgtcttcacatattgtgtgtctctgcctgaaatgcttttccccgccttgataacctggtgaacttccagtcattccttgctgatgcagacagatgggtgagtgactgtacaccttcctctcccttgctaccttccatcagagaggctgggaagcaaaccctctacttccccagcctcccttgcagtgaggggtgcccacatgagagacattgtctggcaccagcccttccccactgctttctgtcttgaacccagatgtgatgcctggtgcagctgcagccatctcatgaccatgtcacaacaaacaccacaccacccaagtgacaagatgaacagtgcctggatgcctgatgacatggttcagctgccaggccaaccccaagcagccaacctccggaattctcatgagataattaaacattgttaagactgaagacactgtgaatcaaattgcctgtcacttgcaactaaaagcactcctgattgacactgggcctcacctcaagcacccactactcactgaagtccttctggatccctgctcctagtacaccttgcacaagcccatctcagcacttgtcctgttcactatattagatttgctcattgtctccctcccccattatactgagaccttttagaggaaagagactgagtctttccactttaatctttagtacctagcccagcccctagcacacagcaagtctttagtaggtagatttgtagaatataggtctattttccagccttatattgtaattttatacttacagtatttttattacaagctgcctccattccttattttaaaaaggccaagagaaacctagatgtccatcaataatggactggataaagaaaatgtattatggccgggtacagtggttcacatctgtaatactagcactttaggaagctgaggcaggaggattgtttgagcgcaggagttcaagacaagcctgggcagcacagtgagaccctatctctaccaaaaaaaaaa

SEQ ID NO: 850 - DNA, 1569 bp, Homo sapiens
  misc_feature (1558)..(1558): n equals a,t,g, or c
acagaggctagtagcacagagctgacttcacccagagtgatgggcaggcacctctgtggactggggcactcccctccagccaccagtcaccatcactgcagagactcatgcggtggcaaaggctgcttccccctccttcttactgacccccaccatccttcctttatgtgtctttaaaaaaatcccaacagcacacaatgcttcttattcctttttcttctctccatccctccatcactgccctagttcaagctcctccccttcctgcctgggctgttgcagggctttctctcccagtctttctgcttctggccctatctgtctccgtccttgctacacacagctactgggaggatcattccaaaacacaaatctgagagagtcttcccttgccctcaacataaagactagactccagccaggcctaggaagccctgctcaagccagagtccacctacctgggccctctctcctatttcccattctgctactctgcttaacacacatggaatttatgccaaactacttggtgctctcaaaacatgccatggtgtcttttgcctctgtgtcttcacatattgtgtgtctctgcctgaaatgcttttccccgccttgataacctggtgaacttccagtcattccttgctgatgcagacagatgggtgagtgactgtacaccttcctctcccttgctaccttccatcagagaggctgggaagcaaaccctctacttccccagcctcccttgcagtgaggggtgcccacatgagagacattgtctggcaccagcccttccccactgctttctgtcttgaacccagatgtgatgcctggtgcagctgcagccatctcatgaccatgtcacaacaaacaccacaccacccaagtgacaagatgaacagtgcctggatgcctgatgacatggttcagctgccaggccaaccccaagcagccaacctccggaattctcatgagataattaaacattgttaagactgaagacactgtgaatcaaattgcctgtcacttgcaactaaaagcactcctgattgacactgggcctcacctcaagcacccactactcactgaagtccttctggatccctgctcctagtacaccttgcacaagcccatctcagcacttgtcctgttcactatattagatttgctcattgtctccctcccccattatactgagaccttttagaggaaagagactgagtctttccactttaatctttagtacctagcccagcccctagcacacagcaagtctttagtaggtagatttgtagaatataggtctattttccagccttatattgtaattttatacttacagtatttttattacaagctgcctccattccttattttaaaaaggccaagagaaacctagatgtccatcaataatggactggataaagaaaatgtattatggccgggtacagtggttcacatctgtaatactagcactttaggaagctgaggcaggaggattgtttgagcgcaggagttcaagacaagcctgggcagcacagtgagaccctatctctancaaagaaaaaa

SEQ ID NO: 851 - DNA, 438 bp, Homo sapiens
tttggccaggcatggtggctcacacctgtaatcctagcattttgggaggtcaaggtaggtggatcacttgaggtcaggagtccgaaaccagcttggccaacatggtgaaacccccatctctactaaaaatattttcaaaaattagccaactgtggtggcaggtgcctgtaatcccagctattctggaggctgaggcaagagaatcacttcaactcaggaggcagaggttgcagtgagcaccattgcactgtagcctaggcaacaagagtgaaactctgtctcaaaaacaaaaaaagtttttaaaattaaccaggtgtagtggcacatgcctgtggtcccaggtactcaggaggctgagatgggaggattgcttgagcacaggaggtcgaagctgcagtgagctgtgatcatgccactgcactccagcctgggcaatgg

SEQ ID NO: 852 - DNA, 375 bp, Homo sapiens
tgaaggcaggggtcatgtttggcatctgtcaccctttgcgagttgcaacctggagaccctggagggtgttatgatgagtgaaataacctaatcacaaaaggactaatactccacaaattcacttatatgaggagtctaggagtcaaattcctagagactgaaagaacggtggttgtcaggggctggggagaatggggagttcatatttaatggggacagagtttcagttttgccagatgagaataacctggaaatggatggtgtgatgtttgcacaatgtgaacgtactttactccactatacatttgaaagtgagtgcaatggaaaagtttatgtgatgagttttttaccacaattaaaaatataacaaaataa

SEQ ID NO: 853 - DNA, 438 bp, Homo sapiens
tttggccaggcatggtggctcacacctgtaatcctagcattttgggaggtcaaggtaggtggatcacttgaggtcaggagtccgaaaccagcctggccaacatggtgaaacccccatctctactaaaaatattttcaaaaattagccaactgtggtggcaggtgcctgtaatcccagctattctggaggctgaggcaagagaatcacttcaactcgggaggcagaggttgcagtgagcaccatcgcactgtagcctaggcaacaagagtgaaactctctctcaaaaacaaaaaaagtttttaaaattaaccaggtgtggtggcacatgcctgtggtcccaggtactcaggaggctgagatgggaggattgcttgagcacaggaggtcgaagctgcagtgagctatggtcatgccactgcactccagcctgggcaatgg

SEQ ID NO: 854 - DNA, 375 bp, Homo sapiens
tgaaggcaggggtcatgtttggcgtctgtcaccctttgcgagttgcaacctggagaccctggaggatgttatgatgagtgaaataacctaatcacaaaaggactaatactccacaaattcacttatatgaggagtctaggagtcaaattcctagagactgaaagaacggtggttgtcaggggctggggagaatggggagttcatatttaatgggggcagagtttcagttttgccagacaagaataacctggaaatggatggtgtgatgtttgcacaatgtgaacgtactttactccactatacacttgaaagtgggtgcaatgggaaagtttatttgatgagttttttaccacaattaaaaatataacaaaataa

SEQ ID NO: 855 - DNA, 24079 bp, Homo sapiens
ggagatttaacatgagaatgctcgtccctggaaggcctgtaaaagatgctaccccaccaccggtgcctgcagaaagaccatcttacaaagaaaaatttattcctcccgaacttagtatgtgggattattttgttgcaaaggtaaggagtgtgaggaatgcaagctttaagagaagtctatcatctattttattaactcttgcatgtgtctcacataggaatgatggggtagcttttggattgaatcaccatagtttagacgtttaatttattaagtccagaaactgaatagtcatagtaaattcgaggatgatcagttacctgatgatgtaggagacaaattaaaatcacatgggagttatgtataaattagaagtcagcttattacataatcagcaccatctttttcgagtgactggaatacttgtatctaccacctagacacccctcttctaattatcagtggctcccttggtaagcatggaattagaatagaaggagatggatggacatttggcggttttatcaggccatgatgaggccccatgatacatctctgttttcccagcgcaaaggaaacttctcaggggatcagaatactcatggtgactagatctggtatagccccatttcataccatgctgggtgcatgctaatgtttgcttttctgcactttgctcttttgagctcatgattctccttctgttggtatgtttccctctttacatgtgttaactctgttgttaccttgctgtgcatacacatgagggaatacatctccagagtcatgcctcttcccatttttagatttttattagatctcagagttattgaggcgctgatcccgctccgtttttttgtatgctaagctgatccttaaaaagtctttcaacatgagtttggaagctttgttttgttatctaaagactctgaggccaggtgcagtggctcatacctgtaacctcagcactttgggaggttgaggtggaaggattgcttacatccaggagtttgagaccagcctggacaacatagaccatgtctctgccaaaaaaattttaaaacgtaggtgcagtgctgtttgcctgtagttctagctgcttgaaaggctgaggtgagaggattgcttgagtccaggaggtcagcgtggcagtgagccatgattgtgccactgcacaccagcctgggtgtcggactgagacagtgtctcaaaaaaaaagactttggttacgtcagtggttctcaaagtgtggtctcagaaccggcagcatcggcattccttgggaacttgtttgaaatgcagattcttgggtcttccctcagacccctcaatcagaaactctgggagtgagaaccaacaatctatgtcttaacaagctctccagatggttctaatgtgtgctgaagtttgagaactatgagcttaggcacattgtgagtgcagatttccaggtttacactctatcagggtccgagttatacttccagagtcattctggcctatcccttaaggctgccaattgagttgcacttagttgtatttagctaataaaccagggaaataataaagtactcttaaaaatgtataggcagttcccactcctacctttttaaaatttttatttgccacgaatgaaagctcattgcatcattaatgtgagtgataacaacattaagatttgtaaatggtaatgtgctaaatttttgtttttcaaaaatgtttcctcctgatatatgttctgaaaatttggaaaatgcaaaatattataaagaagggaaatagcactcatctgtgcaacaaagataactgttaccattgtggccaatttactattaatcttttttcctcagattaaaaaaatgtataattggatcagtatatgtagttttttttctgttaacattaacaaggtaaacagtttttatgccattaaaaacttatatagctgtcattttaaaaacttcagtgtagaaaacttccaacatacacaaaaggagagataatagcatatgaatcttttatctaccatcatgtagcttcaaaaattatctactcatggacagtcttgtttcatttatacctctccccactactttgtttggaagcaaatccaaacatcatgaaatttcattcaaaaatatttcattatttatttttgaaaaaaaaaaaggattttaaatagatctacattagtgttacacccacagaagcacacccacaattctttaatattatcacatattcagacagtattcacatttcaccagttgcatcttaaatgtttttatatagttgatttgttcaaatcaggatctaaaatatgattcataccttgcaagtggttgctatatcttcagtctcttttaatctataggctccacctctctctctctctctctctctttttttaacttaactcccacctttttcgtttgccctgaaagaattttgacctttagaatttttcaatggattttgctgatggcatcaccatattttgttcctctgaatcttgtcaagtgaaaattaaatccaatttcattctgattggataggaagagggagtacaggattaacttcataggtggttttgtatatttctgtcaggaagctttttatgattttagttgatctttgcctacatttattatttcagtgaaagttttaaattatgataatataatcctgtcattcatttttcatgtatttgctggaatgtctcttcatcaacctattcaattaccctgaagtacattttgagtcggaaagacaggataaatgctttattcttttgcttttgtgtaccagttttcaaaatgatgagttggttcccaagcatccttcagaggaggccagtgagttttgttttgctttcagctttgttatgaacttatagatttaaacatattttatatgttttaatctattgcagttatttttttctcatggggactcagattatccatctttgccagtgagagcctcttccacaattggctccgaatctttttgagattattccactagtgtttgagtttgcctgctttctagttttattctaggctaatcatgtatatttcctgcccgtgactgagaacaatcacttttttgaaataacctggttcctttttgtgagaaattatatttagaaactacagacagatgctggggtgctcgctcttacttggttgatcattgtttctagataagcatcaattatagtgaccatgtaacttttcactttgttagtgatttgatgtttaaaatgccaagaatagtatcttttaaaatatgtcttgttcatgagcagattatttccttaagaagtactaggtcaggcccggcatggtggctcacgcctgtaatcccagcactttgggaggccaaggtgggcagatcatgaggtcaggagattgggaccatcctggctaacacggtgaaaccccgtctctactaaaaatacaaaaaattagccgggcgtggtggcaggtgcctgtagtcccagctactcgggaggctgaggcaggagaatggcgtgaacccgggaggcggagcttgcagtgagccaagatcgtgccactgcgctctagcctgggcaacagagtgagactccgtctcaaaaaaaaaaaaaaagaagtactaggtccaaggctataaacttaaataaggcttttaatacatattgccagattattttccacattactaatttgtactctcttgagaatagtgagaggatgcatctaactttacccccttattagcattaagtattcctttttcatttttgttaatttgatagattaaatgatttttattttctgttagtgacattaaaattttaatgatcttattgccatttgattttccagtttgaggtattgactgttcatattcttacctaaattatctgttgagattatggtatttttcctttttctggatactttatctagagatattattaatttatcttgttaagctttttctagtttatttgctttaaaattttgtttattatgcatttgaagttttaaaaagtttatcatgcacagaaattttaaaaagtttaaaaattagatctatccatacatttccttattgattacattgtttttcagcagaagtcttttccactaataaatgtgtacatttattttaccttccttctctgtttcctcctgttctttttctttctcctcctccttaacttttaattctcttatttatctagaataaagtgaggaacagactggatcagacttcatctcccattcccacacttagctaactagttgttccattattatttattaaataatctttctttttctcccactgacttaagatgttacctttgtcagattaacttcttatacgtgtatgatttttgtattatatttttgcatcaatctagactacatttttcttacttagtttaatatccactaaaaaaaatgggattttttttatttaaaaaaaattccccagctaatctcatctattttttcttctctacgaacttcagaatcattttaaagttccaaaacaggaagagaaattcacagggagatttttattgaaattacttaaagcctgtgtaaattaacttataaagaattacagtttttacacatttcagtccttcccttcatataattttataaagatttataatttccttcacaatagctctctcacagctttcatagtttgtccttttgtatttctttagacttttctaactatttattgctgatctataagaagaaaactattgattaaaaaaaatttcacatctagctattcagttattgaatatgagagttttaccttgtcatcttgacttttgtagatgtagcattatctgcaaaagaaaatttttacttatgctgacaccatttaaaatgtttacttttatgttagaacaaaaataattatatactaaaaatattttctatattaaatatataatacatgttatataaaatatattttatatgtttatgaaattataatctttaaaaaaataattttaccttttattgcagccatttcttcctttgtctgatagtggtgttatatatgattctgatgaaagcattcatagtgatgaagaagatgatgcctttttttcagatacacaaatacaggagcaccaagatccaaattcctataggtaaataagacttttctttctctcattttttttttggcttttctttttgtagaaaatatcaatgttattaattttaaataacattattatcctgaatttatataagaaatgacttatgtttccaggttacaaattctacacctttgaggtcaatgtctacatagtgttttctccacctccaaagactagcttttatggagagtgcaaacacaagcatctttagtgaggaaaaaatatgtaactcatggatatactattagagtttaatatataaattattggtatactattaggtttcatgtgactatgtggttaatctttttccacgaggtaattttcagcaagtgtaatatagtattgcaagttttttgtattcagtgaccacagaggtgccatttttgcatagtaaatttcaatgacagctttttttctgggttggagagtgggctaaacagttggcagggaacaccactctgtttctcccatgattttatttttcacttaaagactctttttgcccctccttgaacagctgggctcttctacatttgacaatggttaaactagcacttcacaatgtcaagaatttctttcctattgctggactggaattctctggtgagtttggaatttaaaaattaatgttattaagtataataaattgccgtcaagtttctctttacaaaatctatatataaggtcatttggtacttaaaaaatagtgcattagatattttataaagtcttgtttattttaggctccaatctgtgactttatttttatttttttagatagagtctcgctctgttgcccagactgtagtgcagtggtgtgatcagagctcactgcaaactccgcctcgtaggctcaagccatcctcccacctcagtctcctgagtagctgggactatagatgtgctaccatgctgggctaatttttgtattttttgtaagagacaaagttacatcatgttacccaggctggtcttgaactcctgggctcaaacgatccacctgccttggcctcctaaagtgctgagattacaagtgtgagccaccacacctggcttcagtctaatactttagtttatatcaagaatcactctctacacagaagattgagaaagagcagaaacccacttctgttttgttgaaagcattaagaatctaaactgtattacattaacatttgcagatttatttgtattttcagaagtattatctctgagaattcagattctataaatatttgggtgatgatcgatattttttattaaaataaataacatattctgtcaccttgtagagctgcctgtaacatcaccattaggtattgctgtgattaaaaacttggagaactgggaacagatcttgcaagagaaaatggatcagtttgaaggtccaccccctaactatatcaacacatatccaactgacctttcagtgggagctggaccagctattcttcgaaataaagcaatgctagaacctgaaaataccccattcaagtaagaaagctcttataatgctgataaagagcgtagcttaacttttctggaagacagtttggctaaatatgccaatatactttaaaacattcataattttgaacctgcagtcctatttttagcagaatacgcttaagaaaaatatcagaaatttgaatagaatttttcccagtattatctgtaattcatagacattccatttacataaaggaaaaagtctttattgtattaatttccggtgtggtgttttttgtttgtttgtttgtttgagacaagagacaaggtctcactctgtcacccaggatggagagcagtggtgcaatctcagctcactgcagcctcaacctcctgggctcaacccatctttttcacctctgcctcctgagtagctggaacaacaggcgagcgccatcggctaattttttttgtattttttgtagagacagggtttcaccatgttgcccacactggtctcaaactcctaggctcaagcagtccctggtcttggcctcccaaagtgctgggattacaggcatgtgccactgcgtatggcatatttatgttcttattgtcagaactcttacagaatttttttctaacaatctatatatgcaaataaggtgcttctgacttttgtcagtaatttaacagtaaacacattacaggtttttaactgatgttttgatcttttacctgccaatctaggtcccttttgataagcagcatgcttttttttttgaggtagtggaccctgattaatagtttttactattaaaataagcttgaaagaacaaagctttttagcttgttaggctgttagaatcggtatctatgacttgtattcattgttgatatgctttaaccaagagaaccaatataaagtataatttaaaaagagaataataagagattcatttgactctcagcttaactggttcattcagtgtaattagagaattagttgctagatgaaatgatttttaggagaactaaaaattaaaagtaaactgtacagttttgttgagcttaatgctgtgtcttctttgcaatagattatgaaggttttaaaaataaatatctttgcaatagattgtgaaggttttaaaaataaatatctgcaaatataaacatattttctatagactaaagtagtgtgatatgttaattttttttaataggtcccgggattcttctgcatttccagtcaaacgactttggcatttccttgttaaacaagaggtccttcaagagacatttattagatatattttcactaagaaaagaaagcagagtgaggtattttgagaaaaatattttctattgtaatttttctttagttttctttaacatttctaaggaaatcagtgcttgatttattctgaaattttctttctggttgggtaatagtcaaagttcactaaactaccgtgaactacttttaagataaaaccttataattttcatttcatagcaatgaaacaacataggtactttgataaattacatatattcaagtgaaagttggtactttacagtatttgtcattaggtttttacacataataaacattgtgatggatggcttgaggaatttaatatataagcttactctataatattctccaaatatgtacttaaaatataaaatagccctttaaaagcattttctttacttagcacttagaaatgaacagaatgatgatttgaagcaacaaattcaggatacttttgtgagagaataaactacagaaatagcaaatacaagatgaaggaagattgctcttacaaagcaagacagaggttctgcattgcatggttatttttaagctaatacaattagtaatgtaatagcagacatggttcaagaagaattagcagtttgggagattggcaagtgacctcttccttataaaagtgggaccttttatatgagcatttcagtctgtttggctatttagtgaggtaattagtgagggaatgagcagtttgaagagtattcagagttgagcgtctgatgtaattaaagatttggcaaacatggccgggcacggtggctcacacctgtaatcccagcactttgggaggccgaggcgggcagatcacctgaagtcaggagttcatgaccagcctgaccaacatggagaaaccccatctctactaaaaatacaaaagattagccgggcgtggtggcgcatgtctgtaatcccagctgctcgggaggttgaggtaagagaattgcttgaacccgagaggcagaggttgcagtaagccaagattgtgccattgcactccagcctgggcaacaagagcgaaactctgtctcaaaaaaaataaagatttggcaaacacaatcaatgagaagagaagaaatgaattatatttcgcttagaaaagtgaaaacagagagagtccatacggctcaatttcccgagataaagtataaaattgcttctcagtttttcctcatgcccagggcagtggaacctaccatacttgttctttttcccactcacccacttacctgaatggtaattgtggtcagcccttatgaacagtcatttgttttctctatggatttaaaaattatatacttaaatgaggaagtagaagaatgaactgtagagaccttttgagtcctagttataagctttttcataacaaaagacccttatggcattgaaattattgatgtgactttgttagggaaatcagaggcaaattatttgcctctgtcatttaaaccactgtgtatagcatttcctatagtgatgctgagtccaaattccataaactaaaatataggaatctaagatagtgatttaaaataaaagattttagccaggcatagtggctcacacctgtaatcctagcactaggtgggggatctcctgagctcaggggtttgagaccagcttggcaacatggtgaaaccccgtctctacaaaagatacaaaacaattatccaggtgtgatggtgtatgcttgtaatcccagctacttgcagggctgaggcaggaggattgcttgagcccaggaggtggaggttgtagtgagctgagatcacacaccactgcactccatcctgggtaacaaagtgagaccctgtcttaatcaataagatttctggtcaattaggggctctgttattcacagaaaaccagttcattgagtgatcaattttctgagtgttttgttcttcaaattattaaaattaatgatttatcacaagtatgttttaagtattggtaaggttgatagcagcttgactggttgacttgtcagagtgtagagtgctgtgggaagccaggtgtctgggtttcttggaccctcccattctcgtcttgcccttccccacgagtttgcttcttccttaactaattctccccctctccgccccttagtctcccttccattatgcccctcagtctctgtgtgttctatttttcttccagcagtgggtccccatgaacagggaagtaggacagagataaacggaatgtttcttaaagtgctatataagcatcagttggctccaaggaagggaagtacatggctgggagttaggatggaagaatttttatcatgtacccttttaattttaaaacattgaatggaattactgtcttgtccagtactgtcccatagaactttctgtgatgatggaaatctgtatctgcatagtccaacatagtagtcaccagccacatgtggttactgagtacttgaaatgtggctagcatgattgagaaactgaattttaattttaattgatctaaatttaaatagttacatatggttagtgattgctgttttgaatagctcagatctgaaaaaaaaggtgttttattaagaaaaaaattatgaataaaacattaaggctgttaggacaaaataaaaactcgtcgttaggctcagaaatatgcaaaacttactaaaactctacccaatccagtaagagtgcttacatctttaaaattgtcaaataggattttggtaatcactaaatttggcaaattcagaaaattgaccaataaaattggcaggctaatcctaaaaatgctgggtgcatttaaaaaaaatccctgagaaatgctgaagttatatatttataagaataagatcttttattcactgaagatattacaggaaaatatttcacaaaacaagtttttgggaaacagattggtgaattcagctagttaagacaaatagattcttcagcagtttggccttcactgagttagctgtgccacacattgaccattccttggaagttttcttggatgcatctttatcagctgcagcagccataggggagtccctggaggcatgggcagaaaatttgaatggcccttcgtgatgaaaggaaggcagtcacctgaaaaggtatgaggaagagtttgtttctctgatcaaaccttcagagtttccacagcagagcagaaatataacttctgattgcagccatccttaggaccctgcatcaacccgggagcaaattactgagttatttctttttccgtgcctgattttattaaacatttatttacttagagaaaaatcatcatattccttataagagtgaaataattatcaatattttgaatctatgtttagaaataaatattttaatttgtattttaaatcaacccctatagggcaggaatttatgtagcatcttctgcatctgcttatacaaatgggctttaattttatagattaccagttatgtaacttagatttcttaaaactgtatacagataactaatttttattttgaaatagcttttatgttcttgtgtttatgtaatagtcacattaattttgctcttttggctttgtgttgtgtttatttgatgactgttttattcggtttaattttttcttgattttgcaaattcatttttatcatctttaagtggtggagtggccatttcagcttgaaatatttcactgtctttataatttcattccatgcatgtgttttgtgtttgtgacggtgtggtggtatttagtctatagaagaacatgtggagcaggtcaaccaaaactgcatagcagaagattgccacatcaaggtagtattccaagatcttgtatttagctcattctttaaagttcaaggagctaacgcctcatctctgatactaaccatgacctgcccaactggctaactactcagagaactcatagtactcccataccacttcagtggcacaggggaggagatgcttcactgtatctggcttgctctgtcttgcccttggttcttctctttcttgctccctgtcccatcttcacttgtcactttttctgttttaagcatggctgtttcatcttcttgattctgccttttctttccttcccatcaccaaccctaagccattgcatcttcctctcatcagtctcttttattcctttcgaagtatccctctttacaacttttccttatttctgtctcaccacccttacttcaaagggtggtttctttgcggttttctatggctttttactccactctgtgcctcttaatgtatacacattcttattgcagaatatttatgcacttttggaagagctaagagagacatactactgtataaattactaataaaaatatattagccatgttttataattaatcagtatcttaccatcacagtggaaattggggtgattacaggacatcagagaatttaagcaaattttccaaagctagttttcaacacattaaagttactcttacccttttttcttgctgctgctgctgctgctgctgctacattttcttcttatcctacatttaaatcttatgggatgtgcataactctaaatagagctgtgctgcagcaactaaaactgctgatgaatgttttctaggttgaagctgatctgggctatccaggtggaaaggcgaaagtcatccataaggaatctgatatgatcatggcattttctgttaataaggtaaaagctctcatcattatacacagtgtatttctccttagtgaaattgcttaaatcatcgattctgcctttgctttataggcaaattgtaatgaaattgttttggcttcaacacatgatgttcaagaacttgatgttacttctctactggcctgtcagtcatacatatggatcggagaagaatatgacagagaatccaaaaggtttgtctcatagtcacttttacatatagttttctgtaagaagtacccaccaaatggttatgcacatgatttgaattatttcaaaaggtatacgtgtatctccttcatttgggtaggtgacaaatataattggtttagctgccagtgaaagtctttgtctacattaactgaatgaattacacttccattaaaccctacactattgataatatttcaataaggataatccctaacacttggcttcatgatattcagtaaattaatctgatctggataattaaaacagtagacacaaatatgttaattacactgagtcacatttaccgagtaattttgcagtgtttcttcttatcacctgataagcataccttttcttaaacataaaaatgtagacggctttacttttcattgaagctatggacactgcaccaagagtgttttgccattcttacctattttgaggtttcttctttgtggtttgccttccctcctgcttttctccagactcttagaaattgttcatgcttgaggatggtgccatgatagtttctctcctcattttgttgaattcttttttttgttagtatgtgatataactaggatttaatatcacatttcagagtagatataaccatgtactatgatacaatccatcccaacaattactttcacattttatatgtcttactccaagaaatctttaaactcaaatttctttaaacgtgttaatttgatactgagctatctgtacttgaagagaacataatatttttccatagataacaacaaacttttgtttcaacttgtgcagcaataaagttgtccccaaacaacattagactaaatttacattttgccaaaagggaaaaaagttaaccagtattaacattggcgattaggacttgtacctaagtttttctcatggctacttagtttttaaaataaagattgtcctatgggtacataagaagatttttagttggaatttgtgttaagagaaaagggaatgttcacagtaacacatgaatgtttttcacagttcagatgatgttgattatcgtggttccactacaactctttatcaacccagtgcaacatcctattcagcaagtcaggtgcatccaccttcatctctgccatggctgggcactggacagactagcactggagctagtgtggtatgttatttacttataggtatcatttctggatttggactctgaaaaatcagttggaatctctttgacataggaatgatcctaaatttcagggacaaacaccagtagataggccatgataatgacagctgacatttattgtggcttttttatttggtgacagggtctggctctgtcgcgcaggctggagtgcagtggtgcaatttcggctcactgcagccttgacctcctgggctcaattgatccttccatctcaacctcccaagtagctgggactacaggtgcatgccagcgtgcctggctaatttttgtattttttgtagggatggggtttcaccacgctgcccaggctgttctcgaactcctgggctcaagtgatctacccgcttcagcctcccaaggtgctaggattacaggcatgagccaccacactggcctcatatgactttcttagtgtcagatacatgctttttctcacaacaatcctaggtggtaggtgctattattaccctccattatcattttacagatgaataaacagatacaaaatggtaaagcaaagttaaaggggaattcatgtctacttctaagtgcttgaaagcatgtcagtaacattcttgtcactgtagctggaggggtcccattcttatgttctgctctgaagcatctggaggtgctcctgaatatcctcagggaggggcacttgaagaagagttcctttattatgagatgaagctccttggtaacctcacaggccagggctataccagcaagtgactgtgcttcctcaccctcttcagacaagtgttctatgtagtggttcagaacatccataacaggctttatctcagtaataagcaaggtgtaagagaataaatgtcagaatttatcctgaagcatatccttcctcatcttttctgcatacacaaaataaaatttttaaaattttcttttaaagcttatgaaaaggaatctacataatgttaagagaatgacttcacacccagtccatcaatactgtaagtatttatgacctaataattgtaagtgtcctcatttggaggttgatttatagaatagaaaatattggaactctttaatttcttatttcctgctttttctcttgtgtttcagatcttacaggtgctcaggacggcagtgtacgaatgtttgaatggacgcggcctcagcaacttgtctgctttcgtcaagctggcaatgcaagagttactagattatattttaattcacaaggcaacaaggttagtttctgggggctactgctgaattcatctgaaaatagttgtggatatttaggagtaagtgataaaagtgcatcgaaaaatgaattcagtgaccctggatttaaactgagtagacagtttgttggagtctattcatacactctcttttcttccaatagaagcaaaaatctacaaaatttagtatggattaatcatctatttaaagatactaaatatactgtgagagtaaaaaaactgcctgtgttgagtgtgttggtgattcctgtaagcacagtaaagttcttgagagaaacctagtttcttactaaatttcatcagtaagaggttagaggaaaacagtgaaacaggtaagcagttaagaagtaatggaagggccagtcacagtggttcacacctgtaattacaacactttaggagcccaaggcaggaggattgcttgaactccagcatttgagacaacctgaacaacaaagggagaccacatccctacaaaaatttttttaaaaagcccaggcatgtgcctctagtcctagctactcagaaggttgaggctggaggatcccttgaacccaggagtttgaggttatagtaagttataattgcactactgcactccagcctgggtaacagaatgagaccctgtctctaaaaaaatttaaaaaaaaagtgacagggaattttttagcacttggactttttgggaatgacagcaacagaaacatagttagaggcagaatgtttatttagtagggccttagtgaatcttccttccatgtttttacctttgctgtggatgctaagaacatgtgtttagtagttatactgttcttacagtgtggtgttgcggatggagagggttttctgagtatctggcaagttaaccaaactgcatcaaatcctaaaccttatatggtaagtatcactaaatgttcccagggcgcatatacacaacactttgttcatgaagtgtctgtttcagacagtgaatctcattggtggtcctattgggaaaaggatgatttttttcagcaatcccagcctgacagcagcacccatccttaccctagttttagactgaaatgacctgaaaaacaaaaagccttgcttttcaccttgaagtacagtttatattttaaaaattttgggggctttccctgtgtgtggtacaacttgggttttttttcattattattatactttcatccattttgaaaactctatcttcttaatatacacatgataaaattctgtcattaagaatcaggttctgccgggcacggtggctcacgcctgtaatcccagcactttgggaggccgaggcgggcagatcacaaggtcaggagttcgagaccagcctgaccaacctggtgaaaccccctctctactaaaaatacaaaaattagccaggcatggtgacacgtgcatgaagtcccagctactcgggaggctgaggcaggagaatcgcttgaacccaggaggcggaggttgcagtgagctgagattgtgccactgcgctctagcttgggcaacagagtgagacttcgtctcagaaaaaaaaagaatcaggttccaaacatctgttccaatttgttccagaattgtgcttaccagattataaaataaccaatcccaatgagccaccttaatccaaattggattacaaaatagttggtgatgaagataagtagatctttacctgatggagatatggtgggggaaaggaacatgggggagggtggaaggtgatgctgtcctgtgtgaaacttcaggcttcacatatatggagggaggttcagaacgccttgaacctcctgggaccagatagattacccaaatactttttaaaatttttctaaactatacatatgttcttaattatgtgtataagataattctcttaaattaggacactatagactgtaccttgtctatgcagaaatggaagtaatcttgaatttatacttttgtcttcagtcagatctgtaccactataattccagacagaaaaacatgcattatattttaaaataccttgacatcctaagactagttgggtctgtaagcatttcctttgtgactgttaaagtttattacatgtatttgagatcattagcactaaaattgacgggtcttaggtaggttcatgtactttgatgtcctattcttacataatctgaaaaacatgacctttaattctgtttttaccaactccagttattaaaaattattggacagtagccaaataatatacacatgacagttaagcctcatactatcacttattcttttatcctagaccgagtttttaaaaactatttttagctcatgcatatagtatgttattagcagacatgtatgttggtactgtatcaaattttatccaatggtaaaataacatcagttgcactttgtttttcgtagagttggcagtgccacagtaaagccacaagtgactttgcatttattacctcttcaagtctagttgccacatctggacactccaatgacaataggtaggttgacagaaaagcaaagtaagaaatataaaaacgttagaaatccatacctttagcaagaatacttttctattagtagggtttttccactctaggcattaaaaaaaaaaactttgttacataattcttatttcagagtgttttttcttaccaaaaagagaaaagcaaaaatgaaagttattcctaatatatgtaatttttattttaaagctattcagtcttttttaaactactactgttaacactgttagtttctctaggactaacaggcatctgatattgtctccatcattctcaacatttttattttattgcagtaggtttgggggaataggtagtgtttggttacatggataagttctttagtggtgattgctgagattttggtgcacccatcacctgagcagtgtacactgtacccagtgtgtagtcttttattcttcaccctcctcccacccctcccaagcccccagagtccattatatatcattctgatcctttgcatcctcatagcttagctcccacttacaagtgagaacatacgacatatgattttctactcctgagttacttcacttagaataatggcctctaactccatctgggttgctgcaaaatgtgattatctcattcctttttatgaagtattccatggtgtatatgtaccacattttctttatccatttgttggttgatggacatttaggttggttccatagttttgcaattgtgaattgtgctgctctaaacaggcatgtgcaagtgtctttttcatataatgacttcttttcctctgggtagatacccagtagtgggattgctggattgaatggtagttctgcttatagttctttaaggaatctccgtatactgtttttcatggtggttttactagtttacattcccaccagcagtgaggtgtccccttttcaccacctccatgccagcgtctattgttttttggttttttaattatggccattcttgcaggaataaggtggtatcgtattggagttttaatttgcattttcctggtaattagtggttttgagcattttttcctgtttgttggccatttgtattttgagaattatctgttcatgtcctttgctcgcttttgatgggattgttttttcttgttaagttccttgtagattctagatataagtcccttgtcagatatatacattgtattttctcccactctgcaggttgcctttttactcttgctgtgcagaagtgttttagtttaattaggtcccatttatttatttttgttgcatttgcctttgggttcttggtcatgaattctttaagtcaatgtctagagtagttttttttgatgttatcttctagaatttttatggtttcaagtgttagatttaagtttgacccatcttgagttaatttttgtataaggtgagagatgaggattcagggactaacaggtatttgacactgtccccatcattctcaacatttattttgacctcacatggttttcattagcaacacatgcccatgaataacatcttgtttccctgcagtggctaccacctggggatataaaagcattccttatactcaggaagtcatatcagtttcctggagtggcaatggaaaggagatggggtagaggatgcagagacgggcaggaccatgtgagatggaactgtgtagtttgaccctacccccatcctagttgggaatcactactctctataggtgtgagtgaacaaaaaagataagaatgaataagcaaaatatttgactgaaagacaggttgtccctgatgacgacttataacaatcatttatgatgtatttttgttattgtgtttctttaaaagaaatgtttgcctctgggacacattaatatcacccggaaacagcctcattcatggtgagttaaggtctatgatttttaaaaatataccatgaaggaataatacaccatgaaggaatgctttcttggttttaattagtgaatccagtgagtgtttattgacaggttgaaaatggagaaatatttagaatgaatgactaaaaatttggaaagttaattagcatatctggcttccttgctgagttaaagatatatggtctcagaaatccaaaatagtctttatattctattcagaaaatatggtatggatagtggtactactaacaaggctatttaagaaattagttgcaaagtattcattgagcttaatagaaaataacatattttaaagaattaaacctcatcataaaatactttttgtctttttttcctttttgtggagatcaaggtcatgctgtattgctcaggcaggtctcaagctcctagggtcaagctatcctcccacctctacctccctaagtactgggattacaagcatgagccaccacacctggccctaaccataaaataaaacaaaggttaaccttattataatgactagaaatgtaaacagtgccatttaaatattattccttttaagacaatacttgccaaattagtgtcctaactctgtcttccacatagtaccacccaaaaagtgctccatgctcaagtaagtttggttaaatgaagtagattgtcagaaagacagaaagattctcagtcttttaatacactgatatgcattttgaaatatgtagttaattctcaattttattgcagaattctgcaaacagtggttaacattgcttacagattttctgcatgttaatttgaatctttaatcatattaaaatgcaaatactcctgggaaggataatgaacttcttaacttgtaactgaaaacattcacacattttctcatagtgtcgttgtttcaattacttacctgaaaagaactttttgtacggtacagcacttggctgggttaatactcaccaactttgagaaggttggtctctgctcttctgtatactttttatgaggcagtatcacttagggcttaaggtttaaactttctttttctctctgtgttcatttcatattgagattatggataaaaagtttgttctgacattgcttaacatttttctttaatcatgtgattacagaaattcaatgacttacaaaacaataaatgtaccttagaatgaaaaatgcatcagtaaggtctgtatttaaatgtggatgtagacatcataattaccaagacaagaaattgttttgagaaattctctgatgtttttcttcttcaggtttcacgtgccacgatcatggtgccacggtactgcagtatgcacccaaacagcaactcctaatctcggggggtaggaaaggacacgtctgcatttttgacatcaggcaaaggcagctcattcacacgttccaggcccatgactcagctattaaggctctggccttggatccctatgaggaatattttaccacaggttcagcagaaggtaacataaaggtgagtcagtacaagaggttggaatgtgctaaagactgattggaaagagaaaaaacaaaaactccacattctttgaaataaagcttcactttatttcacttgggctactgcatggagatactgcatatctcaacactctgccgcctccccatgctcctgtatggttctttctaaactgttatggtcaatgagattatcaaactcattggactcaggccattagaaagctttaaagcattctattttgagtaaagtgtatgagtttaatgcatgaaattttttgatgacattagtttggctccttagaagcttctcccctctccctcagtactcttgtgtgtggtggaggtgacgtttccagtaagtgagctagtgcagatgctccttgactttatggtgggattatgtcccaacaaacccattataagttaaaaatattgttaaagttgaaaaacatactttcaacttaatattttcaacttactatgagtttattgagactaacctcaggataagccaaggagcgtgctgaatgcgtattgctttcacactgtcataaagtcaaaaagtcttgtcaaaccatcgtaagtaggggactgtctgtaccacactacttttacatagccttaggacctagctcagcatgaggaacacatttaactgaattaactcaaatagttaattgaattagagatgggctacatatggttaatatgaagccacaagaggatgtgaaggaaaatatggaaggaggacagtaaatgaatcgtgggagtggtgttatcatttcccacttagataagctcttaggaaagaggcagtgggtgggaaggttgggctttagtgagatcacttgggccaagggagcagaagggccatgtttttgcttttggtcttttcgtaatatatttttaactccttttgttttgcactaggtttggagattgacaggccatggcctaattcattcatttaaaagtgaacatgctaagcagtccatatttcgaaacattggggctggagtcatgcagattgacatcatccagggcaatcggctcttctcctgtggtgcagatggcacgctgaaaaccagggttttgcccaatgcttttaacatccctaacagaattcttgacattctataaagattggggttttatttttatatacatttcagttaaaaggcacactacagtcatcactaggcaattctgctttctaagcagttgtattgaaaacagagaatctctgtgtagaatttgaatatgacccaagctgagtattatctaaacaggttggtggaatgaatgcgcatgtaccttattatgctgacatactaaaaaaaataaaacctagtattgtatgaaggatagctattctttacagcatttagcaaacctgattcagaaaacatttgagattagcaaattagtaacttgaaataatgaaaaggacgtttataccaaattaaggaagaaaatgttgctgatttgggtttttcttcctgttcttaccactgactgaagcatgcctgcagtctcctcctctgttgaatgaaggataatcataaggtgtttgttaggagcgctagaccacctggaaaactttcttagctgtggagcagtgcgcagtgaccagttctctgctgtgagaggccgtttccattctttcctgctgaatatttttcctgttagtgtttatactgagctagtactgtaacttgcaaatgagtgcaaatttaaatgcaatgttttactcacaatttgcacattcacattttttggactgctagtttttctatttaaatatttgccttcatgttaggaatgtactatgtgaacatgacatatttgtagttaaccaaacacaccttcttagtccagtttagtactttttcttttcgtgtattcaaggttaaacacccaaacatttaaggatatgttgaaactacaccaatagagcatttcatatcataattaaaatgaatgttaggcttcttgtggccagttaatagttgatgagattggtgacattatttattgccacagcctattgtataaactatgcagagttaaatatttgcttgtaaaatattagccaatgttgtcattattttgatgtatttccttggttatgaccaaaaatatgttgagatactgaaactaatgtctgtgtgtttaaatgtttaccagcaaattgtcttatcatgttaatgagaatgttcaatgcctgtgtggtaaatagtaaatacaatggcataaaagtaactttctctgaagatgtgatgttcaggctgtgaaatatatatgtaaaagaaaaataaatgttatttgttagagtttttagtttgatactgtttttgaccattgagatttttaatttgataaaatgtttaactgttagagaatttgcaagctatttggcagtctattcattcataagtaagtatttactgaataccttctataccaaaagccattctaggaaatgggatacagtggagagccagacagagaaagcacacaatgttgagatttagcggggcaagagctaacctcactataccttctccagacagatttgaagtttattgaatgaagtactaacctcgtacccaaaactcaaatctgagtcttggctatttgcttgctcctaagtaagtaagggaagtcagaatatgcccactgataagaagagccaggaaaataagcttgtgagtgacatctcaatgcctaaagcaaaactgattcaaaggagctttcagaaaaaagggaagagaactttctctgtcaggtaaaagcagtaagagactctagattcaccttctagcttgaaacaactaaaa

SEQ ID NO: 856 - DNA, 17595 bp, Homo sapiens
gagctgcctgtaacatcaccattaggtattgctgtgattaaaaacttggagaactgggaacagatcttgcaagagaaaatggatcagtttgaaggtccaccccctaactatatcaacacatatccaactgacctttcagtgggagctggaccagctattcttcgaaataaagcaatgctagaacctgaaaataccccattcaagtaagaaagctcttataatgctgataaagagcgtagcttaacttttctggaagacagtttggctaaatatgccaatatactttaaaacattcataattttgaacctgcagtcctatttttagcagaatacgcttaagaaaaatatcagaaatttgaatagaatttttcccagtattatctgtaattcatagacattccatttacataaaggaaaaagtctttattgtattaatttccggtgtggtgttttttgtttgtttgtttgtttgagacaagagacaaggtctcactctgtcacccaggatggagagcagtggtgcaatctcagctcactgcagcctcaacctcctgggctcaacccatctttttcacctctgcctcctgagtagctggaacaacaggcgagcgccatcggctaattttttttgtattttttgtagagacagggtttcaccatgttgcccacactggtctcaaactcctaggctcaagcagtccctggtcttggcctcccaaagtgctgggattacaggcatgtgccactgcgtatggcatatttatgttcttattgtcagaactcttacagaatttttttctaacaatctatatatgcaaataaggtgcttctgacttttgtcagtaatttaacagtaaacacattacaggtttttaactgatgttttgatcttttacctgccaatctaggtcccttttgataagcagcatgcttttttttttgaggtagtggaccctgattaatagtttttactattaaaataagcttgaaagaacaaagctttttagcttgttaggctgttagaatcggtatctatgacttgtattcattgttgatatgctttaaccaagagaaccaatataaagtataatttaaaaagagaataataagagattcatttgactctcagcttaactggttcattcagtgtaattagagaattagttgctagatgaaatgatttttaggagaactaaaaattaaaagtaaactgtacagttttgttgagcttaatgctgtgtcttctttgcaatagattatgaaggttttaaaaataaatatctttgcaatagattgtgaaggttttaaaaataaatatctgcaaatataaacatattttctatagactaaagtagtgtgatatgttaattttttttaataggtcccgggattcttctgcatttccagtcaaacgactttggcatttccttgttaaacaagaggtccttcaagagacatttattagatatattttcactaagaaaagaaagcagagtgaggtattttgagaaaaatattttctattgtaatttttctttagttttctttaacatttctaaggaaatcagtgcttgatttattctgaaattttctttctggttgggtaatagtcaaagttcactaaactaccgtgaactacttttaagataaaaccttataattttcatttcatagcaatgaaacaacataggtactttgataaattacatatattcaagtgaaagttggtactttacagtatttgtcattaggtttttacacataataaacattgtgatggatggcttgaggaatttaatatataagcttactctataatattctccaaatatgtacttaaaatataaaatagccctttaaaagcattttctttacttagcacttagaaatgaacagaatgatgatttgaagcaacaaattcaggatacttttgtgagagaataaactacagaaatagcaaatacaagatgaaggaagattgctcttacaaagcaagacagaggttctgcattgcatggttatttttaagctaatacaattagtaatgtaatagcagacatggttcaagaagaattagcagtttgggagattggcaagtgacctcttccttataaaagtgggaccttttatatgagcatttcagtctgtttggctatttagtgaggtaattagtgagggaatgagcagtttgaagagtattcagagttgagcgtctgatgtaattaaagatttggcaaacatggccgggcacggtggctcacacctgtaatcccagcactttgggaggccgaggcgggcagatcacctgaagtcaggagttcatgaccagcctgaccaacatggagaaaccccatctctactaaaaatacaaaagattagccgggcgtggtggcgcatgtctgtaatcccagctgctcgggaggttgaggtaagagaattgcttgaacccgagaggcagaggttgcagtaagccaagattgtgccattgcactccagcctgggcaacaagagcgaaactctgtctcaaaaaaaataaagatttggcaaacacaatcaatgagaagagaagaaatgaattatatttcgcttagaaaagtgaaaacagagagagtccatacggctcaatttcccgagataaagtataaaattgcttctcagtttttcctcatgcccagggcagtggaacctaccatacttgttctttttcccactcacccacttacctgaatggtaattgtggtcagcccttatgaacagtcatttgttttctctatggatttaaaaattatatacttaaatgaggaagtagaagaatgaactgtagagaccttttgagtcctagttataagctttttcataacaaaagacccttatggcattgaaattattgatgtgactttgttagggaaatcagaggcaaattatttgcctctgtcatttaaaccactgtgtatagcatttcctatagtgatgctgagtccaaattccataaactaaaatataggaatctaagatagtgatttaaaataaaagattttagccaggcatagtggctcacacctgtaatcctagcactaggtgggggatctcctgagctcaggggtttgagaccagcttggcaacatggtgaaaccccgtctctacaaaagatacaaaacaattatccaggtgtgatggtgtatgcttgtaatcccagctacttgcagggctgaggcaggaggattgcttgagcccaggaggtggaggttgtagtgagctgagatcacacaccactgcactccatcctgggtaacaaagtgagaccctgtcttaatcaataagatttctggtcaattaggggctctgttattcacagaaaaccagttcattgagtgatcaattttctgagtgttttgttcttcaaattattaaaattaatgatttatcacaagtatgttttaagtattggtaaggttgatagcagcttgactggttgacttgtcagagtgtagagtgctgtgggaagccaggtgtctgggtttcttggaccctcccattctcgtcttgcccttccccacgagtttgcttcttccttaactaattctccccctctccgccccttagtctcccttccattatgcccctcagtctctgtgtgttctatttttcttccagcagtgggtccccatgaacagggaagtaggacagagataaacggaatgtttcttaaagtgctatataagcatcagttggctccaaggaagggaagtacatggctgggagttaggatggaagaatttttatcatgtacccttttaattttaaaacattgaatggaattactgtcttgtccagtactgtcccatagaactttctgtgatgatggaaatctgtatctgcatagtccaacatagtagtcaccagccacatgtggttactgagtacttgaaatgtggctagcatgattgagaaactgaattttaattttaattgatctaaatttaaatagttacatatggttagtgattgctgttttgaatagctcagatctgaaaaaaaaggtgttttattaagaaaaaaattatgaataaaacattaaggctgttaggacaaaataaaaactcgtcgttaggctcagaaatatgcaaaacttactaaaactctacccaatccagtaagagtgcttacatctttaaaattgtcaaataggattttggtaatcactaaatttggcaaattcagaaaattgaccaataaaattggcaggctaatcctaaaaatgctgggtgcatttaaaaaaaatccctgagaaatgctgaagttatatatttataagaataagatcttttattcactgaagatattacaggaaaatatttcacaaaacaagtttttgggaaacagattggtgaattcagctagttaagacaaatagattcttcagcagtttggccttcactgagttagctgtgccacacattgaccattccttggaagttttcttggatgcatctttatcagctgcagcagccataggggagtccctggaggcatgggcagaaaatttgaatggcccttcgtgatgaaaggaaggcagtcacctgaaaaggtatgaggaagagtttgtttctctgatcaaaccttcagagtttccacagcagagcagaaatataacttctgattgcagccatccttaggaccctgcatcaacccgggagcaaattactgagttatttctttttccgtgcctgattttattaaacatttatttacttagagaaaaatcatcatattccttataagagtgaaataattatcaatattttgaatctatgtttagaaataaatattttaatttgtattttaaatcaacccctatagggcaggaatttatgtagcatcttctgcatctgcttatacaaatgggctttaattttatagattaccagttatgtaacttagatttcttaaaactgtatacagataactaatttttattttgaaatagcttttatgttcttgtgtttatgtaatagtcacattaattttgctcttttggctttgtgttgtgtttatttgatgactgttttattcggtttaattttttcttgattttgcaaattcatttttatcatctttaagtggtggagtggccatttcagcttgaaatatttcactgtctttataatttcattccatgcatgtgttttgtgtttgtgacggtgtggtggtatttagtctatagaagaacatgtggagcaggtcaaccaaaactgcatagcagaagattgccacatcaaggtagtattccaagatcttgtatttagctcattctttaaagttcaaggagctaacgcctcatctctgatactaaccatgacctgcccaactggctaactactcagagaactcatagtactcccataccacttcagtggcacaggggaggagatgcttcactgtatctggcttgctctgtcttgcccttggttcttctctttcttgctccctgtcccatcttcacttgtcactttttctgttttaagcatggctgtttcatcttcttgattctgccttttctttccttcccatcaccaaccctaagccattgcatcttcctctcatcagtctcttttattcctttcgaagtatccctctttacaacttttccttatttctgtctcaccacccttacttcaaagggtggtttctttgcggttttctatggctttttactccactctgtgcctcttaatgtatacacattcttattgcagaatatttatgcacttttggaagagctaagagagacatactactgtataaattactaataaaaatatattagccatgttttataattaatcagtatcttaccatcacagtggaaattggggtgattacaggacatcagagaatttaagcaaattttccaaagctagttttcaacacattaaagttactcttacccttttttcttgctgctgctgctgctgctgctgctacattttcttcttatcctacatttaaatcttatgggatgtgcataactctaaatagagctgtgctgcagcaactaaaactgctgatgaatgttttctaggttgaagctgatctgggctatccaggtggaaaggcgaaagtcatccataaggaatctgatatgatcatggcattttctgttaataaggtaaaagctctcatcattatacacagtgtatttctccttagtgaaattgcttaaatcatcgattctgcctttgctttataggcaaattgtaatgaaattgttttggcttcaacacatgatgttcaagaacttgatgttacttctctactggcctgtcagtcatacatatggatcggagaagaatatgacagagaatccaaaaggtttgtctcatagtcacttttacatatagttttctgtaagaagtacccaccaaatggttatgcacatgatttgaattatttcaaaaggtatacgtgtatctccttcatttgggtaggtgacaaatataattggtttagctgccagtgaaagtctttgtctacattaactgaatgaattacacttccattaaaccctacactattgataatatttcaataagggataatccctaacacttggcttcatgatattcagtaaattaatctgatctggataattaaacagtagacacaaatatgttaattacactgagtcacatttaccgagtaattttgcagtgtttcttcttatcacctgataagcataccttttcttaaacataaaaatgtagacggctttacttttcattgaagctatggacactgcaccaagagtgttttgccattcttacctattttgaggtttcttctttgtggtttgccttccctcctgcttttctccagactcttagaaattgttcatgcttgaggatggtgccatgatagtttctctcctcattttgttgaattcttttttttgttagtatgtgatataactaggatttaatatcacatttcagagtagatataaccatgtactatgatacaatccatcccaacaattactttcacattttatatgtcttactccaagaaatctttaaactcaaatttctttaaacgtgttaatttgatactgagctatctgtacttgaagagaacataatatttttccatagataacaacaaacttttgtttcaacttgtgcagcaataaagttgtccccaaacaacattagactaaatttacattttgccaaaagggaaaaaagttaaccagtattaacattggcgattaggacttgtacctaagtttttctcatggctacttagtttttaaaataaagattgtcctatgggtacataagaagatttttagttggaatttgtgttaagagaaaagggaatgttcacagtaacacatgaatgtttttcacagttcagatgatgttgattatcgtggttccactacaactctttatcaacccagtgcaacatcctattcagcaagtcaggtgcatccaccttcatctctgccatggctgggcactggacagactagcactggagctagtgtggtatgttatttacttataggtatcatttctggatttggactctgaaaaatcagttggaatctctttgacataggaatgatcctaaatttcagggacaaacaccagtagataggccatgataatgacagctgacatttattgtggcttttttatttggtgacagggtctggctctgtcgcgcaggctggagtgcagtggtgcaatttcggctcactgcagccttgacctcctgggctcaattgatccttccatctcaacctcccaagtagctgggactacaggtgcatgccagcgtgcctggctaatttttgtattttttgtagggatggggtttcaccacgctgcccaggctgttctcgaactcctgggctcaagtgatctacccgcttcagcctcccaaggtgctaggattacaggcatgagccaccacactggcctcatatgactttcttagtgtcagatacatgctttttctcacaacaatcctaggtggtaggtgctattattaccctccattatcattttacagatgaataaacagatacaaaatggtaaagcaaagttaaaggggaattcatgtctacttctaagtgcttgaaagcatgtcagtaacattcttgtcactgtagctggaggggtcccattcttatgttctgctctgaagcatctggaggtgctcctgaatatcctcagggaggggcacttgaagaagagttcctttattatgagatgaagctccttggtaacctcacaggccagggctataccagcaagtgactgtgcttcctcaccctcttcagacaagtgttctatgtagtggttcagaacatccataacaggctttatctcagtaataagcaaggtgtaagagaataaatgtcagaatttatcctgaagcatatccttcctcatcttttctgcatacacaaaataaaatttttaaaattttcttttaaagcttatgaaaaggaatctacataatgttaagagaatgacttcacacccagtccatcaatactgtaagtatttatgacctaataattgtaagtgtcctcatttggaggttgatttatagaatagaaaatattggaactctttaatttcttatttcctgctttttctcttgtgtttcagatcttacaggtgctcaggacggcagtgtacgaatgtttgaatggacgcggcctcagcaacttgtctgctttcgtcaagctggcaatgcaagagttactagattatattttaattcacaaggcaacaaggttagtttctgggggctactgctgaattcatctgaaaatagttgtggatatttaggagtaagtgataaaagtgcatcgaaaaatgaattcagtgaccctggatttaaactgagtagacagtttgttggagtctattcatacactctcttttcttccaatagaagcaaaaatctacaaaatttagtatggattaatcatctatttaaagatactaaatatactgtgagagtaaaaaaactgcctgtgttgagtgtgttggtgattcctgtaagcacagtaaagttcttgagagaaacctagtttcttactaaatttcatcagtaagaggttagaggaaaacagtgaaacaggtaagcagttaagaagtaatggaagggccagtcacagtggttcacacctgtaattacaacactttaggagcccaaggcaggaggattgcttgaactccagcatttgagacaacctgaacaacaaagggagaccacatccctacaaaaatttttttaaaaagcccaggcatgtgcctctagtcctagctactcagaaggttgaggctggaggatcccttgaacccaggagtttgaggttatagtaagttataattgcactactgcactccagcctgggtaacagaatgagaccctgtctctaaaaaaatttaaaaaaaaagtgacagggaattttttagcacttggactttttgggaatgacagcaacagaaacatagttagaggcagaatgtttatttagtagggccttagtgaatcttccttccatgtttttacctttgctgtggatgctaagaacatgtgtttagtagttatactgttcttacagtgtggtgttgcggatggagagggttttctgagtatctggcaagttaaccaaactgcatcaaatcctaaaccttatatggtaagtatcactaaatgttcccagggcgcatatacacaacactttgttcatgaagtgtctgtttcagacagtgaatctcattggtggtcctattgggaaaaggatgatttttttcagcaatcccagcctgacagcagcacccatccttaccctagttttagactgaaatgacctgaaaaacaaaaagccttgcttttcaccttgaagtacagtttatattttaaaaattttgggggctttccctgtgtgtggtacaacttgggttttttttcattattattatactttcatccattttgaaaactctatcttcttaatatacacatgataaaattctgtcattaagaatcaggttctgccgggcacggtggctcacgcctgtaatcccagcactttgggaggccgaggcgggcagatcacaaggtcaggagttcgagaccagcctgaccaacctggtgaaaccccctctctactaaaaatacaaaaattagccaggcatggtgacacgtgcatgaagtcccagctactcgggaggctgaggcaggagaatcgcttgaacccaggaggcggaggttgcagtgagctgagattgtgccactgcgctctagcttgggcaacagagtgagacttcgtctcagaaaaaaaaagaatcaggttccaaacatctgttccaatttgttccagaattgtgcttaccagattataaaataaccaatcccaatgagccaccttaatccaaattggattacaaaatagttggtgatgaagataagtagatctttacctgatggagatatggtgggggaaaggaacatgggggagggtggaaggtgatgctgtcctgtgtgaaacttcaggcttcacatatatggagggaggttcagaacgccttgaacctcctgggaccagatagattacccaaatactttttaaaatttttctaaactatacatatgttcttaattatgtgtataagataattctcttaaattaggacactatagactgtaccttgtctatgcagaaatggaagtaatcttgaatttatacttttgtcttcagtcagatctgtaccactataattccagacagaaaaacatgcattatattttaaaataccttgacatcctaagactagttgggtctgtaagcatttcctttgtgactgttaaagtttattacatgtatttgagatcattagcactaaaattgacgggtcttaggtaggttcatgtactttgatgtcctattcttacataatctgaaaaacatgacctttaattctgtttttaccaactccagttattaaaaattattggacagtagccaaataatatacacatgacagttaagcctcatactatcacttattcttttatcctagaccgagtttttaaaaactatttttagctcatgcatatagtatgttattagcagacatgtatgttggtactgtatcaaattttatccaatggtaaaataacatcagttgcactttgtttttcgtagagttggcagtgccacagtaaagccacaagtgactttgcatttattacctcttcaagtctagttgccacatctggacactccaatgacaataggtaggttgacagaaaagcaaagtaagaaatataaaaacgttagaaatccatacctttagcaagaatacttttctattagtagggtttttccactctaggcattaaaaaaaaaaactttgttacataattcttatttcagagtgttttttcttaccaaaaagagaaaagcaaaaatgaaagttattcctaatatatgtaatttttattttaaagctattcagtcttttttaaactactactgttaacactgttagtttctctaggactaacaggcatctgatattgtctccatcattctcaacatttttattttattgcagtaggtttgggggaataggtagtgtttggttacatggataagttctttagtggtgattgctgagattttggtgcacccatcacctgagcagtgtacactgtacccagtgtgtagtcttttattcttcaccctcctcccacccctcccaagcccccagagtccattatatatcattctgatcctttgcatcctcatagcttagctcccacttacaagtgagaacatacgacatatgattttctactcctgagttacttcacttagaataatggcctctaactccatctgggttgctgcaaaatgtgattatctcattcctttttatgaagtattccatggtgtatatgtaccacattttctttatccatttgttggttgatggacatttaggttggttccatagttttgcaattgtgaattgtgctgctctaaacaggcatgtgcaagtgtctttttcatataatgacttcttttcctctgggtagatacccagtagtgggattgctggattgaatggtagttctgcttatagttctttaaggaatctccgtatactgtttttcatggtggttttactagtttacattcccaccatcagtgaggtgtccccttttcaccacctccatgccagcgtctattgttttttggttttttaattatggccattcttgcaggaataaggtggtatcgtattggagttttaatttgcattttcctggtaattagtggttttgagcattttttcctgtttgttggccatttgtattttgagaattatctgttcatgtcctttgctcgcttttgatgggattgttttttcttgttaagttccttgtagattctagatataagtcccttgtcagatatatacattgtattttctcccactctgcaggttgcctttttactcttgctgtgcagaagtgttttagtttaattaggtcccatttatttatttttgttgcatttgcctttgggttcttggtcatgaattctttaagtcaatgtctagagtagttttttttgatgttatcttctagaatttttatggtttcaagtgttagatttaagtttgacccatcttgagttaatttttgtataaggtgagagatgaggattcagggactaacaggtatttgacactgtccccatcattctcaacatttattttgacctcacatggttttcattagcaacacatgcccatgaataacatcttgtttccctgcagtggctaccacctggggatataaaagcattccttatactcaggaagtcatatcagtttcctggagtggcaatggaaaggagatggggtagaggatgcagagacgggcaggaccatgtgagatggaactgtgtagtttgaccctacccccatcctagttgggaatcactactctctataggtgtgagtgaacaaaaaagataagaatgaataagcaaaatatttgactgaaagacaggttgtccctgatgacgacttataacaatcatttatgatgtatttttgttattgagtttctttaaaagaaatgtttgcctctgggacacattaatatcacccggaaacagcctcattcatggtgagttaaggtctatgatttttaaaaatataccatgaaggaataatacaccatgaaggaatgctttcttggttttaattagtgaatccagtgagtgtttattgacaggttgaaaatggagaaatatttagaatgaatgactaaaaatttggaaagttaattagcatatctggcttccttgctgcagttaaagattatggtctcagaaatccaaaatagtctttatattctattcagaaaatatggtatggatagtggtactactaacaaggctatttaagaaattagttgcaaagtattcattgagcttaatagaaaataacatattttaaagaattaaacctcatcataaaatactttttgtctttttttcctttttgtggagatcaaggtcatgctgtattgctcaggcaggtctcaagctcctagggtcaagctatcctcccacctctacctccctaagtactgggattacaagcatgagccaccacacctggccctaaccataaaataaaacaaaggttaaccttattataatgactagaaatgtaaacagtgccatttaaatattattccttttaagacaatacttgccaaattagtgtcctaactctgtcttccacatagtaccacccaaaaagtgctccatgctcaagtaagtttggttaaatgaagtagattgtcagaaagacagaaagattctcagtcttttaatacactgatatgcattttgaaatatgtagttaattctcaattttattgcagaattctgcaaacagtggttaacattgcttacagattttctgcatgttaatttgaatctttaatcatattaaaatgcaaatactcctgggaaggataatgaacttcttaacttgtaactgaaaacattcacacattttctcatagtgtcgttgtttcaattacttacctgaaaagaactttttgtacggtacagcacttggctgggttaatactcaccaactttgagaaggttggtctctgctcttctgtatactttttatgaggcagtatcacttagggcttaaggtttaaactttctttttctctctgtgttcatttcatattgagattatggataaaaagtttgttctgacattgcttaacatttttctttaatcatgtgattacagaaattcaatgacttacaaaacaataaatgtaccttagaatgaaaaatgcatcagtaaggtctgtatttaaatgtggatgtagacatcataattaccaagacaagaaattgttttgagaaattctctgatgtttttcttcttcaggtttcacgtgccacgatcatggtgccacggtactgcagtatgcacccaaacagcaactcctaatctcggggggtaggaaaggacacgtctgcatttttgacatcaggcaaaggcagctcattcacacgttccaggcccatgactcagctaattaaggctctggccttggatccctatgaggaatattttaccacaggttcagcagaaggtaacataaaggtgagtcagtacaagaggttggaatgtgctaaagactgattggaaagagaaaaaacaaaaactccacattctttgaaataaagcttcactttatttcacttgggctactgcatggagatactgcatatctcaacactctgccgcctccccatgctcctgtatggttctttctaaactgttatggtcaatgagattatcaaactcattggactcaggccattagaaagctttaaagcattctattttgagtaaagtgtatgagtttaatgcatgaaattttttgatgacattagtttggctccttagaagcttctcccctctccctcagtactcttgtgtgtggtggaggtgacgtttccagtaagtgagctagtgcagatgctccttgactttatggtgggattatgtcccaacaaacccattataagttaaaaatattgttaaagttgaaaaacatactttcaacttaatattttcaacttactatgagtttattgagactaacctcaggataagccaaggagcgtgctgaatgcgtattgctttcacactgtcataaagtcaaaaagtcttgtcaaaccatcgtaagtaggggactgtctgtaccacactacttttacatagccttaggacctagctcagcatgaggaacacatttaactgaattaactcaaatagttaattgaattagagatgggctacatatggttaatatgaagccacaagaggatgtgaaggaaaatatggaaggaggacagtaaatgaatcgtgggagtggtgttatcatttcccacttagataagctcttaggaaagaggcagtgggtgggaaggttgggctttagtgagatcacttgggccaagggagcagaagggccatgtttttgcttttggtcttttcgtaatatatttttaactccttttgttttgcactaggtttggagattgacaggccatggcctaattcattcatttaaaagtgaacatgctaagcagtccatatttcgaaacattggggctggagtcatgcagattgacatcatccagggcaatcggctcttctcctgtggtgcagatggcacgctgaaaaccagggttttgcccaatgcttttaacatccctaacagaattcttgacattctataaagattggggttttatttttatatacatttcagttaaaaggcacactacagtcatcactaggcaattctgctttctaagcagttgtattgaaaacagagaatctctgtgtagaatttgaatatgacccaagctgagtattatctaaacaggttggtggaatgaatgcgcatgtaccttattatgctgacatactaaaaaaaataaaacctagtattgtatgaaggatagctattctttacagcatttagcaaacctgattcagaaaacatttgagattagcaaattagtaacttgaaataatgaaaaggacgtttataccaaattaaggaagaaaatgttgctgatttgggtttttcttcctgttcttaccactgactgaagcatgcctgcagtctcctcctctgttgaatgaaggataatcataaggtgtttgttaggagcgctagaccacctggaaaactttcttagctgtggagcagtgcgcagtgaccagttctctgctgtgagaggccgtttccattctttcctgctgaatatttttcctgttagtgtttatactgagctagtactgtaacttgcaaatgagtgcaaatttaaatgcaatgttttactcacaatttgcacattcacattttttggactgctagtttttctatttaaatatttgccttcatgttaggaatgtactatgtgaacatgacatatttgtagttaaccaaacacaccttcttagtccagtttagtactttttcttttcgtgtattcaaggttaaacacccaaacatttaaggatatgttgaaactacaccaatagagcatttcatatcataattaaaatgaatgttaggcttcttgtggccagttaatagttgatgagattggtgacattatttattgccacagcctattgtataaactatgcagagttaaatatttgcttgtaaaatattagccaatgttgtcattattttgatgtatttccttggttatgaccaaaaatatgttgagatactgaaactaatgtctgtgtgtttaaatgtttaccagcaaattgtcttatcatgttaatgagaatgttcaatgcctgtgtggtaaatagtaaatacaatggcataaaagtaactttctctgaagatgtgatgttcaggctgtgaaatatatatgtaaaagaaaaataaatgttatttgttagagtttttagtttgatactgtttttgaccattgagatttttaatttgataaaatgtttaactgttagagaatttgcaagctatttggcagtctattcattcataagtaagtatttactgaataccttctataccaaaagccattctaggaaatgggatacagtggagagccagacagagaaagcacacaatgttgagatttagcggggcaagagctaacctcactataccttctccagacagatttgaagtttattgaatgaagtactaacctcgtacccaaaactcaaatctgagtcttggctatttgcttgctcctaagtaagtaagggaagtcagaatatgcccactgataagaagagccaggaaaataagcttgtgagtgacatctcaatgcctaaagcaaaactgattcaaaggagctttcagaaaaaagggaagagaactttctctgtcaggtaaaagcagtaagagactctagattcaccttctagcttgaaacaactaaaa

SEQ ID NO: 857 - DNA, 1134 bp, Homo sapiens
aaggcaataggtcggggaaggtgatgaatgttctgtggggcatgtcaaattgggtggaacctctggggccttctgtgggagatgcccagggagcacagatttaggagatgggagcaactagtgtgatggtggtgagggctggttgaaaccctggggagtatgtggagctcatctgtgtttccacagagcttatctcccaggagatagccatcgggagtgccttgcctggcatgttcccctgctgaggtctgttacccaggagcctgcagacacaaagagcaggctggtaatgctgagaagcgaacattcagtacctgtcaccagaacccagcatgggtgttcaacactatctggtgactctgtgagaagaccctatgctcaggggatgaagtgtgttgcttgtgcaagagggatggagagagagtgttttccaagtatatgtgtgtgtgcatgtgtgtgtacccaggtggaaccctcctgcatgctcacatatgcctttatgaatactggaatctctaaacctaccatcatgcatctcgtcttagcttcctacctctctctttctacccctgcaacagccatgttattgccagtaacacatgagaagagtgagggagacctgtctgtagacaagctcagtgtgctgctaaggaggcaggcagcagttctgtcctcatgcgttcccattgtgccctgtcctgggatggcaaatgcaaggccagacaggctctgggctctctggtctgaccactaatagcatcttctcctcccgctaggctgaccagcctccaaggcaggactctgacaccagggttataaatgcatctgtctgggcacattatctaaattgttatgtatcaccctgggtaatggcaaaagtaaaaaccgctgttagctcagtgaataaatccttggtgctgatcaatcattgcacgacatagactcttttaataggcacaatttacacagaggcttggcagactgcttcgtcttctaattgccgatggaaaatggatgccgatctctgctgtgccgtaaaaatgtaaactataaatgacttaaaaacttgtgtgctcccttctccacccagcactcattttaaccttttatttagaaacaaaacaaagaaaaaaa

SEQ ID NO: 858 - DNA, 2332 bp, Homo sapiens
gaactcctcgatgaggaccatctacagtgcttttttttttctatctctctgtctctcagttctgctttcttctacagtatttgatgactggcatcccatttctataagctgggtccagaactttgggctcacaccttcctttgacgtgcaagtgccacagaccctgagatgtttcttcagatcagggtgccgctggcatccactgaacttgcttcagtttaagctgagcaccttcctgagaatcatttcattttatctttcattctgtagtgagaagaggcttcagcatgaatagtctagggacatgcaagatgtataaaatagaatggagttgtgaattaggttatatgagggagaaatttataaaaaatataaagcattgtaaagacaaatgcatgttacacaaaaccaggagaccacttcattttaagaggtacctgctggtctcagaagctttaagtgatttataatctagtcaacaataagtggcagatgaactgaaaatatatttgcatgaagttcttagttcagaggtaaagctaggatgctatgcatggcaacactggaagggaaagagcttttgaaatccaggtctgggcatttgctctaatcagaggtcaacatcttctctgccctcataacccactccccgccaggggtcctgtctcctagaccacacattagcagatataatatctgtcattctggtttctcattctctttccagaaaaatccagacatgattttattgcaagatggagagaaaaggagacagcatcacatgtcttatattagtcacaaaaactggatgggttttatttcaggcgctaattcttttgagaacacaagggaaactttgatcttaatctatttgatgtggttttaagtaaaggagcatcttgtgcttactttgaaagtgtttttttacttcgggcttggtcaaatattacattttgttccagagaaaaactcatttggaaggcagcatggagtatagaattagacatccctgggcttgaagcccatctcagccatgaactacctttatgactttcagctagttacttttcctcactcagcttcagtttcttcatttataaagcaagtgcctcaacatcgctttttgactctcttaatcttgtctacgcatttacagtagcccttttattactgattttttactactcctggccatggaatgacgagaagcccatgtgtcattctcagacgggggattttgattctaatgacagtcatggttgagaagtccactgtgttaaagtctcttcatttgaagcatctgatgtgaattttattttttgcttaaaccccagacatagatgttaagtttcaaaattatgtcatacattcactcccactacatactcattgaatgcttaccatgtacagactctgtgatagactatggaaatacatagaaagaaattccctgtttttaagaactttacctagtgtttagaaattgcatttaaaactgataattaaaatactatagaccttggcttaaaggatgcaccttgtaatctgtaatcatatttgtagttatatattgctttgaaaatacactgtagacagtaagacaaaaaaggaaataaaaagtacatgaattgcgaaggagaaaataaaattgtctttgttcacagatgacatgattgtctatgtagaaaatcccgaggaactgacaaaacaaacaaacaaacaaatctagaactaattagttctagattatagcaaggttgcaggatacaagcttaatacctgaaagtaaattcctttcctatataccagccatgaacaattggaatttgaaatcaaaatacaacaccattaatattattaccaaaagagagagagggagaaatatgtattatgctaacaaaagaagtaaaaaaggtatgtgagaaaaactacaaatctctgatgaaataaatcaaaggagatctaaattaatggaaagacaaactatgctaatggataagaaaactcaatcttgttatgtgtcagttcattccaatttgatccatagattcaatgcaatcctagaaagctactttgtggacatctgcaaactgattctaaggtttacacgaaaaggcaaaaagatgcaatagtcgaaacaatattgaagaagaacaaagaagtcggactcttcttgacttcaagtctttctataaagctacaataatcaaaatagtgtggcattggtgaaagaatagatagatcaaaaccaattcaatggagaaagggaaaagacagtctttttaacaaatggtgctggaactggagttccttatgaaaaagaaaaggaaag

SEQ ID NO: 859 - DNA, 115 bp, Homo sapiens
tttttgtatattttagtagagacggggtttcaccgtgttagccaggatggtctcgatctcctgaccttgtgatccatccgccttggcctcccaaagtgctgggatgacaggcgtg

SEQ ID NO: 860 - DNA, 115 bp, Homo sapiens
gctgaggcaggagaatcgcttgaatccaggaggcggaggttgcagtgagccaagatcgcgccactgtactccagcctggcaacacagcgagactccatctcaaaaaaaaaaaaaa

SEQ ID NO: 861 - DNA, 1561 bp, Homo sapiens
gtgtccagctgcctactttctgcccggatctctggctcctcatctctccggtctccgcagactaaagccctcgggatatgcagcagccatgcctgtgcacacgctgagccccggagccccgtccgcccccgccctaccttgccgcctgcggaccagggtccctggctacctgctacgggggccggcagatggtggagcccggaaaccgagcgctgtggagcgcctggaggccgacaaggccaagtacgtcaagagcctgcacgtggccaacacccgccaggagcctgtgcagcccctgctgtccaaacagccgctctttagccctgagactcgccgcacagtgctcacgcccagccgccgagccctgcctggcccctgccgacggccccagctggacctggacatcctcagcagcctcatcgacttgtgtgacagccccgtgtcccctgccgaggccagccgcactcctggacgggccgagggagccggccgtcctcccccagccacccctccgcgaccgccgcccagtacctctgcggtccgccgggtggacgtccgccccctgcccgcctcgcctgcccggccctgcccatcacccggccctgccgccgcctccagcccagcccggccgccgggtttgcaacgctccaagtcggacttgagcgagcgcttttctagggcagccgctgatctcgagcgcttttttaacttctgcggcctggacccggaggaggcgagagggttgggtgtggcccacctggcacgggccagctcggatatcgtgtccctggcagggcccagtgctgggccgggcagctctgaagggggctgctcccgccgcagctcggtgactgttgaggagcgggcccgggagcgcgttccctatggcgtgtcggtggtggagcgcaatgcccgcgtgatcaagtggttgtatgggctaaggcaggctcgggagagcccagcagctgaaggctaggcgccactgggcctggaattcgccacaggacggatcttacagaggcaagtggtccctggacctctcttgcatccattctctagacggccgtgtcagaggctccaccctgttgtgaacttggtatggaggcaaaggcttagaggctggaccagcattgttgggcaaggactgactctccaagggttttgttcttggctttggacacctgagaaccccctcctcccctcccccaatacaaggtttttgacatgagtgtactcctgcttagttcctcttgtggggctgcatttgcggtgctttgccctccccactgtgagtgaggggccaagggatctcctcaatcctgtctccccagcggctctgtttcctccttccttccttggcctctgtcctttgctgacttcctcttccttacccagcagaactcaccctggggtcggggcagtggggaggggcctatccactgctcttcctagtccttggcagctggcctaggtgggcagactataggagggactggttaggagtctgcattgctttgacttccctctccttggttaataaacacaaatgcttgtttctcaa

SEQ ID NO: 862 - DNA, 1561 bp, Homo sapiens
gtgtccagctgcctactttctgcccggatctctggctcctcatctctccggtctccgcagactaaagccctcgggatatgcagcagccatgcctgtgcacacgctgagccccggagccccgtccgcccccgccctaccttgccgcctgcggaccagggtccctggctacctgctacgggggccggcagatggtggagcccggaaaccgagcgctgtggagcgcctggaggccgacaaggccaagtacgtcaagagcctgcacgtggccaacacccgccaggagcctgtgcagcccctgctgtccaaacagccgctcttcagccctgagactcgccgcacagtgctcacgcccagccgccgagccctgcctggcccctgccgacggccccagctggacctggacatcctcagcagcctcatcgacttgtgtgacagccccgtgtcccctgccgaggccagccgcactcctggacgggccgagggagccggccgtcctcccccagccacccctccgcgaccgccgcccagtacctctgcggtccgccgggtggacgtccgccccctgcccgcctcgcctgcccggccctgcccatcacccggccctgccgccgcctccagcccagcccggccgccgggtttgcaacgctccaagtcggacttgagcgagcgcttttctagggcagccgctgatctcgagcgcttttttaacttctgcggcctggacccggaggaggcgagagggttgggtgtggcccacctggcacgggccagctcggatatcgtgtccctggcagggcccagtgctgggccgggcagctctgaagggggctgctcccgccgcagctcggtgactgttgaggagcgggcccgggagcgcgttccctatggcgtgtcggtggtggagcgcaatgcccgcgtgatcaagtggttgtatgggctaaggcaggctcgggagagcccagcagctgaaggctaggcgccactgggcctggaattcgccacaggacggatcttacagaggcaagtggtccctggacctctcttgcatccattctctagacggccgtgtcagaggctccaccctgttgtgaacttggtatggaggcaaaggcttagaggctggaccagcattgttgggcaaggactgactctccaagggttttgttcttggctttggacacctgagaaccccctcctcccctcccccaatacaaggtttttgacatgagtgtactcctgcttagttcctcttgtggggctgcatttgcggtgctttgccctccccactgtgagtgaggggccaagggatctcctcaatcctgtctccccagcggctctgtttcctccttccttccttggcctctgtcctttgctgacttcctcttccttacccagcagaactcaccctggggtcggggcagtggggaggggcctatccactgctcttcctagtccttggcagctggcctaggtgggcagactataggagggactggttaggagtctgcattgctttgacttccctctccttggttaataaacacaaatgcttgtttctcaa

SEQ ID NO: 863 - DNA, 1561 bp, Homo sapiens
gtgtccagctgcctactttctgcccggatctctggctcctcatctctccggtctccgcagactaaagccctcgggatatgcagcagccatgcctgtgcacacgctgagccccggagccccgtccgcccccgccctaccttgccgcctgcggaccagggtccctggctacctgctacgggggccggcagatggtggagcccggaaaccgagcgctgtggagcgcctggaggccgacaaggccaagtacgtcaagagcctgcacgtggccaacacccgccaggagcctgtgcagcccctgctgtccaaacagccgctcttcagccctgagactcgccgcacagtgctcacgcccagccgccgagccctgcctggcccctgccgacggccccagctggacctggacatcctcagcagcctcatcgacttgtgtgacagccccgtgtcccctgccgaggccagccgcactcctggacgggccgagggagccggccgtcctcccccagccacccctccgcgaccgccgcccagtacctctgcggtccgccgggtggacgtccgccccctgcccgcctcgcctgcccggccctgcccatcacccggccctgccgccgcctccagcccagcccggccgccgggtttgcaacgctccaagtcggacttgagcgagcgcttttctagggcagccgctgatctcgagcgcttttttaacttctgcggcctggacccggaggaggcgagagggttgggtgtggcccacctggcacgggccagctcggatatcgtgtccctggcagggcccagtgctgggccgggcagctctgaagggggctgctcccgccgcagctcggtgactgttgaggagcgggcccgggagcgcgttccctatggcgtgtcggtggtggagcgcaatgcccgcgtgatcaagtggttgtatgggctaaggcaggctcgggagagcccagcagctgaaggctaggcgccactgggcctggaattcgccacaggacggatcttacagaggcaagtggtccctggacctctcttgcatccattctctagacggccgtgtcagaggctccaccctgttgtgaacttggtatggaggcaaaggcttagaggctggaccagcattgttgggcaaggactgactctccaagggttttgttcttggctttggacacctgagaaccccctcctcccctcccccaatacaaggtttttgacatgagtgtactcctgcttagttcctcttgtggggctgcatttgcggtgctttgccctccccactgtgagtgaggggccaaggtatctcctcaatcctgtctccccagcggctctgtttcctccttccttccttggcctctgtcctttgctgacttcctcttccttacccagcagaactcaccctggggtcggggcagtggggaggggcctatccactgctcttcctagtccttggcagctggcctaggtgggcagactataggagggactggttaggagtctgcattgctttgacttccctctccttggttaataaacacaaatgcttgtttctcaa

SEQ ID NO: 864 - DNA, 161 bp, Homo sapiens
tcctctcttggtctcagctgggcctggttctcccggggcaggagggagggggtgtgggtggggcctgaggccccgcagctgctgccttgtgcctgctgattggctccttgtggaggggcgtggtctctaccttataatagggagggcgtcttatcctctca

SEQ ID NO: 865 - DNA, 285 bp, Homo sapiens
gggagggtctgttggggagagagcagggagggattcttggaagtggggaaggtgccagattgagtcttctccaatggttatggcttggtcttgggagggctccccctgttccaggattctggagcctcccgccttccctgcaggcctctgtggagggagcagggcggggggcttttgcactcctccctcccccaaccctgcagccttggggatctgtggaaacagcccctctattgttctgcctccagttggagtgtgagccctcggagggcctgcagctgctgc

SEQ ID NO: 866 - DNA, 415 bp, Homo sapiens
cgccccggtgccagcaccttcctttttggtggtcaggggcagagccacctactcgctgggttaacttaagcaagttgtttgcctctctgggcttcagtttctccatccaaaaaacggggctgttgagaggacctgaggttgagttgactggtgcgtagcacagagcctggagcctcccttgctccctttagcgcgtgccttgccctgtcttttctgctcaggttgcccaggtcttttttctctagcaccttttttcctctcttggtctcagctgggcctggttctcccggggcaggagggagggggtgtgggtggggcctgaggccccgcagctgctgccttgtgcctgctgattggctccttgtggaggggcgtggtctctaccttataatagggagggcgtcttatcctctca

SEQ ID NO: 867 - DNA, 285 bp, Homo sapiens; identical to SEQ ID NO: 865

SEQ ID NO: 868 - DNA, 285 bp, Homo sapiens; identical to SEQ ID NO: 865

SEQ ID NO: 869 - DNA, 415 bp, Homo sapiens; identical to SEQ ID NO: 866

SEQ ID NO: 870 - DNA, 1727 bp, Homo sapiens
aaatagaaaaacagaagagtagtgctttaagtaacccttgacactttacatcaatttacacatagacaataaatatgatcactattatacatatttatctagggtgggtagcgtggaactgtgaaaagagcaatagctttgaaccatgaagaccagcgttcaaatcccggctctccttttttctcattgggtcattttggggaaactacttaatagttaagtataggaagacagtcagaagactgggatctgggcaggatactaagaaggttgcaactgtatctgtaatggtaacttttgttttttcacctgaggaaaataaactaaaaataatgttttctaacatttagatattcaacacatggacaagtgtttaattattctttgtatattcctgttgtttgtaaaacagcttataatttttaaaactattttaaagggaatgaaagtaggaattacagggaggcagttatcaattagatataaggatgaattctctagtagagttagatgtaataaagatattgccacactctatccatatgtttatacatcaaatttttactgagtacatacatcatgagacaaaataaacttcctgtcacaaaaggtgcttgaccaaaactcaagaatcacctttcagggatactgttaaaagttttcccacatcagctaggagttagctctagagggcttttaagatctttggccatcccgaaattctatgcttgaaacacgttttctcatagaaacgctcctaccaaaggccagtgagagaactatcactttgtgaagaatttcagaatgcccactagctctcctgtagccctaaaaggtaatgagagtctacctgttcagactgagagctccagctgccttgtgctacagaagcagtaagtgcatgtaaaggacgccatatttctaagacaaaagcagtaacaatgactcaaggatgatgcccaatagacgatttaacctataactttgctaattgtcatattttcaaaacagccctatgggaagggtacacaaatgtctggggagtatttcctgctttttagcacccagggaactacaaccaggagcccagcttattttggattggggatggggatagacaagaagagatggggcagggagaagagacggctggtttattttacatacacatattttatttataatacatctctgtgtctaggcgtctctatgctgttctcataaaatctgaattatacaaataaaagtttaattcctggctgttttgaatgacttgggcctgtattacaaaattaatcagatacaattatactatcttcacaacaacaatcatctacattggttttgacaatgtacaaagtacttccatgtgtattatttcgtttatctttaccacaacctttgaagtaggaagacatgatgatccccattttactgcctaggacagagagacatcaggaggttaactgacttgttcactgagaaagcggaggagcacagactataactccaacagtttgaccccatactgcatacgcatcaggtccttaatcatgagactgtatgacccttctgagcctgggattcacttgcaactgggtattccctcttctacctcaggccccctataccttttcaaaaagtgtccttcactgtaaataatcttcctggtggtgaccctaaaggatctgacaacctggatctatgtaaaaaaaaaaaaaaaaaaa

SEQ ID NO: 871 - DNA, 1729 bp, Homo sapiens
aaatagaaaaacagaagagtagtgctttaagtaacccttgacactttacatcaatttacacatagacaataaatatgatcactattatacatatttatctagggtgggtagcgtggaactgtgaaaagagcaatagctttgaaccatgaagaccaacgttcaaatcccggctctccttttttctcattgggtcattttggggaaactacttaatagttaagtataggaagacagtcagaagactgggatctgggcaggatactaagaaggttgcaactgtatctgtaatggtaacttttgttttttcacctgaggaaaataaactaaaaataatgttttctaacatttagatattcaacacatggacaagtgtttaattattctttgtatattcctgttgtttgtaaaacagcttataatttttaaaactattttaaagggaatgaaagtaggaattacagggaggcagttatcaattagatataaggatgaattctctagtagagttagatgtaataaagatattgccacactctatccatatgtttatacatcaaatttttactgagtacatacatcatgagacaaaataaacttcctgtcacaaaaggtgcttgaccaaaactcaagaatcgcctttcagggatactgttaaaagttttcccacatcagctaggagttagctctagagggcttttaagatctttggccatcccgaaattctatgcttgaaacacattttctcatagaaacgctcctaccaaaggccagtgagagaactatcactttgcgaagaatttcagaatgcccactagctctcctgtagccctaaaaggtaatgagagtctacctgctcagactgagagctccggctgccttgtgctacagaagcagtaagtgcatgtaaaggacgccatatttctaagacaaaagcagtaacaatgactcaaggatgatgcccaatagacgatttaacctataactttgctaattgtcatattttcaaaacagccctatgggaagggtacacaaatgtctggggagtatttcctgctttttagcacccagggaactacaaccaggagcccagcttattttggattggggatggggatagacaagaagagatggggcaggaagaagagacggctggtttattttacatacacatattttatttataatacatctctgtgtctaggcgtctctatgctgttctcataaaatctgaattatacaaataaaaagtttaattcctggctgttttgaatgacttgggcctgtattacaaaattaatcagatacaattatactatcttcacaacaacaatcatctacattggttttgacaatgtacaaagtacttccatgtgtattatttcgtttatctttaccacaacctttgaagtaggaagacatgatgatccccattttactgcctaggacagagagacatcaggaggttaactgacttgttcactgagaaagcggaggagcacagactataactccaacagttcgaccccatactgcatacgcatcagggccttaatcatgagactgtatgacccttctgagcctgggattcacttgcaactgggtattccctcttctacctcaggccccctataccttttcaaaaagtgtccttcactgtaaataatcttcctggtggtgaccctaaaggatctgacaacctggatctatgtaaaaaaaaaaaaaaaaaaat

SEQ ID NO: 872 - DNA, 1333 bp, Homo sapiens
  misc_feature (36)..(36): n equals a,t,g, or c
gttgtttgtaaaacagcttataatttttaaaactanttttaaagggcaatgaaagtaggaattacagggaggcagttatcaattagatataaggatgaattctctagtagagttagatgtaataaagatattgccacactctatccatatgtttatacatcaaatttttactgagtacatacatcatgagacaaaataaacttcctgtcacaaaaggtgcttgaccaaaactcaagaatcacctttcagggatactgttaaaagttttcccacatcagctaggagttagctctagagggcttttaagatctttggccatcccgaaattctatgcttgaaacacgttttctcatagaaacgctcctaccaaaggccagtgagagaactatcactttgtgaagaatttcagaatgcccactagctctcctgtagccctaaaaggtaatgagagtctacctgttcagactgagagctccagctgccttgtgctacagaagcagtaagtgcatgtaaaggacgccatatttctaagacaaaagcagtaacaatgactcaaggatgatgcccaatagacgatttaacctataactttgctaattgtcatattttcaaaacagccctatgggaagggtacacaaatgtctggggagtatttcctgctttttagcacccatggaactacaaccaggagcccagcttattttggattggggatggggatagacaagaagagatggggcagggagaagagacggctggtttattttacatacacatattttatttataatacatctctgtgtctaggcgtctctatgctgttctcataaaatctgaattatacaaataaaagtttaattcctggctgttttgaatgacttgggcctgtattacaaaattaatcagatacaattatactatcttcacaacaacaatcatctacattggttttgacaatgtacaaagtacttccatgtgtattatttcgtttatctttaccacaacctttgaagtaggaagacatgatgatccccattttactgcctaggacagagagacatcaggaggttaactgacttgttcactgagaaagcggaggagcacagactataactccaacagtttgaccccatactgcatacgcatcaggtccttaatcatgagactgtatgacccttctgagcctgggattcacttgcaactgggtattccctcttctacctcaggccccctataccttttcaaaaagtgtccttcactgtaaataatcttcctggtggtgaccctaaaggatctgacaacctggatctatgtaaaaaaaaaaaaaaaaaaa

SEQ ID NO: 873 - DNA, 646 bp, Homo sapiens
gttaaagctaaatggcttagaatgaatcatgtctaaatattctgtataccaatcctacctatattatagggccctaaaagaagggtcagacgaagtatgctctaagtggctctcagtactgaatattcacagattaagttttacaaaaaggtaaagttttgtgataaccctcagataaaacagaaacatatgacctatgttttgacataaaacatacgtatttggcctgttctgaaaaatatgtataattttcacacaccacattctaccaaggaaaatgtcaaccggagccaaccaacttggtgttccactcatcaactcttttatgccaacatggtgtttctgcccttgtctcagaagccaactactgatacctgcttcagaaaactgactatgaattccacaaagtcctgcttttttcttttggattgtacaatcaacaaacaagtcacccttctaaaactctgtttctgaaattttaacataattcctgaagttccagagtctcttaaatgctaaaatattaacaataccattccattttttcccctaacactcagaagcatactgatacccatcctgtacacagccttttcttgcctgataacaagagcactaatgacagagctattgcatcaggttgatt

SEQ ID NO: 874 - DNA, 766 bp, Homo sapiens
tgtctcaaaggatgagttgagcttggataggcagtggggagaacacaaggcagtccaggcaggtggaacataagcgaaagggcagtgtgcccaccaggccaaagcaaagggcacatactgtcctgaaataggccacagagatgaggggaaataaaaagccgtctcaaggagatcttgaaagccagggtgagaagcctggagtttgcccctccaggatcctggctctcaatctggataagagtgaggggaagggaagtggaggtggggaggagggcagtgggggtggggagggccaggaactgctgactgggaagattattttctttgtgtattgcttaggttttgttttacttatttgttttcttgcagctttaacaaacatcagcgctgcatgtggaaacttggaaaagaaaaaaaaagctttaacaaacaaaaacacacatacctgagatgcacacggcaacctactagctcatggcaaacaggcctatatgttgataacctctgcattgcttaggaaataaaacactgcagattcttgagcaaggggaagtgcttctatctttgttcttcctttttctcctagtacatataacatctttactctggtctcagaatgtttcttccaaaccttaatggctctccccttctttttccttaacttcttcattccacccctggaataacgttctagtccagactagaaatacaacgtaaataaagactcaatcaatgccaacagtaggaggaggattaccacccagct

SEQ ID NO: 875 - DNA, 646 bp, Homo sapiens
gttaaagctaaatggcttagaatgaatcatgtctaaatattctgtataccaatcctacctatattatagggccctaaaagaagggtcagacaaagtatgctctaagtggctctcagtactgaatattcacaaattaagttttacaaaaaggtaaagttttgtgataaccctcagataaaacagaaacacatgacctatgttttgacataaaacatacgtatttggcctgttctgaaaaatatgtgtaattttcacacaccatattctaccaaggaaaatgtcaaccagagccaaccaacttggtgttccactcatcaactcttttatgccaacatggtgtttctgcccttgtctcagaagccaactactgatacctgcttcagaaaactgactatgaattccacaaagtcctgcttttttcttttggattgtacaatcaacaaacaagtcacccttctaaaactctgtttctgaaattttaacataattcctgaagttccagagtctcttaaatgctaaaatattaacaataccattccattttttcccctaacactcagaagcatactgatacccatcctgtacacagccttttcttgcctgataacaagagcactaatgacagagctattgcatcaggttgatt

SEQ ID NO: 876 - DNA, 766 bp, Homo sapiens
tgtctcaaaggatgagttgagcttggataggcagtggggagaacacaaggcagtccaggcaggtggaacataagcgaaagggcagtgtgcccaccaggccaaagcaaagggcacatactgtcctgaaataggccacagagatgaggggaaataaaaagccatctcaaggagatcttgaaagccagggtgagaagcctggagtttgcccctccaggatcctggctctcaatctggataagagtgaggggaagggaagtggaggtggggaggagggcagtgggggtggggagggccaggaactgctgactgggaagattattttctttgtgtattgcttaggtttcgttttacttatttgttttcttgcagctttaacaaacatcagcgctgcatggggaaacttggaaaagaaaaaaaaagctttaacaaacaaaaacacacatacctgagatgcacacggcaacctactagctcatggcaaacaggcctatatgttgataacctctgcattgcttaggaaataaaacactgcagattcttgagcaaggggaagtgcttctatctttgttcttcctttttctcctagtacatataacatctttactctggtctcagaatgtttcttccaaaccttaatggctctccccttctttttccttaatttcttcattccacccctggaataacgttctagtccagactagaaatacaacgtaaataaagactcaatcaatgccaacagtaggaggaggattaccacccagct

SEQ ID NO: 877 - DNA, 1044 bp, Homo sapiens
aggtgcctgtgatcccagctacttgggaggtggagcttgcagtgagccaagatctcgccagtgtatgccagcctgggcaacagtgtgagacttggtctcaaaacaaacaaacaaacaaaaaaacctaagtcccttcgctgtcaaatccttaggggagtaaattctgtcatctctgggtacctgttttcctgacttttcaaggtgttgaaaagagccttatgattcagccaaactttccaacagctctgatgggcagtttatcctcactcccactctacccagctctgttcctttcttctcttccactgtgtctgaatttgacagggtcccagtctcagtggtactgttcaaagtgtttataatgttactcttctgggcaatttttgcttcatacgtctccatccaatcaatgcatttcaggtgttgtggcagagagatttttgggggtgctggtacaagcaagacaggaataacccttaagtcacaataaaggcctctgcagggagtttttacattcacttcattttagacatcctcatttccctttcctacatcatgtaatttgtgtgattttttttttttagatggctattcatatgaaaaggaagcaatggaaaattggatcagcaaaaagaaacgtacaagtcccatgacaaatcttgttcttccttcagcggtacttacaccaaataggactctgaaaatggccatcaatagatggctggagacacaccaaaagtaaaattgttgatattgtattatttatattttcagtgatctcatttgaatgatttataggtaaatactaatcagacattattaaaagcaaaacaggaaaaaggtaaacttcttaaatttagttacctataaaaattgtcaattttcattctttaaaaaacacatggacttactataaaagcctttttgtactagtgaaaagaatcttcagctatatagaaataaagttatactttaaattgcagtgtcctaagttttttaaattcctcttactatcattcccaacagtgcccacatttattcttg

SEQ ID NO: 878 - DNA, 1044 bp, Homo sapiens; identical to SEQ ID NO: 877

SEQ ID NO: 879 - DNA, 318 bp, Homo sapiens
catctctctttataactaaaggttggactactctagaataacagatgtttacattctaggtaatagccattcattcaataactctttggaggccttttaaagagaccattttgtagcaaaatggttgtagattgtttatgattaaatggagaaaaatcacttcagatgttgaagcaatttttttggattttaagtttgcaggataacgatttttttcttattttccaaacctaggtacaagttagatgaaataaattctgagtaagtcaagttgactttgctgaaatatataacgtgacaaactctagcctcccttca

SEQ ID NO: 880 - DNA, 370 bp, Homo sapiens
gttacttatatgggaagggtgggtaacaaggattggacagggttagattagacccctctgaaggtaccttgttttatagttgtaactttttttttttttgagatggagtcttgctctgtcacccaggctggagtgcagtggtgcgatctcagctcactgcaacctctgtctcgcgggctcaagtgattctcctgcctcagcctcctgagtagctggaattacaggcacctgccaccatgcccagctaatttgtgtatttttagtagaggtagggttttgccatgttggccaggctggtctcaaacacctgacctcaagtggctccacccgccttggcctcccagagtgctgggatcacaggtgaaagcca

SEQ ID NO: 881 - DNA, 318 bp, Homo sapiens; identical to SEQ ID NO: 879

SEQ ID NO: 882 - DNA, 111 bp, Homo sapiens
agatggagtcttgctctgtcacccaggctggagtgcagtggtgcgatctcagctcactgcaacctctgtctcgcgggctcaagtgattctcctgcctcagcctcctgagta

SEQ ID NO: 883 - DNA, 9728 bp, Homo sapiens
caaagcagttctttgcaaacctttaacaatgacaaaagctacttactgtaaacctcacatgcagaccaaatcttgtcagacaggtaacttaggacaatgtgacttacatacttccccataccttcatctcacctaatgaaatacatgcttttcttgaatgacacctccaggatagattcatttggtcaatttgtcattttctgttgattttgcttacgtaattttagatattacctggagaatacagcatctcattttaaatcattatgatcaatctctgataaaggcctagaatacaaattatgtcaaaagtgaaaaaatactatctcgaaaatttccttggggataagactactaaaattataatgcttcctctgagaaaatcatctctttgcatgtggtttgtaatggtaacagttctgtttccttcctgtcagaatgaggtgaaattgttcaaatatgtattttttatgaaatttacagtgttacctgtgtattctaattatttgattaaataagcctttggggaggttgttgaggagagtatggtagggtatctggaactacatagtgtttttaaaggatgttttctttcttaaaaaaaaaaaatccctaaattctatttgtattttctgtaagttagaacagctgctgctttcttttttgtcctgttctttttaagttacctaacttaaaaaaactgggaattaaaaaaaaaaaggtactgaggtagttaaatttttctttatcaaattattttaacattgagcacctgtatataagtgttagttaacattgctccttaaatatgttttgtgtttttagatgatacttggaggacagaatatgttccagtgcctatccctgtgcctgtgtatatcccagttcctatgcacatgtacagtcagaatattcctgttcctactacagttcctgttcctgtaagtcacattttaagttctttctcattttgagatttagcagacacagttgggaaaacagtgtacagttgacccttgaacaacaagagtttgaactccatgcatccacatatgtggatgattttttttttttcccaataaatatgggcggccctctatattggcaggttccacatccgtgaccaaacacagactgaaaatacagtattctgcctgtaatcccagcactttgggaggctaaggtaggcgtatcttcagcccaggagttcaagaccagcctgggcaacatggtgacaccctgtctctactaaaaatgtaaaaattagccaggcacagtggcatatacctgtaatcccagctacttgggaggctgaggtaggaagattgcttgagcttgggagatggaggctgcaatgagccgtgattgcaccactgcactgcagcctggtctacaaagcaagtccttatctcaaaaaaaatgaaaataaaaaattatttgaggatgtgaaatctgtgtagaaggctgactgtaggggtgtggaacttgagtatgcatagactttggtatccatccacaggtggtcctggaaccaatcccctagaatactgaggataactctagttgcagttactagtttaatgaagctaataaaaccatctttacctttcttcgacagttaacttagatttggttgaatctctgttgtcatgattgattgctttgtgtatagtatgtatatgttcatcctcgagagtgacatttcgcggatgtctgtgcctgctctgtgcatattaagtttatatttgggttcattttcaaaaggaatatttgtgggccatgtgcagtggctcacgcctgtaatcccagcactttaggaggctgacatgggcagatcacctgaggtcaggagttcaagaccagactggccaacatggtgaaaccccctctctactaaaaatacaaaattagttgggcatggtggcacatgcctgtaatcccagctgctggggaggctgaggcaggagaatcgcttgaacccgggaggcggaggttgcagtgaactgagatagcgccattgcactccagcctgggcaacaagagtgaaattccatctcaaaaaaaaaaaagaaaaatatttgtgaagccataaggtttagaactgaaacatagaatttcatataaaatattattttatcccaaatcacttgcagtacttagaagaacactgtgtcagggcttggctattatagtcccctgggggacagaaatacttcaaaaattctttttctttaatttgaattccaaaaagtagatgcttgtattctaggctttcttatcacagttaacatcttagttttgtatgtgttcttttcaaagcttttatccagtgtgatattacaaagtagatcatgtgtcagagtaatttttaatttggaaaaataccttttaatgtttagtaaacctaactcaaaatgatttggttaattaggtgccagttcctgtttttctgcctgctccattggacagcagtgagaagattcctgcagcaattgaggagctaaaaagcaaggtttcttcagatgctcttgatacagagttgcttacaatgacggatatgatgagtgaagacgaggggaaaacagagacaaccaacatcaacagtgagctacactaaattataccttgcgaataagtgttaacattggttatttataagtattgttacagtactttccagggcatatcattttgtttcaacttatgtgggggtgaggaaagcattgtaacaaaaatgttttttatattaagagatctacactgtatttagccaggtgccctcagacagatatccgaagcaggaatttggtctttggtctctgttttaagcaggatttgacttgtaaaatcaactcaaaattattcttgttaatggagtagtgctgatgcaaaactataataacttgtagtagactctaatgatgatcaaaactcttattttgtaatagttatccctagttttttgttttgttttgtttttttttttagatgaactcttgctctgttgcccagggtggagtgtagtagcatgatcccggttcactgagatctctgcctcctgggttcaagctatgcttctgcctcagcctcctgagtagctggaattacaggcacgtgccaccacgcccagccaatttttgtctttttagtagagacagggcttccctatgttggccaggctgatctcaaactcctgacctcaggtgatccacctgcttcccaaagtgctggtattacaggtgtgagctaccacacccagcccctagttttcttttattgcttatactaataaaataatttgcattatctaaaccagagtttatcttaacctctgttagggcagtgcttgcgctacatggtataacgtgatgagtgtgttgtggatggttctaagtcacttagaatatttattttccacccttaaccctctcttgatacccaaagtcctatttcaaccttgagctaattcttacccttaccctagaggacaatcaaaatactataattttctctggatttaataatgagacagtgtttttgaagcactgtggtaaggagttgtgaaattagtgggttgcaaccagtgtttttgtttaagaaaagaaaaagctaagtggaatagggtaagagaaatgacagtgtgaatccctcatagaaagggtaagtattattttgtgaaaccagtgtgtatacagatgtctttctgttccccaccatcaccttgcagtatgtgctggataaaatgcatttcttgccatgattacaacacaaaaacacttgaaagcaactgatcgaaccattaaaaggcagttgttaatatgcatatattgaacaatctgagaaacctgggtcaaaattcaaagagtattgaaaactacagttgtctaccctcattagtttatttttgacaaaaagttgcttttagaaatactttacttgttgaagttgttttactatcaaagcatacctattagcttttgaagggagtcctcctgtaaaatttataggattaaaagttttcatgtgcttgtgactaattatgaggtttatagtggtttacattttgagatagttatatatataatatgcccttttcttttgtgacattatacgtatttttttatattgcatttaaaattaaatgacttgcttttgccagattaaatacagataccattggggttttctgttttgattcctaatgataatatggattgatttcaggtgtaattattgaaacagatataattggttcagaccttttgaagaactctgacccagagacacagtccagcatgcctgatgtaccatatgaaccagatttggatatcgaaatagattttcccagaggtactcaaaacctttatgactatggaatttagttatggagtcaactgtggttatgatcatttaccatttgatgtttgtgtcattgccttttagcagtgttcatattttttattcttgttattttttaaactcaccttaagagttaacttcatattttgttgttgtttttttttaaaaacccaccttaacagttaacttctggaatgagatcacttgagtccaggagttcaagaccagcctgggcaatgtggtgaaacactgtctctactaaaaatataaaaattagccaggcgtggtggtgcatgcctgtaatcccagctactcgggaggctgaggcaggaggattgcttgagcccaggaggtagaggttgcagtgagccgagattgtgctactgcactccagcttgggcagcagagtgagaccctgtctttaaaaaaaaaaaaaaaaaaaaaaattctagaagtaattcattatagaaagtttaaagaagtgtttgtgtcctttttaatttaaaaatgttgttagcatctgggtgcggtggcttatgcctgtaatcccagcactttgggaggccgaggtgggtggatcacctgaggtcaggagtttgagaccagcctggccaacgtcgtgaaaccccgtctctactgaaaatacaaaaattagctgggcgtggtggtgagtgcctgtaatcccagctactggggaggctgaggcagaattgcttgaactcaggaggcggaggttgcagtgagccaagactgcaccattgcactccaacctaggcaacaagagcaaaactctgtctcaaaaaatatatatatataaaaaatatataatatatataatacataaatataattttatatattatatacatcatgatgtatataatatataaatatatacaatatataatataaatataattttatatataatatatattttatatatattatatagtttttatatatataatatatatagttagcttttttttaagatcctttgaaaattaagttcaccttcaaaggaaaaattattttcaggtcttttgtaaaataagtgtgccccatttttcattattttcttaatccatggatggctaatgagcacactgagtagaatgtaaaacattagtttttggaaaaaacatttaatagattgaatcagatttgtaccaagaccatttagatcttgtaattggatttcagactataataatttttctggtatcatacattttcatgaaaattttatgttgatattcattttatatatgtttttaggagtttgaacagtgtttgtcagaattcacaaaccatgttaggtacaatgagtcatttactccccagcccagcctagattgtccccatgtatgaatgctggtttacatcctgtggttagttctttgttggctgtgtttatgtaaccctgtgctatttcatttaaaataaaagttctgatttggttgtcagctgctgaggagcttgatatggaaaatgaatttttattaccacctgtttttggcgaagaatatgaggaacagcccagacctcgatctaaaaaaaaggtacattcacttaatagcctatataacaatatttctctataggcaaacaaggatacagtgttcttttagtgtgcctgagaatatgggaacatattttgttttctaggttggaaaataatttattttctatttatatagaatatagtaataatatattactgctatttattactactatttattactatttctatttgtatagaaatagtaattattactatttctagtaataatagtagtaataatttatttctagtaataatttattactgtttctaagtaataaaaatatctcagatttagttgatacctcaactaaacttgtattgatacaaggtcaaaatagaaaacagttgctaaagtagtaagttcaattatttgacaaaaatttagactgttttctagggagctgttttttccacgattatttctgatgagatgatcagtggggttgaagtacacagtttattatttctggtctcttttaggcataccaacacacatagaaagacatgctggacagtttgatcattcaggtagaccaaatctacatgcattaacaagtgtaattgttataatattctgtcaactttctgtgtttctgacttccaacataaagcaggttttaaaaataccttaagaaagatagctttcacaaattgtccccaaaagaaagaaaaaaaaccggaaaagggagagaatacttggagtggaatgaaggtggacttctgcttgacaccaaacacaacaattaactcaaaatgagccatagacctaaatgtaagagctaacaatataaaactcttagaagaaaacataggcctaaatcttaatggccttatgttaggcagtttcttaggtaagataccaaacgcacagggaagaaaaggaaaaataaataaataaactggactacatcaaaattaaaaacttttgcattgcaaacagtgccatcaggaaagtgaaaagggggccaggcacagtggcacctgtaatcccagcacttacagcactcaggaaggctgaggcgggaagattggtggagcccaagagtttgagaccagcctgggcaacatagtgagacctctacaaaaactaaaaaataaaaaccagccaggcatggtggcacgtgcctgcagtcccagctacccaggaggaggatcgaggctgcagtgagctatgatcgtgccactgcactccagcttgggcaacagagcaagacctctcctcaaaacagaactccagcatggatacttacctggcaggggagataccgtgattacaaaactctagcatgggtgacagagcaaggccctgtcttaaaaaaacaaaaataaaacaataaaataaaaaagtgaaaagtacttaagtgtcactctctataaggtggagttgttgaaaagttcttcagtttctgttacagtaatatttagattattagtttattgtcttatatttattttctcatcattggtgactctcaccacagaatttaatatgattttgttgcacaaagtgatttatgtagaaacatcacatttcctggaatattaattgactgttgtcagattcaggaataccagtcagttcaaagcaaatacctatatttcattttttcttttctaatttcatgacacattaaacaaataactatatttttatgacagattaaacagataactatatttgtaattacagatgaccgttgtacaatgcagtggttgggctctgatcccccctgcacagtcacaaatttgtgtataacttttgactccctaaaaagttaagtactagtagcctactcttcactgagcccccctgcacagtcaaaaattcatgtattacttttgactccctaaaaagctaactactagtagcctactgttgactggaagccttgctgataacagttgattaacacatattttatatgctacatactgtatttttataataaagttagctagagaaaatgttatcaagagaatcatatgggagagaaaatatatttacgattcattaggtggaaatagatcatcctcattgtcttcaagttgagtaggctgaggaggaagaggagagaggttgatcttgctgtctcaggtggcacgattggaagaggtagaaggaggttggagaggcaggcacacagaaaaacatacgtgtccaagtggacccctgcagttcaaacccatgttgctcaagggtcaattgtaatttgcctttgttgagagatggcttgtataaagtaatgaaataatgtaggctttaaaaaagatattattatggtgttttttactaatagggagccaagagaaaggctgtatcaggataccagtctcatgatgatagttctgacaattcagaatgcagctttcctttcaaatatacgtatggcgtaaatgcatggaaacactgggtcaaaactaggcaacttgatgaagatcttctggtattagatgagttaaaatcttgtaagtgttttaattttgtttctcctaagtcctatttaaaatcaagatttctgttattgagtacctttaaatttaaaaaacataaatgtaacttaaaatacctgtaagaatgcattttattttacttcagagctcttacaaagaataacgtcagaaagtttcttaaccttaataagacgctaaataataacaattattttttattttatgtatttttagctaaatcagtaaagttaaaagaggatctactctctcacaccacagctgagcttaactatgggttagctcattttgtcaatgagatccgacggccaaatggagagaattatgcacctgacagcatctattacctttgccttggaatacaggaggttagtaatttgatggctgctttcaagtataacattaataagaaaagttgtggtagttcttgtttctgtagcattatggaacctttattgacttaccaagaaacacatctacaaagttgtatgtttgctgccatttatatataaatgataatcaggatgacattctttccttacccattgcagataagtgaattcacattataaggcatgatatgtagccacatctggctatagatccatgctgatctacatgtaaacagaaaaatgtcataactctgtaaataggtctgtttcactgtatgcttctgatgtgtttctaacttgttaaatagtataactactcattaattctttggctatttcataaaaagagatcattctttaggggtaaagataaacttcatccacatgtctatgaatttgttttctacagtaaacatggagatcaactttaaataatgacctctagttctgaacagattccacagatttgtgcccagaagtcagaaagaatctccaacttgacattctatgtattttgaaatatggtagatgacaggggagatctcttcagagttttgtttgtaggcctaaaaattcattttattctgctaacaggtgttagataatgaagtaaatcactgaagaaaactagaattgtcttaatttgtgttttttttactttttctttaggatagaaatttgcttaagattctgtaagtggtggtgcagatatatagtgcatggctataaatcactgtattcaaggaccatcatatatcttgcagtagcaacctaaaagatacgtgaataggtttacttttttcttattctcgttttataggtttacatgtactttgagcctcatgcttagatgataatataggtccaccattccacaaacctctgaaaagcagaatttttttcatgaaaacacagtaaacagtaaaacctaactt

SEQ ID NO: 884 - DNA, 9718 bp, Homo sapiens
caaagcagttctttgcaaacctttaacaatgacaaaagctacttactgtaaacctcacatgcagaccaaatcttgtcagacaggtaacttaggacaatgtgacttacatacttccccataccttcatctcacctaatgaaatacatgcttttcttgaatgacacctccaggatagattcatttggtcaatttgtcattttctgttgattttgcttacgtaattttagatattacctggagaatacagcatctcattttaaatcattatgatcaatctctgataaaggcctagaatacaaattatgtcaaaagtgaaaaaatactatctcgaaaatttccttggggataagactactaaaattataatgcttcctctgagaaaatcatctctttgcatgtggtttgtaatggtaacagttctgtttccttcctgtcagaatgaggtgaaattgttcaaatatgtattttttatgaaatttacagtgttacctgtgtattctaattatttgattaaataagcctttggggaggttgttgaggagagtatggtagggtatctggaactacatagtgtttttaaaggatgttttctttcttaaaaaaaaaaaatccctaaattctatttgtattttctgtaagttagaacagctgctgctttcttttttgtcctgttctttttaagttacctaacttaaaaaaactgggaattaaaaaaaaaaaaggtactgaggtagttaaatttttctttatcaaattattttaacattgagcacctgtatataagtgttagttaacattgctccttaaatatgttttgtgtttttagatgatacttggaggacagaatatgttccagtgcctatccctgtgcctgtgtatatcccagttcctatgcacatgtacagtcagaatattcctgttcctactacagttcctgttcctgtaagtcacattttaagttctttctcattttgagatttagcagacacagttgggaaaacagtgtacagttgacccttgaacaacaagagtttgaactccatgcatccacatatgtggatgattttttttttttcccaataaatatgggcggccctctatattggcaggttccacatccgtgaccaaacacagactgaaaatacagtattctgcctgtaatcccagcactttgggaggctaaggtaggcgtatcttcagcccaggagttcaagaccagcctgggcaacatggtgacaccctgtctctactaaaaatgtaaaaattagccaggcacagtggcatatacctgtaatcccagctacttgggaggctgaggtaggaagattgcttgagcttgggagatggaggctgcaatgagccgtgattgcaccactgcactgcagcctggtctacaaagcaagtccttatctcaaaaaaaatgaaaataaaaaattatttgaggatgtgaaatctgtgtagaaggctgactgtaggggtgtggaacttgagtatgcatagactttggtatccatccacaggtggtcctggaaccaatcccctagaatactgaggataactctagttgcagttactagtttaatgaagctaataaaaccatctttacctttcttcgacagttaacttagatttggttgaatctctgttgtcatgattgattgctttgtgtatagtatgtatatgttcatcctcgaggagtgactttcgcggatgtctgtgcctgctctgtgcatattaagtttatatttgggttcattttcaaaaggaatatttgtgggccatgtgcagtggctcacgcctgtaatcccagcactttaggaggctgacatgggcagatcacctgaggtcaggagttcaagaccagactggccaacatggtgaaaccccctctctactaaaaatacaaaattagttgggcatggtggcacatgcctgtaagcccagctgctggggaggctgaggcaggagaatcgcttgaacccgggaggcggaggttgcagtgaactgagatagcgccattgcactccagcctgggcaacaagagtgaaattccatctcaaaaaaaaaaaagaaaaatatttgtgaagccataaggtttagaactgaaacatagaatttcatataaaatattattttatcccaaatcacttgcagtacttagaagaacactgtgtcagggcttggctattatagtcccctgggggacagaaatacttcaaaaattctttttctttaatttgaattccaaaaagtagatgcttgtattctaggctttcttatcacagttaacatcttagttttgtatgtgttcttttcaaagcttttatccagtgtgatattacaaagtagatcatgtgtcagagtaatttttaatttggaaaaataccttttaatgtttagtaaacctaactcaaaatgatttggttaattaggtgccagttcctgtttttctgcctgctccattggacagcagtgagaagattcctgcagcaattgaggagctaaaaagcaaggtttcttcagatgctcttgatacagagttgcttacaatgacggatatgatgagtgaagacgaggggaaaacagagacaaccaacatcaacagtgagctacactaaattataccttgcgaataagtgttaacattggttatttataagtattgttacagtactttccagggcatatcattttgtttcaacttatgtgggggtgaggaaagcattgtaacaaaaatgttttttatattaagagatctacactgtatttagccaggtgccctcagacagatatccgaagcaggaatttggtctttggtctctgttttaagcaggatttgacttgtaaaatcaactcaaaattattcttgttaatggagtagtgctgatgcaaaactataataacttgtagtagactctaatgatgatcaaaactcttattttgtaatagttatccctagttttttgttttgttttgtttttttttttagatgaactcttgctctgttgcccagggtggagtgtagtagcatgatcccggttcactgagatctctgcctcctgggttcaagctatgcttctgcctcagcctcctgagtagctggaattacaggcacgtgccaccacgcccagccaatttttgtctttttagtagagacagggcttccctatgttggccaggctgatctcaaactcctgacctcaggtgatccacctgcttcccaaagtgctggtattacaggtgtgagctaccacacccagcccctagttttcttttattgcttatactaataaaataatttgcattatctaaaccagagtttatcttaacctctgttagggcagtgcttgcgctacatggtataatgtgatgagtgtgttgtggatggttctaagtcacttagaatatttattttccacccttaaccctctcttgatacccaaagtcctatttcaaccttgagctaattcttacccttaccctagaggacaatcaaaatactataattttctctggatttaataatgagacagtgtttttgaagcactgtggtaaggagttgtgaaattagtgggttgcaaccagtgtttttgtttaagaaaagaaaaagctaagtggaatagggtaagagaaatgacagtgtgaatccctcatagaaagggtaagtattattttgtgaaaccagtgtgtatacagatgtctttctgttccccaccatcaccttgcagtatgtgctggataaaatgcatttcttgccatgattacaacacaaaaacacttgaaagcaactgatcgaaccattaaaaggcagttgttaatatgcatatattgaacaatctgagaaacctgggtcaaaattcaaagagtattgaaaactacagttgtctaccctcattagtttatttttgacaaaaagttgcttttagaaatactttacttgttgaagttgttttactatcaaagcatacctattagcttttgaagggagtcctcctgtaaaatttataggattaaaagttttcatgtgcttgtgactaattatgaggtttatagtggtttacattttgagatagttatatatataatatgcccttttcttttgtgacattatacgtatttttttatattgcatttaaaattaaatgacttgcttttgccagattaaatacagataccattggggttttctgttttgattcctaatgataatatggattgatttcaggtgtaattattgaaacagatataattggttcagaccttttgaagaactctgacccagagacacagtccagcatgcctgatgtaccatatgaaccagatttggatatcgaaatagattttcccagaggtactcaaaacctttatgactatggaatttagttatggagtcaactgtggttatgatcatttaccatttgatgtttgtgtcattgccttttagcagtgttcatattttttattcttgttattttttaaactcaccttaagagttaacttcatattttgttgttgtttttttttaaaaacccaccttaacagttaacttctggaatgagatcacttgagtccaggagttcaagaccagcctgggcaatgtggtgaaacactgtctctactaaaaatataaaaattagccaggcgtggtggtgcatgcctgtaatcccagctactcgggaggctgaggcaggaggattgcttgagcccaggaggtagaggttgcagtgagccgagattgtgctactgcactccagcttgggcagcagagtgagaccctgtctttaaaaaaaaaaaattctagaagtaattcattatagaaagtttaaagaagtgtttgtgtcctttttaatttaaaaatgttgttagcatctgggtgcggtggcttatgcctgtaatcccagcactttgggaggccgaggtgggtggatcacctgaggtcaggagtttgagaccagcctggccaacgtggtgaaaccccgtctctactgaaaatacaaaaattagctgggcgtggtggtgagtgcctgtaatcccagctactggggaggctgaggcagaattgcttgaactcaggaggcggaggttgcagtgagccaagactgcaccattgcactccaacctaggcaacaagagcaaaactctgtctcaaaaaatatatatatataaaaaatatataatatatataatacataaatataattttatatataatatacatcatgatgtatataatatataaatatatacaatatataatataaatataattttatatataatatatattttatatatattatatagtttttatatatataatatatatagttagcttttttttaagatcctttgaaaattaagttcaccttcaaaggaaaaattattttcaggtcttttgtaaaataagtgtgccccatttttcattattttcttaatccatggatggctaatgagcacactgagtagaacgtaaaacattagtttttggaaaaaacatttaatagattgaatcagatttgtaccaagaccatttagatcttgtaattggatttcagactataataatttttctggtatcatacattttcatgaaaattttatgttgatattcattttatatatgtttttaggagtttgaacagtgtttgtcagaattcacaaaccatgttaggtacaatgagtcatttactccccagcccagcctagattgtccccatgcatgaatgctggtttacatcctgtggttagttctttgttggctgtgtttatgtaaccctgtgctatttcatttaaaataaaagttctgatttggttgtcagctgctgaggagcttgatatggaaaatgaatttttattaccacctgtttttggcgaagaatatgaggaacagcccagacctcgatctaaaaaaaaggtacattcacttaatagcctatataacaatatttctctataggcaaacaaggatacagtgttcttttagtgtgcctgagaatatgggaacatattttgttttctaggttggaaaataatttattttctatttatatagaatatagtaataatatattactgctatttattactactatttattactatttctatttgtatagaaatagtaattattactatttctagtaataatagtagtaataatttatttctagtaataatttattactgtttctaagtaataaaaatatctcagatttagttgatacctcaactaaacttgtattgatacaaggtcaaaatagaaaacagttgctaaagtagtaagttcaattatttgacaaaaatttagactgttttctagggagctgttttttccacgattatttctgatgagatgatcagtggggttgaagtacacagtttattatttctggtctcttttaggcataccaacacacatagaaagacatgctggacagtttgatcattcaggtagaccaaatctacatgcattaacaagtgtaattgttataatattctgtcaactttctgtgtttctgacttccaacataaagcaggttttaaaaataccttaagaaagatagctttcacaaattgtccccaaaagaaagaaaaaaaaccggaaaagggagagaatacttggagtggaatgaaggtggacttctgcttgacaccaaacacaacaattaactcaaaatgagccatagacctaaatgtaagagctaacaatataaaactcttagaagaaaacataggcctaaatcttaatggccttatgttaggcagtttcttaggtaagataccaaacgcacagggaagaaaaggaaaaataaataaataaactggactacatcaaaattaaaaacttttgcattgcaaacagtgccatcaggaaagtgaaaagggggccaggcacagtggcacctgtaatcccagcacttacagcactcaggaaggctgaggcgggaagattggtggagcccaagagtttgagaccagcctgggcaacatagtgagacctctacaaaaactaaaaaataaaaaccagccaggcatggtggcacgtgcctgcagtcccagctacccaggaggaggatcgaggctgcagtgagctatgatcgtgccactgcactccagcttgggcaacagagcaagacctctcctcaaaacagaactccagcatggatacttacctggcaggggagataccgtgattacaaaactctagcatgggtgacagagcaaggccctgtcttaaaaaaacaaaaataaaacaataaaataaaaaagtgaaaagtacttaagtgtcactctctataaggtggagttgttgaaaagttcttcagtttctgttacagtaatatttagattattagtttattgtcttatatttattttctcatcattggtgactctcaccacagaatttaatatgattttgttgcacaaagtgatttatgtagaaacatcacatttcctggaatattaattgactgttgtcagattcaggaataccagtcagttcaaagcaaatacctatatttcattttttcttttctaatttcatgacacattaaacaaataactatatttttatgacagattaaacagataactatatttgtaattacagatgaccgttgtacaatgcagtggttgggctctgatcccccctgcacagtcacaaatttgtgtataacttttgactccctaaaaagttaagtactagtagcctactcttcactgagcccccctgcacagtcaaaaattcatgtattacttttgactccctaaaaagctaactactagtagcctactgttgactggaagccttgctgataacagttgattaacacatattttatatgctacatactgtatttttataataaagttagctagagaaaatgttatcaagagaatcatatgggagagaaaatatatttacgattcattaggtggaaatagatcatcctcattgtcttcaagttgagtaggctgaggaggaagaggagagaggttgatcttgctgtctcaggtggcacgattggaagaggtagaaggaggttggagaggcaggcacacagaaaaacatacgtgtccaagtggacccctgcagttcaaacccatgttgctcaagggtcaattgtaatttgcctttgttgagagatggcttgtataaagtaatgaaataatgtaggctttaaaaaagatattattatggtgttttttactaatagggagccaagagaaaggctgtatcaggataccagtctcatgatgatagttctgacaattcagaatgcagctttcctttcaaatatacgtatggcgtaaatgcatggaaacactgggtcaaaactaggcaacttgatgaagatcttctggtattagatgagttaaaatcttgtaagtgttttaattttgtttctcctaagtcctatttaaaatcaagatttctgttattgagtacctttaaatttaaaaaacataaatgtaacttaaaatacctgtaagaatgcattttattttacttcagagctcttacaaagaataacgtcagaaagtttcttaaccttaataagacgctaaataataacaattattttttattttatgtatttttagctaaatcagtaaagttaaaagaggatctactctctcacaccacagctgagcttaactatgggttagctcattttgtcaatgagatccgacggccaaatggagagaattatgcacctgacagcatctattacctttgccttggaatacaggaggttagtaatttgatggctgctttcaagtataacattaataagaaaagttgtggtagttcttgtttctgtagcattatggaacctttattgacttaccaagaaacacatctacaaagttgtatgtttgctgccatttatatataaatgataatcaggatgacattctttccttacccattgcagataagtgaattcacattataaggcatgatatgtagccacatctggctatagatccatgctgatctacatgtaaacagaaaaatgtcataactctgtaaataggtctgtttcactgtatgcttctgatgtgtttctaacttgttaaatagtataactactcattaattctttggctatttcataaaaagagatcattctttaggggtaaagataaacttcatccacatgtctatgaatttgttttctacagtaaacatggagatcaactttaaataatgacctctagttctgaacagattccacagatttgtgcccagaagtcagaaagaatctccaacttgacattctatgtattttgaaatatggtagatgacaggggagatctcttcagagttttgtttgtaggcctaaaaattcattttattctgctaacaggtgttagataatgaagtaaatcactgaagaaaactagaattgtcttaatttgtgttttttttactttttctttaggatagaaatttgcttaagattctgtaagtggtggtgcagatatatagtgcatggctataaatcactgtattcaaggaccatcatatatcttgcagtagcaacctaaaagatacgtgaataggtttacttttttcttattctcgttttataggtttacatgtactttgagcctcatgcttagatgataatataggtccaccattccacaaacctctgaaaagcagaatttttttcatgaaaacacagtaaacagtaaaacctaactt

SEQ ID NO: 885 - DNA, 542 bp, Homo sapiens
gaaaacattgcgaccagaggctcacaggaacctaatcttgtatttcccattgcagcagtggttcagtagtcattgtttggggcaaccgtatagaacataactattccgaattatgtacctacattttctccgtatcaatagatgatgtggagagtaccttatttttactcccttacgctcatatcttccacttatttcagattttatttatgtggggttttgtcttgtttgcaatgcaaataatgctgcagtgaacttagtgtgaaatatctgagagactgcatctgtagaataggtttcagaaattgccattgctgggccgcaggaaatacacaacttaaagtttgaggatatctttggtaattgttttcatttttcttttcaaatttataatcatatttaaagccatttatccagcagagggagtgagagtatcagagagccataataactgttggatcttctttttctgaaataaatttaaaagtacccaagtattttcatagttcaggtttgcaaccttgattttgtacttaaaagtt

SEQ ID NO: 886 - DNA, 542 bp, Homo sapiens; identical to SEQ ID NO: 885

SEQ ID NO: 887 - DNA, 2845 bp, Homo sapiens
tttgtaaattgaattcaggtagtagtatcatccaccaatccatctgttgctttgttggtcttctgaaggggggatttaaaactctgaaacagtctgagcaccttgagagaaatcagaaacaagacaattatttgcagtgctgtcaaacaagccagaaggagaaaatcaaggtagaatgccccactttccagttgccttaggatagcaggctgcagcctcagacttgatcctgtcattctcctctgtctcccacatctgaattgataattgctgcaaaatgtcattagcctacacttcatccatcagggctcttggattcttacaccacgacttgctgtgcaaggtgtttattgcatcttcaaagtgaaactttaaattattattcaaacatttattttccttttgttttaaaaagagtccctacaatgatcacttctaagatttttttttaccttcccctctgcagcacacacagctattcaacaatgatttctaaaattcatatttcaaatttgtatctctccattttgaaacattatagaaagcatgggatgcttgagacaaatctggtttctcctttgaagtagctgttgacaacctactctcttgaaaagttagatataattcttaatcatgtttagtggaaatttgtttacctgttccatctgttttgctgtttcattgtaaggaagatgagaagtgttggaacagcttccctcccctaaaggtattctagcagaggcgagacagcaacttggcgggcatgttgcataggagttaagtaccagatggggaattgcccatgtgatggtgaagagtctctcacattgattttcttccttttctcctcttctctcctccttctcttctctcctctttctcttctcttctttctcttctcttctgtcttcctcttcctcttctcttcctctcctcttcctctttctctctcttcctttttctcttcctctttctctttctctttctcttctcttctctctctcttccttccttctttctttccttccttccttccttccttccttccttccttccttctttccctccctccctccctccctcctccctttttctttttctttctttttttttggtttggcagagtcttgctctgttgcccaggctgcagtgcagtggtgtgatctcggctcactgcaacctccacctcccgggttcaagcaattctcttgcctcagcttctccagttactgggactacaggtgcataccaccatgcccggctaatttttgtatttttagtagaggcggggttttgtcatgttggccaggctgatctcaaactcctgacctcaggtgatccgcctgcctcagccttccaaagtgctgagattacaggcatgagccgctgtacccggcctgattttctatgattctgcctttaaaagacagcacgtataccaagcctttttcagaaagcttttctcttaactccttctaatgctgaattttctctctattatcctcacccaattttggctgagagttagtgtacacaatttaacttcttagaaaaattccagtgtctatgcttatattgctcacttgaatcatttgaattagaaagggatctacaaataataaaagcaaagagtgcagacagattagggatagtaattcttaaagtgccatctatcccagatttccgttatagaccagcatatgtgtaattgtgcagtgggaggtaagtagtacccaggacattgcatgtacaatactttgaaacaaagtggcaacaaagatttcctggctcaggtatgcaccccagctgctggtttagatgaagtgctgagaatatttagaaaaagcgctttaaaaagcatctagagattatcatgaaaataattggagacaaagtcactaggctgctttgtgagaggcagcataccatggctctaaacccgttcacaaaaaacaatgttagagacattaggaattcaggttttgaaaatctttttttcgatttatttgtaatttacataccaaaaaaccacattaaaatagtcctcccttcaacatggctatcttttttcaagttttatatgcatagctctctcagcacttgaatggaaaaactgttacagcatttgggagttgtttttcttttagactttgcagatcttatctcaaggtgactaggaacccagagctaagtatctgtgaggcaatctctgcgaacgctgaacttacctagttggtttctatgaaatatgtagaatgcactgcagtagccattgtaagaaggtactataccggttttttggggcttgttgttgttgtttggtctgagaatgtactgccaacccctcttttataagagagaactgattttgatacatattttaaaatatgatagtacagagttaatggatgttaaaattttatttctttgttttggtaagtagattaaatcgagaatcatataatcagtacatttgagaattatataaccagtatataataatactggacacaaccatttgccatcttttcctgttatcatcccatagagtgggtggggagaatgaatagacataaacctagaataatgataaatggtttttaaaactctatattgaatacattccagctgataatgacttttctttttcaccttggtgatatcagcctcagggtaaaaaaaaaagtttcataaatcttttagttataaacaggaaagttttatattagtgtgtcatttcatttctagactgttgatggtgatgatgataaagaatttggagccaattttgatatatgaatgtattgcttttacatgtgatgattaaagctctccattagcagtt

SEQ ID NO: 888 - DNA, 2395 bp, Homo sapiens
gtgaatttgtggaagcaatctgcattcataactttgattggagaataaatggtatacatggtgctgtctttggaaaaggtaattatcagaattccaggtccaatttgagccccaggagagagtttcctctttttagaggaatataaatataaatatgaactgctttatggcaaatatatagagaatgataaaacaaatggattataattgcattgtgtacgagaatagatactagtgtttttgttttattttgtttttaagaaaatcataggtaagaatattagtgagcaataaggaatagtgggggaaaacttcacgttatttataatgttgtgaaaatccaagtttttcaatttatgtctggtactcaggcaaattaaggagagaggtgaggggaaaaggtatgggatgtacatttaattttctggtccttactttgtaccttgcttccagcaagagaactgactactgtttaggatcaggatatgctgcattttgaaaatgtaaattaatttaaaaaataactactaaaaaggccattccacttatttaactgtaaggaggtcagaaggtgttacataaatcccatcagtgttaggtaaatatgagactttgcaattcatttccacatttttttagagtaagaatgcccttaatgatgtctatctcttgtgtctaccatttcagaagagttggctgctttatcgagttttcatgtgtaggcagtgagccagtaaaatcatttttgttttggaatgctcagatatgaatagcattatactctctcagaaatcttttcatggatatgggattctattgtttccagaaatattactgaattgttatcccatatcatagaaatacggtttcttggggtttaaaagaatccctgtaggccatcggtttccactgtgctctctagagctttgctggatgttgacaagggaacagggtgaggaagtggtgaaaggaaatagaaacgggagggagggccaagcagtaaaactcagggccgggcatggtggctcacgcctgtaatcccagcagtttgggaggtcgaggcaggtggatcacctgaggtcaagagttcaagatcagcctggccaacatggtgaaaccctgtctctactaaaaaaatataaaaattagttgggtgtggtggcacgcgcctgtaatcccagctactcaggaggctgagggaggagaatcgcttgaacctgggaggcggaggttgcagtgagctgagatcgcgccactgcactccagcttgggagacagagcaagactctgtctcaaaaaaacagaacaaaacaaaactcaggtccaaccacacttttaatcattaaaccagttttatctgttttattaattgttttctttgtaagatttattttaaaaacagaagtctgatagctatattttggtgggggcaggggatggtgttggtggtgaggactggtctgtaccaacaaatctattcctatggcagtctatactacagctgtccataacagatggatttctattcttctcttaaagatctgcagatgaggaaattccacatctatttttattatacaattctatgcatctattctcctgacaaaatgtttttgcttgtttttaatatattcttcggagtaatcttggcttttcttggtcctctttgtttaaggaacctattttgctagagatgctgcttattccagtcgtttctgcaaagatgacataaagcatgggaacacattccaaattcatggtgtcagcttgcaacagcggcatctgtttagaacatataaatctatgtttcttgctcgagtgctaattggagattacataaacggagactccaaatacatgcgacctccttccaaagacgggagctatgtgaatttatatgacagctgtgtggatgatacctggaacccaaagatctttgtggtttttgatgccaaccaaatctatcctgagtacttgatagactttcattgatttcacttccaaatctcggtggtcaaggaagctttattcttttttgcaggaaggtttgctcttcagtcatctagccactaaatgttaattatctgatacttttgaaacagatatgaaaaaaagtggcctccatataaaaagacatactgacttcaaggttggtttttgttgttttgtttttgcctgtttcttgtagtcttgtttgttaaaagttgatatcattgatgttttaacacataggggtgaaagataccattcaaaatggaatcagctgagtctcaactaatgtggtcattgagatctttaaagtttacgtgtgtgttatcaggataaatgattttagtttaaatagacttattcgtataaatgttgaaaaaaaatacagacataaatgtgtcccttt

SEQ ID NO: 889 - DNA, 6713 bp, Homo sapiens
tagacagtgtctccttccttgaagatgctatcctctgaaataactgtgagtacagtcgcataaccctaatttaagatgtgcctgctgaacatgtgctctctcagatcctgtcctcagaatgcttttggctcttttctcggtatctcatccttagagtttttattttataccaatgttctggattacatacctggtccagaaatctagacttgtacttctttttaattgcctagttgacatttcaaccttgattaaagattgacaatatttatcaccttttcctcctggaacaatttaggttaatggtgcagccttttttcctagtcaaacatgccaggaagttcagggcaaagttcaactgctccctcttgtcttatgtggtcactgcttctgagaacatccaggaagttctttctatacttgaatcatcttctcagtcctttggggctttactgctatgagtatgaacttttgtgattatttatttcagtcttcatgatggtgctatcacattctacagttgtttatgtctgtacccagtaagctcttttgagggaaggaatcttgtcttctcctattcccagtcttgctcatgcataacagatgcccattcctcctaaatatgaatgctgtattataggcattagtaataatccctgttacattgcagtctgaagtatgttttaaacatacttttttaaagttagaactgacttacaagtgaatctattcttagattcttagatactaactactttagatatttagttatactcaataactaaatatcaatactcaatatctgtttcttctgaatttcagagtagttagaatgtttttcttaagactttgctagaaaggaactggtttgttagtaattctgccatcaactcatggagttataattgccaaatgagttaatttttatataccttaagctatcttgcctacaaaaagtaaaataaggcaggattcataaatgttacttgtaaattgagtgtttcacatgaggccaagtatgattttaacataatgaatatcattgctcctcatctgtaaatttgctgctgctttcatatgtgtatctgtacatagagttatgaatgaaaatccagtaatgccctaaagcaactttcttccatagggtcaaagctcacttaaggtaaacgtgtgaaaaaagtgactgcagtgtgtttgaaaccacaagctgtttctatgtcataaattaacatcagcttgcaagtctctgaaagaaccactcatttgtaattggtatatatgtcacaacctcccacattcctttagcccatctcagggaattattgaaacgctggcagggttagtttcattttgttttggtttttttgggtttttttgtttgtttgaggattttttttttcttttatcatttgtttgctcctgtgtaagcttaatatataatggcagtttggcatctgttcttcgcacatgtctaacccagcagagttatgcaaaaatgatgacttcattttaggtcaaattggctttgttcccagtcctcattgttggtcactttgttcagttctggtgactcattggtgatgttgatgaaactgctcagcctgccagctgggatattgatggcaggtctaggcttcattgttaggtagaagattgaatacttctcactttatacaaatttacattggctattgctcccatgtgttagctagtcttaacatgtttgttatttcgttatcttattagctgacatacggagtggtattattagtgtcgtactccttagcgtgagcatgacaattaagttaccttactaacagtgatgagtaaaccatactctgatctaaacccattgttaccaatgatgtgattatgaagttagctgaatctatggtctacatttgaagaaatagttcagaattctctactacattgtaagttacttgctaatagagattgggcattattatgtactactccccttctcacatcctacccaaagtacacaaggccgtagtaaaatactgttgctactaaaaactaaacatactgtggttgctaatgtcctttacatcttcagcctatagggaatggtacaggcagaaacaagcaccattaagtatattatcatcagtagtgagatctgtatgattaggatatctttgcttaagcccccaaaggaaaaattctctagcattaaaaacatggctggaacatagctaagcagttaacctaattagtagacttattgttaacgttcagtcctaaaaatgaaaagcttcagttgggagtagaaaatatactatgctggtatatagagcaacaaataccctgatgagataaaatgaagtagaaacttaccatttgacattatttgactttcatacatgctactgaaaagtctaggtttagctaagaagcataaataatggcagtacttgtagaggaaagaacataccagctaaaacaagaactgtaatgaatataatggaaagtgtttggagcttgaatacttggcttcaaaaatctggctttgccatttactgttaaaaaaatatctgagaatttatctcaggctgtaaaacagagaagtcataccaatttcaagaataaaatatgatataaagaattgttgaagccaaaatatccagaaataaacagaatggaaggtatcattgctataattatcttttcagaataaaaaatagagtattctttatcctttctgttgtctcacatgacaagcatgggatggtgaggaaatggcatattgcctatgttcgccgccccacccccttagttccaccaccccttcaccgtcacccccagttcactagtgtatcagaatgcatcttcagaattacacactgaagatacaaaaggtccagttggtaagctcatcagtaaataacaaggctttgaaatctgacaaattagctatttttgtaggaagataatagaacagcaagatggaagacaagtgatgagtatcatctgttttgaggttgacaaggtgtgacataaccctgttaatagacacaagtaaaagaaaatcatactaggattggatattagtgagcgagcaccgaccagtagaaacaacaacagcataaatctgttatttaagtatcccaataatgaggttaaaaaaaaaaaaaaaacagaacaaagcatgaaaagaccacaattagtgctggctatgcttagagaggagcagtctcttggtaaactcaggcagtgatgatgaacagaaaatggccgactgatactgtaatagaggcatagaactaaggacactccgtgagctggcataaatacaggggagtctttaagactgaaaaaagttcatgggtatgacacttaatatgactcaacattactgcagaattttaaagcaaacatgaaagcttgagaataaacactagtccctctacttcaagaaaaagcagaacctgtactagaacatgaagaacttagagatcaaaagacagccagaactatgatgaaatattttgaaagcagtgggcacatttttaaagattttttttggagaactttatgaggctgtatgtataattcctatatgtaattttataggaattcttaactgaaagtagttatcaactgctacttatcaggagcagtgttattagggattttaagttaggcatgtagaaaactttctgacaaaagggctattgaactccagccagttcccagtgaatctccaggaggcaccttagaagtcttcacaagctgaataccatgtctttagggtgtccaaatgcttctgtcttgggggagagatgagagatgactgggtgcctttccactcagaacacagtagaccactcactatttatgaccaagcctcacttcttttctattacagttacagattcttttttagtctggaagttagggtaaataaaatttgtatgtttgatttttctcttaggaatgttttctcatcttaactcttatgttatctttatggccaacagatttgctcagaatatatcatcaaaatatatgtattgtattttgtaaaggtgaaaggatcgaaataccactttgacagttataaaccagagtagatttgagaactgattgctcacatcacacttacgaatagtctcagaagcctttaagagaaacttacttctcaatggacacttagaagaatttgatgatcttactgtcataaaatcagtaatgaaattctcagcaaaactatttggtaaacattgcaccctgtatttttacccaacatcttgttatgaaaattatcaaatacattaaaaagttaaaataattttatagtgtactcactacctagatgctaattagcattacctatgcttgctttgtcacatatccattcatcatttcatattattatttgatgcattttaaattgcatatcattaactagagttcattgttggcttttttacataaaattagcatgcaatgaagtgcatagaaatatgtgttcactgaggtttggcaaatgcatatagtgctatggaaataggaaacgttatcaccaccctagaaagtttccacactgccctttccagtcaattcctgtccctacttgaccctcaaaggcaaccactgttcctttgtctaccataagatttttctgttctaacactttatataaatagagtcacgcaacatgtacgctcttctacaaggcttcatttttttattgctgttcttttttattgctgagtagtattccactgtatgacaatattacagtttgttttcttaatttcctattattgatagatacctgggctgtttccaggattggccattataaataaagctgctatgaccattcttacgtaagtctttgtgaacataggttttcatttctttgcagtaaattccttggattagaattgctgggtcacagggtagttttaaaagaaactgccatacctttttccagttcagttttattgtgccctgtattttgtattttgatgtgcataaaggtgtaaactatttttatgatccatattgaagtattagaagaagtgagtttggaataacaatggcattgttcatggtcaaggatgacaattggaactatctgaggaaagcaaagacctgtctgccccagacagctcctcaaggggttcctatgcctgaaactttagcaatatttcactccttgaaaggttaaagcccaaccatggtgatatgttagctagaagaaacagcactggtttgtttatgttactaactttcaccacccgttttcagtaggtaaagtaagactgatcattgacagaaaaggttatttctgtgatgaggttgagggggtagtggaaagcatgtattgctagtaagccccaggtacagctatgtgagagagagtcacctggacagggaagtcccccaaatggtggccagaagagcagaaaacggggtgggaaaaattctacctcacagttttgcataggggatagctatgcttttacgggacattttagcgtttaaaaatattttcaatattgtctctttattcaataccacccagctgtagttttttcacactctgatgactctcttatccactcttttacctctcccagctgttctattacatacagcattcacctgtattagtctatagaattataatcatctgtgtgtttctaatgctcattttcaaaaatatgtatggtttattcgatttttcctattaaaattttaagggctgggaaatttggcttctactgtaaatccttataatgttccacacattgtaaatatgcaataaaaatgttaacaactataatggcagcaggttttggtatgtatttctttgatatattgtcactttggacaataagtttgatttctgttaataaaagttgttcataaaatctagggagaattaagtcacactggtctctataagataatctgatgaattctgcatctttgaatcaatttgagttattttttgtaaaggtttaaattgtttctaacagtgttacctaaaacctttcattaaatcaaaaatgtaacttgtatattctgaaataacctggagtcttagaagacagaggcttctgcttccctctcccgtgaccccaacaatcccttcccacaggcttggcacagaagttcagtgctttctctacgtctcatgttgtcagaaataggttctcaccataatagacagtggtgaaatttccattgttcctactgagaagtccatttttaaggcatcaaaggtgaatgtgtatttagggatggaggaggcatattacaacaaagctgtatttaaaataacacaatcatatcatgctataaacaatagcagttccagaatggctactaaggattttggactgccagactttggaaattggcaagccttataccttgtccaatgaagttaagtacatttgagtgacagttcaacatacaagcaaaaaaatatatagaagacattgtacatttgttattaatggacatgtttactttacatgttagagtatccatccatctctaggttttccattagatgcttcattgtatccacaaacctgtttcaaaccattgaagtgatcttaccattgtgtttgttcaaaataaaattgggagaaaatgtgaatgagtcaatatcaacacttgacattcctgtctttttaatacattttattcttttgtttagaaaattt

SEQ ID NO: 890 - DNA, 15914 bp, Homo sapiens
aaattgcagcactcttgaatgctggcgatgaggaagatcttgtggaactaaagtcactgcagcaacaacttagtgatgtttgttatcgacaggccagtcagctggaatttaggcaaaatctcttacaagcagctcttgaatttcatggtgttgcccaagatgtaagtgtctattctgattcttttcttttcttcaaattatctgaacacttacctacacgtaatttttttcaggtttgcatgcctcctaaattatttttctgaaccaataaaatgaattactggtgggggtaatgagataaaattctttgattttttttaaaaacaagtattttttaagtcattctgcatgcaattcaaccttttattgtctaactagagtgttccaatctagtagaatattttattttgactccttctcaatgtttatgctttataacttagatggaaatggaagtctcaatacttttttgcattctgctgacctgaatgtacttctttgtcttcctggtgcatgcatctgtgtgttctgtcttccagataatgcatattctaatgattcgtccttgtcttgtaacagtgtagtcttttcaagtgtaattgtgataacctcattagatataaacctcattaatcattaaacactttagatgctgattacatcagggttatctctttggtgtccctctgctttagttgtctcagcagttggatggcttattagggatgttgtgcgtagatgtagcaccagctgatggagcatcgattcagcaaactttaaaactgcttgaagagaagctgaaaagtgttggtaagcagattttaaaaatgctgaaacataaggtttttttttttttaaatatcattaccatggttagacaattaagtcaacttacactgaactaattagtattattttcaggaaacagaaaaatagtataaaaagattttattcccttgaggggttataatttatgctgaaaattttatttttcatcgttagttagtcactcctcccttcactgggcctttacccttgcctgtttacccagctatatctacaggtgctgtgtcttgcatatactatgaacaattatttgtagtgcatgcatgaactgtaattagctgtgaaatgttctgtggtaaatcctgtatgcccaaaattgtgttttatgcaatgatttttgttgttgctttatcctaaccttgtgaaaaaatagttggtttggttttttggttcttgtctcaccaaactgggaatattgtcagattacccattctccaaggagtggggtacatttacattaaggggtccagttacattaagctgatgtaggcttgatgtcatttgacatcaaggcctttagaatttttctacagcaggaagcacagtgaactttcctaaaaggtcaggatgtgacaatgggaaggtggggagtcgtatcaaggggggacaaaaggggaaatggcaatggaagagaggaaacaggaacttaaggcagagaactagtaaaaagtggttgcacatgactaaaccaaattattgaaaactgccttagggaattggtttgaaaaatcacacttgtactgacattttacttgcttacagcctttgttattttatttttttgagatggagtcttgctgtgttgcccaggctggagtgcagtggtgccatcttggctcactgcaacctctgcctccccgattcaagtgattctcctgcctcagcttcctaagtagctgggattacaggcacctgccaccacgcccggctaatttttgtattggtagttatagtagacatggggttttgccatgttggccaggctggtctcgagctcctgacctctggtgatctgcccacctcagcctcccaaagtgctgggattacaggcatgagccagcgcacctggccagcctctgttattttaacagatggtatgcataatacatatttagtgtttaatatgacaaatgaattttcttttaaaatattagttttcttgagccacagtctttgtttaaaaaaaaaaagttcctttacacatgtaatttggagaattgtaaatataccctaattgttgcttcctatggtatagaagctagactgtatctttagtcacaatgttcaacatcctttgacattgatgatacattgctggagtgtcttaaaattttgcaaggcttatgcgcttttttaaacaacatgtttgccttgttctcctataagttggacagcataaaagcaggaagaaaaaacagaaaattgttttctattagaaataggaattttcatatttttcttctgctttcattttttaaaagtaattattgtctatggaaacccatgttttcaaaattccctttagggagaatttggcatgagagagagctccaattcgagttacatttaaagggttttattgcttgaaatgttcataggatggagtcttgggattccatcccaaggtggtttactgtacaaagctcctatacttgggatccaggtacaatatctgatgagacgatttgtttgagggagggaaagcgccttagttgtgtaagagattaaatctagtaacttttgttttagatgtgggattgcaaggtttgcgtgaaaaaggtcaaggtctcctggatcagatctccaatcaggcatcctgggcctatggaaaggatgtaaccattgaaaataaagaaaatgtggaccacatacaaggagtgatggaagatatgcagcttagaaaacaaaggcaaagtttgaccgttaattactttttactaaaataataacaatattagttaaaatgaagttatataacattttatatacagacaaaacgttcttaactgttatatagaagacatgtagtaggtttttggtgaatgtgataattactgtatataattttactaacatagtaataatttattcaattattaggtaccattttcctttttattgggttgtaaaaatttcaattatactcaactatttcaaattccatatccccagtgtagtctatgactcttctgctttaaaaaaaacttactgaagaataattttgctttttaaatttcatttagtttagagttgccattaaacttgtcatctacattgatctgtttcttcatctaaacttacagaatgtcacacattcattgttctcatatttgctgtaggaggattaaacagtggactagtgatgtttagtttcattttctataaaactaggaattcaaaagattctttgaaaactcagtttgcaatagcaactacaaagtattgcaaagtaaaggattaaaattatgcaatatacacaatctagcatggttatatgaaattttgcacacttaaaaattttatgatcatcaacaaaacttcacagaaagcttccttctgcatcacagagaaaacagtcatgaggcagaaatttcttccctcatatctgcaaacttacttttattctgtcaccacagaggatgatagagctctccgtttatatcaaaaaatatcaaagctgagcttccatttaggctctgattctgatcaccctcctgactcctaactccatcaaatcccattctctactctggttcctgccctcacttaaatgcttaaatttctcctgttttaaaaataataatcacacatatgggtacgtcttcctcttcaactctttgtcttttagcattagaactcttcctcacagctaagtcatttggataggtttacggtacattcatactacttcccccactacctccaatttattttcaactcttttcagtctgacttctaccctaactatttcattcagtgttgctcttaccagcattaccaacgtaataaatgctgtatcttacttaaagttcagagaatacttttagtcttgacttgcttaactgtgattagcgttaggcacaactgacttttcgatttcatctttcttgaaaacacatttatgatccttctctgtttcttcttggtttttgtcactgatttcttggccactagctaaagttactgcttccagggtttgttctgaggccagattcccttctttatatattctccctggacattctcactacttgaattactttctttaatagatcatggtttagtagttacagctctcccgtgctgtagacccataattccaattgcctacttagtgtcgcctgcgggatgccccatgtactgctgaaatctagtgtattagtccattcttgcattgctataaaaaactacctgagactgggtaatttttcttttcttttcttttttttttgaaacagagtctcgctctgtcactaggctggagtgcagtggtatgatcaaggctcactgcaacatccacctcctgggttcaagcgattcttctgcctcagccttccgagtagctgggactataggcgggtgccactgcacccggctaatttttgtatttttagtagagacggtgtttcaccatgtcagccaggctggtttcaaactcctgacctcgtgatccgcccactttggcttcccaaggtgctgggatcacaggcgtgagccaccgcacccggccgagactgggtaatttttaaagaaaagaggcttaatgggctcacagtcccacaggctgtacaggaagtatggctggggaaacctcaggaaacttccactcatgatggaaggtgaaggggaaacagacacatcttacttggatggagaaagaggaaaagagtgaagggggaggtgcggcacacttttaaacaaccagatctcatgagaactcacttactgacatgaaaacagcaagggggatatgtgcccccatgatccagtcatctcccaccaggccccttgtatttattagtccattctcacgctgctatacctaagacaggataatttataaaggaaagaagtttaattgactcacagctttgcagggctggagaggcctcaggaaacagaatcgtggtggaaggggaggcatctaatcacatcccaccaggctcctcctccaatattgggattacactttgatgttagatttaagtggggacacaaatccaaaacccagatccaaaccagatcacctagtatgtccagactggaatcattttcctctaaaacttgctctccttttttaatttcctgcctaggttaaagttaccatcagctaccaaacttgagatttatcctaaaatccttcatctttctcatcccttatagcttaatcaaatgtccaggttctgctgtctctgaatctcaaacatttatggtcaagatcttaaactcttatctgcctctggcctggctactctccagctttttgtatataagtgtaattttcataaagtacaacaattgtgtaaaacttccttcagtgacttcctgtttgctcagatggagtttgtcttcttggaataatgtaggagacccttcataatccaattcttgcataattttatcttctataacattcccataaaatcacacagttgtttttatctccctgaaagcatcatgctgtttcatgcatccatgactaagaatacttgtttccttgttttctgctcagtgaattcctacttactcttcaagactcagggatacttactttactttaggaagcctttttggacttctaaggcaagttagtcacttgctcctccctactctcataaaacattttaaatagctttataatagtacttataacatctctgcaaatgggagcatcttgatagtagagaccatatcttatattttccccagcacacattatctaatacctgaatacagtatatgtatgataccatcttcatcaaagtggcctacattgttttttagtttcatatttaaaaaataattatcacttcccttcagtccattgtagaattactttaaccaagttgaattttaatgtcatgttatagcttttattcagagcatctttatttttttttaaaaaaaagccttgtgatacctacttctatattgttattaagctttctttaaggacatcaagtatagtagagcacagtgtctggtaacatattatcggtatttgagactgcagtgggagtcccccatcccacctgcagtacgcagaatttcatggaaatgaaggaaatggaccagagttaagttaggttaagttgccttaaaaatttaaatggttatattatccaaaaagaccacaatgagattaaaaaaataatttgaattgtgtttctctacacccagaggtcagtagagtttttttgtttttttaagccctccatctagtttttaagaatgtagatggagggttttaaaaaaaatcagaattaaatattattttaggtactataatataatgaaaagcgttaatgtttaaatgtttctttagctgggcatagtgatgcacacctgtagtcttagctacttgggaggctgggatgtgaagatcatttaagcccaggagtttgaggttatagtgagctatgatggtaccactgcactccagcctaggtgcttgagtgagaccttgtctcaaaaaaatatcatcctgtatttgagaaacattacacttttatccttgaaacttgtttgatgctaaacagcaatggagattttttttgggttttagtgtactattgtccttacattttgctttaatattttgcagaatccatgctatctttaagagggtttgtcattgagtatcatttgggtattttgatgttttgatgtaacattgatataaatatccctaaaattcttacaaatcaatacaaaatacttgcattctccattgtttaggactaagtattttagtgtactataaaatacatgtaccaaatgatgatgttacaatagtaatcaataaaacagaaatgatgagttaaatttatgtttgggttcattagatgtgaagacatggtagatgtgcgaaggttaaagatgcttcagatggtgcagttgtttaaatgtgaagaagatgctgcccaggtaaggagcagtcagctacattatgtagttaacttttcttagaagattgattttatctaactacaaacaaaagtgtacttttcatggtcctaaaaaagtaaattcttgaagtcaggttctagtttatctatcttgttgaagaatacactttggtattcccagctagttgattgatctcatttaacttaattttctcaatgaaatcctctataatcctctattgagctagagattgggatcgtttattatttattattgttgattaggttgtcagttacatccaggataaaatctggtggagcacactgcattttgctctcttgcatctgcaagagaaatttcaataccagataaacaatttgatatattttgtcgttatcatcagagaacatcatttcagttagatatagataaaatttttgattttatgtagtaacacaaatctgtaatgcaatcctgatggatctacatacagaaatacatgatcttttattatgtgatattaattttaaaagaatgcttttcttcagtatgtcttgccttcagatttaaagaattttgaggagtaggacaggtcattaattcatgtagcttatcattgaatgaaataagcttttaagactttaggttataattaacggatttattaatcacatgatagtaatctctgtataaatgacattttgatacaataagtaaagagttctgaatccagcttcattgttatgtctttttgtttaggcagtagaatggctaagtgaacttctggatgctctgcttaagactcacatcagattgggcgatgatgctcaagaaacgaaagttttgctggaaaagcatagaaaatttgttgatgttgcacaggtgcaaaactggttatcttccttttccacaagctcagtgtttgaatagctttctgcatgattataatgtaactttaccttccaagtacaagaaggttagttttgttattccagaagtgtcacagaattaagaaaatgtcagctggtgcatcaaaactagcctgcataaacttgagagggtttacgtttccctgaatacatgttctgcatggtccctctgatttatgctatgtattacggcatttttaaggcaatccaactgttcatccacagaagttaatatgaaatggatgttaatatcagtaaataagaaacctcactttctgcatcacactagtgttagcataataatacagaacttttttgtggtgaaaagtgtctttttttttttttttaagacacagtcttcctctgttgcccaggctggactgcaatgatgcaatctcagctcactgcaacctctgcctcccaggttcaggcgattctcatgcctcagccacctgcgtagctgggattacaggcaccggccaccacgcctggctagtttttgtctttttagtagagatggggtttcaccatgttggccaggctggtcttaaactcctgacctcaagcgatccacccgcctcggcctcccaaagtgctgggattacaggagtgagccaccgcgccaagccaaaaagtatcttattttccctaataatgagttcacgttttaacagatgtagtttcctatatggaatataaagtgcctaatttcacctacttttgaaagtagttttgattaattcataagcagacattctttctggccagtgaaatttaagcagactgcgatgggggaaacagaataaagtggggaagcctaacagaaggagacttttttctaattaaaaattttaaaacaatttttgtttttttgagacaaggccttgctctgtcaattaggatatgatgtttcagcacaatcatagcgcactgcatcctcaaactcctgggctgaagtgatcctcctgcctcagcctccaaggtagctaggactacaggcaagtgtggccaaactcaactaatttttttcatttttttagagataggatcttgctatgttggccaggctggtcttgaactcctaacttcaagcaatccacccacctcagcctcccaaagtgctgggattacaggcatgaatcactgtgcctggccatgaaacttattataaactaacaaaaacatagcttcccctttattacttatacacacagatgatttgtagtaataagtgccactagatttattcagtattgatttctagtagtgtcacttaactgtaacgacaatcttcctgcacactttccccatccttctcttaagaattcttttattacaattttatgtttccttttcttttttagagcacttatgactatggcaggcagttgctacaggccacagttgtgttatgccaatctttgcgctgcacttctcggtcatctggggatacacttcctcgactgaacagagtatggaaacaatttacaatagcatctgaagagagagtacatagattggaaatggctattgcatttcactcaaatgctgaaaaggtttgcttgtgtttttgaaatgttattctcagtggtattgattatatgtgtttaaaatatgttaattttagtaatgtaactatatgactaatctatttttcaatatttatattagttccgttgttacggtttgtttagatataatacattgccttagagagttcaaattaaatttccttaatccttaccagtgctggagagccatgattggagaaatccagaaccacctggtagtcttcttctctttacacttctctcctcaccaagcctggtgtccagaatatgccctctgttctttagagtatcatgagttcaatctctttcgttatgcctggaagggaaactttttgctttggcaactgctattaattgtcacacattttttaaaaggcaccttgtgattttataaagtcgggacattaaaaaaataagaataaggacaaaagtaaaatgcttttttatatgtgttctttaaagattcattctagaatttattattcaatgaattaaggtcattaatttcagaaacaaaaaataaaatatgcagggttatttggacacattttcaatagaacttttttcttactcttcatagtaagaatttattctacccaagccttacatatccattctgaaaaggaactttattatgtagttaattttgttttgatctcttacaataaaagtttatatgtagggaatgttcgatacactttgagatattagcaaacctaacttgatccatggaacagatgttgcaaggaacctcaggaattaaagtttctatctgagttatgaagtacatctgttgggaagggtccatagttaactcattctcagctggtcattgaactccgtagatcagtgtttgattaacatgggcctaatgatgataagtggaagtatacaaaatagtgtaacttgtttatctactgattgtttcaatgagaattttttattattatgaagtatactattaacatagaaaacataccacaagtattctgtgcagtgagatttcataaagtgaacacacctgtgtactcagtgtactgttcaaaaaaaacagaacattaccagcacccagaagctccccccaccctgtgtaatcacagtactgctcccccaatcacctcactgtcaaagggtgacaattggcccaatgtctagcaccactgataacttttttttttttttttgagacagagtctcactctgttgcccaggctggagtgcagtggcatgatctcagctcactgcaggctccacctcctggagcttgttgtacaaacctaagtaaagccctttgttatcagatattactttcctcttgactgtattctattttataccataagcataaatataaataaccacaactataagcaaattgtatagtataatgattagaaaaatatctaaattaaatcttgagttttaaaatacaaaaatgtccgttcatgagtaatgctgaagtaaacatgattagataaagtgtaatgcaaaaaaaagttgtaaaaatgaatactttttattctctctctcaaattttgcagttcttgtggtttaatttaaatggtaatggttagggtggagtgaagaacagtatctcatcaaggactatagagattaccatatttgaattataacctaatcattttatggcagttaactcaagccagcagatcagttgttaaatattatcatctagctgagttgtcacatcagttatttatttgtactctttgttgttttttatttatataatttttcatttgtaatgtctatatgctctttgagaacacagtctatacctccttcaccttccagactgctacataaacataaactgttcaataaatggttacttaatataaatgaaagaatacttcttaaggacagattgaacttattttccaaatagtagtctagttattttctttcttggaaatcaccatattgttagtaggaattatgtatttcattttgtttgtttgaatttcttgaagaattttgccaataatagatcaatcttatatagtggtatacctgaagatgctaagaacaagaaaatgcctttaatctaccaaatttgtatgagcttgattccatttctgtgtctttcttttctctctttttttttgtggggtggggtgatcctctgaaactgcagacctgtctgtgtctcttgattgatgttgctcttttatttgttgcagattttgcaggactgtccagaagagcctgaagctattaatgatgaggagcaatttgatgaaattgaagcagttgggaaatcacttttggatagattaactgttccagtagtttatcctgatgggtatggggcatgttcttataattttattttttattggtgtggtcttaaagtgaaatcattaaaagaggaaatctattctttaaaaagccaagtaaattaggtttggtccacatctttaactcctacgatgaattagtttaaaatgaaaagaaatccacacctcttagccacagtaatggtacttgccaacaacagatgcgttacttcttgacagcttgttgtagaatgatcattgactagattaagacactgggttctagccttggctatgatggtggggaatagtgtgacttggggcttcattcaggaaaaggaagaggggacaagggattgatgtttagtgagttcacaatatatgccaagtaccaagtgaaacatttcaccttcattacttttgaccaaagaggaccaaaccagtatgattattcctgatttacaaatgaagaaactgaggcccacagagattaagtaaggctctcaggatttcacagcttctaagagttagcataaacttacaatctcaggtatgtctgtgtggctccaaacccattccctttgtactgtgttatatggcgttctaatttctttatgtgtgaaggaatggggtcctgattatcttacacctttccatttcaaatagtgataaaaatatgaaataatctgatgcaaaataaatggatcaggaaaagaatcaggaagagcttcagccgggcgtggtggctcacgcctgtaatcccagcagtttgggaggccaaagcgggcggatcacaaggtcaggagatggagaccatcctggctaacacggtgaaaacccatctctactaaaaagacaaaaaattagctgggcgtggtggcgggtgcctgtagtccagctactcgggaggctgaggcaggaaaatggcatgaacctgggaggcggagcttgcagtgagccgagatcacgccactgcgctccagcctgggtgacagagcaagactccgtctcaaaaaaaaaaaaaaaaagaatcaggaggagcttcatccctggtgatttagacctgattcttactgaaaataatttagagataatccagaggatatttaattcaaatgatagagtaaccaaaccagtgaataaaaatacaagtacctttaacgttgtggtatagtgtgatgagtctgtgcactctggagccagaggtctcagctctaccacttactcactgtaacaccttgggcaagccacttaacctttgtgcctcaattccctcatctaaaaactgccatgtaacactcataccttcctcaggttatgggggtgtgggaattacctgagctaaataagtataaagtacttaaaacagatctgacacataataagcactgctactactgtgccatgatcttccagtgattatttgggattgatattgaaaagatggcattttattcccttgaaataatattattcatagtctatacttacgttatctcaagccccacctaaacttgaacaatcagaggtagcctaaagtcacctaaagttgtattacacatctgcaataaaagacaacaaaattcagctagtagcagaattacaggcgtgcttctggttgttccattccaggatcccttaccctccctgattcctacatttcacagccagttgtcacacagtcagtctcctgttctacccatgtcagcctaggaacacctctccctggtatgcttgcttcagcttctcgtctgtgtttcacagatagtccatgtgtcatttcctcatccatccttttaagataaaagaatgttagtactatatattcaaagttcacacccacctttaatattttggaattgctgttttattccactttatattcatattaaaacttatgtatatctcttttaggtattttgctgaattaaatatttcccaaagttgtgtgtagtgttttccataattattaatataatggtaatctgtttatgccatgtatagtttgtttgacaggttagacagatttctcttttataccttctcctggtaaaataaaagagattgatggtctctctggattcactgctcaaagacctaggttcaaattctggtttttccctgggtgaccttgcttacatcatttaacttgctaggctccacttttctgatctgaaaaataaagagattaacctgataatttctaagaaatcttccagctctaaaaatattctgtgattctgaatacagtatctttgagagtagaataaaattaataattttatctgttaatgtaccaaaaaatgtcataacattaaaaagaatatttattttgcttgccagctctatagacaagtggtgtccccagccggtagcactcaagtacctgtataaattttatgtttgtgcatccttctggacccacatatttccagtgtttcattgttcaatttgttgctattatcataactacacatgatataacctttataccatcaatatatttttctcatcatgtcttaatgtattttatgccattttaaaaaatgtttttcctgctgaatttcctgctcaaacagtatgatcaccgatgaactgatatttacacataggctatctcatgtagattttttatggtaaatttttgcttctatttgtattcactgcagttaatagatttgtattaatctgaggtttttctgtgtgttttgatttttagaaccgaacaatattttgggagtccaagtgacatggcttctactgcagaaaacatcagagacaggatgaaactagttaatctcaaaaggcagcagctgagacatcctgaaatggtgaccacagagagctaatagctaccagctacctacagatttgcagttcataatcccgcatgttgtcaacatactacagcattagccaccacaccttaagatgcatttcacagccaaaataagtctcatttcttttcatgacacatttctctttacatgttaacaccttgctactaccaaggcataattacttaacatgcttcgaggctgtagattccaagtatcttaaaagaaggaactataaacattgcactgaaaacttgctttaaagctttacctgacctgtcagtttgtagacaaacaactgataataagctttgaatggtgctaataagagtaggaattctctctattaaaaagaaaaaaaaaagttgcccttcctccacaggtgatttagtaaatttagacagtagttaaactcttgttagtagacagtggtgtcctcaaaattttactttgtaattcttcagaattgattatttttattgtgtcaatacagagaaagcctttcagatctttgatatatcatagtcattaaaagaccttttcctatttgtattgataatgtattaaaagttgtttgtgcttaataaaagacttctttaaacatcttatttaatttagtagttacatcctatttccaaacatgagtgccttatttaaaagggcattcttaggactgtgaggatggtttaatatttgttttttcatggtggttgcatgtattttagacaggaaatacatatgtaagcatgtgtatataataaataagcatgttttatcatgaaaaattattgtgaacaatttagatctttaagaacttattaataatggaatactatttctaatttttctctttttcaacttgaaaaatattctcaaaattattaactaccctgaagatactttgtctttaggggaggagggctgaggaagaaggcatacataattacttcagtgtaatcctttatatcagagtaatctttcaggaactaaaatagcaattgttaataaaatttagtttctcattatagtctaaaagcaaaataaattctgaagtagtccaataacagaactgtatgacccctttagaaataaaatttatcatgaaatgctagttcttttaagtttgtattaagtttaaatggtaaaatgcatataatttaaattttatgtatttttatttcagaacattttttaaaatattaaaaattattttttagtcttgtagtcattacaaaattataaacgagttgtatactggttcctttttgaggtctacaaacatgctcgtgtatcttccaatgc

SEQ ID NO: 891 - DNA, 217 bp, Homo sapiens
gagaaaccaaacatgtttatgaaattaacacgttctgaaagattagcacatccaatctatggtaaattttagcaaattcaaaacagagtgaagcctgaactgtcattttccagcatctcatcactaagggaaggttgttttcaactggaaataactaattcctttatgctttattatttaaatttctgtttaagaataatgtgtagttattattttt

SEQ ID NO: 892 - DNA, 9925 bp, Homo sapiens
aacagtcaataaatacatgtttattgattaaactgaattataaaaaacaaaaccaaaaaaaaatttccttctactactaagccatgcaggcagagtccacaaagacaacttcctggccaaaacccagctgatccactgttggtataatcttaaaaaaaattacccatcaagaaagtcaatcgtgtgcagaagacaggaaccccagctctgctaaggctgtggctgctgcagagactaccaaagagtaggattaggttgtagatagacgtgaccaaccatagttcttgaactttctcaaaggcaaaggctgacttcaaagtccattgtctgtcaataaaatggcatcaggcaaaaagctggggaagagaagcccagatggatccttggttgttttcagatgtcaaaggttcacaaagctggccaagctgtttctggaagggacttttccagttcactatattatagtgtgctgggggatgaaaaaacaaacaaacaaaaaagcagggtggggtgggagaaatgggtggtaacaaatgtcacacctgtaccaccaggcccatcacatcttgagcattccccagtctgtgaaagcctattaaacagggtcacctagaaaaaaaacaagtttataaatccatttcccctcattttattaaatgttccacttatgtacattttaaagacgaaccatttacaagcttgtgcagtttgcctccttggctcacaggaggggaacattgtggaaagcctcaggataaacagaagacttggttttttgctccttttctctgtacggtacagtacgttttggtttacaaccatgagtacatacaattaaaaaaatccctcatgcaaattgtagaaaaaattttctttccttgaagctggcagtgaaaaataaagattcatgtcattttctttgtgcacacccctgtgcgcttcttcctgtcagattcttccctaagtattaagagaaataggggaaagccacagagcacgctggatttcaacaagtggtcttgtctttttaaagttcaacacttcttgaacaattagctcctggctgtaggaccagtaatcccttaaacaggcatgctctccatctaacaggatgaagttcagtaaagcagggactgcccctgggggcttacaggatgaagactcaaactgggaatggcttccaccctaaaactgtttgatcgcttcagtatctcttgcttgctaataacacctgtatgatcctttgtccagagggatggatggtgttgagaatggggaaaggggccaaggatcacaagtgcaaaaaatattgtttatgtcatgttttggagggaaggtggtgaggaaaagacaaatctattcattctggataattaaaggtggtttcatgcatttttaaagccacaattttatatctagggttgctgtagaaaccaacatctctggagagggaaggaaagaaaaggagaaggaagagagagttcagtgggactttttttccattttcatttttatataaaagtgttaagaccacaatgaaaaaagttttttatccatatatataataaaccagtttgtgagctacataatttgtctttcccatcttcagaaatgttctcacattaacaatgattagatagcatcatgcccaaagacattggccacacaataaaacaaacaaaaaaacccagtactatgatacaattgaggtaaaaggggaaacaaaaaaatttaacatttgcccacaaataattttttttctttttcttaattttgtcagaaaaataccaaacacagtgatttaaatttaaaaaaaaaaaaagtcacaaaaacctgtttttagcagaagtgaatgaccaatgggccagctccttggctcagacgtgattactattggttttcctaattaatccacaaatccacagggaagtgtaagtcaacttcaggggggagtggtggtataaaattaaaaaatagaaaccaaataccccacctggtatgcccccttttccctaagcccctttaccctccctcacatgtttccacccccactgcacaccccctaatgaccccaacactcaaatctccatcagatctaggtcagcttcttcaaagccatagaaagactcggtctcactttcaccctcaaagagctggtgaagactttcaggctcaattgtctcttcaggagatgatctgggtcgtggagtggaagactcagaatgttccccactcagcttcagttgctcctctagggaggcaattagctcctcctgcatgtcagcatttcttgtaggtgagttaatgttgccatcggggccaggcagaacactagccaccaggaaggagcgctgaactagctctggacagtccccaatgacacctagcacttcacccagccagacaagcaccagctgaagcaggacatcagaatcacatgcagtatctgccatttcccgagcctgttccttccattttttatgcaggaagttcttgacagttcttttgatgcatacatctaatggctgaattttggagctacagcctgctgggaccactgcaggcaaagtgctagaggcactaagcatagccagtacctcttctgacaagtgagtgcgatgacagtccatcacaagcatgcctttgctgcgctggcaagctgtgtgcttctgccacactcgagttgaccacagctccatgatctcgtcatcactgtagccactctcctttgcctctagcaatatggagtctggcatgttagcaggctgatccatctgccctctgtagaaaaccagggtgggaaggacagtgccatctgccagaatggctaggactacatcacaccaaggttcccctgtgcccactgtctgcagggcattctcctttcgatcatcactgctcagcacctctgtatccaggaacaaagagatctcatcaatagccacaatcatagacaagggtaagtcctggttgtgaatctgccgttgtacaaaatcaatgaagagtcctgcattctctgctacatccttaggtagggtgtgggccacagctcgccgggcatggggagtcaggtggtgccgcagcatgaaacgcacagcccactcataggagatcttaaaccccccttccaaagaacgtcctattttggtggccttctggaacaaggtctcctcatttacaggtagctgttgttcgcgctgggttagcacccactcagccagtttctcttctgcctcaaagctcagatatttgccctctagattctccccctgggaggcctggaaacgtcgaagccaacggcgaatacgtcgctggggatttcggaagtgttcagctgcctgttctgtattgcagcatagagcaaacagtactactcgaagcttcttcacagacagctgctcctttttgccaactccaccactaccaccaccacctgatgctagctcaggttcttgggtgactgggctcccttcatcctgatcatcaacattcagacattcggctccctctgtagccagcggtggaagggctaaagcctgcgggtgagtgggggttggtggtggggttgcagttgaggctggtgatgggagtgctggggctaagggagttagtagctcttcaggctcagctggggtggcccccgcagatttcacagtggcagctttgttagtggggaaggaaggaggagggtacatattcttcacgttccggtcatgcactcggtcacgagtctggccatgcctaaaggggtgaggagcaaagagaagaggagaaatctcagttcaactaggaaattgaaacaataatatgataataataataataataacagagtaaacacactgcaaaccagaaattaaattgtgaggtgagtttttgttaccttgagtgagctatccaagtgagtcctatggaaaatgaaacaacaaaaatagttagctcagtgaaaaaataagccctccaaagacagtgccctgggattcaacttactacatacaaatacgctgttcgcagtgaccagctttcccagttttatataaacttcaggtcggaaggtttctaattaggtccagcacatctcaacagtgaatgagtgaggccaagtaggtatgctcctgatgcatacagtacgaacctgtatcttttttcctccccttgctcaactaatccccttctctcctacttaccccgtggcaggatgctgctggatctgtgagaggggttgaataccaaatgcttggccatagcatcgcccacagaggtaacaaaggtacatgaagtgcaggccagcttgattccactaaaaaagagaattgagactatgtaagacaaacacagcagtgacacttgagaccattaagctttgaggcttaagaaagaaaaggaatgccctcccactttctcctttttctgaaattaattcacataaccacctctccaaataatgaaaaacctgaaaattaatgtaaaaacctgaaaaattaagatgctgccaataagttttttcttacctcacagaatttttaaacaaagccaaatacttggggctcttccgtggaacatgattgctgagaaagacaaagaagtggtatgagttacggagttctgctggctaagctagagatcaccagccagtgacaatgcccccaacaaaagagacacttcttcagtgcaccctaatctcaacctaagccagttttcctgtcaccatgcttcttaaactttaatatgcatacaagtcactgaggatctattaaaattcacattctggttcagtaggcctagggcggggctgagagtcagcatttctaacaagctcccacctaatactactggtacttgaatagcaaggccctatgaaattagagcacagaccatcaaaaccgaaaaaacagagcctctcactctgctaggagagaagaacaaatagctctaagagttgaaggaggaaacatattagaagcaggggagaaaatgaaatgagtgctcaagaatctggctggggccgggcgcagtggctcatgtctgtaatcccagcactttagggaggccgaggcaggtggatcacctgagctcaggagtttgagaccagcctggccaacaaggtgaaaccccgtctctactaaaaatacaaaaaaatcagccaggcatggtggtgcacacctataatcccagctacttgggaggctgagacaggagaatcacttgaacccaggaggcagaggttgcagtgagccaagatcatgctattgcactccagcctaggggacagagtgagaccctgtcttcaaaaaaaaaaaaaaaaaagaagaagaagaagaaaaaaagaatctgaactctcaagctaaaacactggttaaaaaccaacttacttgatcatgtggttggcataagctcgagaacagcaggtgctatagcgacacagagagcagtgtacgtaagtagggaaatgattagggaagtctgggatctcgaagctgcactccaggcatgtctgccggcccatgacactcctgtgggggagaaaaaaaaagaattctcattactgcctcatgggtccccaaaatgtaggattttcagacaacaaaccctgctaaaaagctaccagattgcactgtgtatcaggaataatcctggccacccagtccccacccgcccagcacttagaagaaggcgctgacattttcctaacagctctcttctggatgctgcgctggacagggggataaaggaagacaggcagagggtccattgaggaggtcagcggtgctgcctcctgcaaggcgctgggaggtgtatcattagaggatacaggaacagttcgtggctgccctcgggaagcccggattgtcacctgagaaccaagggaagtaacaatgagacatcacccacactaaatttcagaatactgaaaatctctattcctccctccctgggcctataaaagacactggcaaactctttaccttggtgcctggtttcaagccctccagctgcttgggtttacggaaggttttatggtgttgaagcttgtgttcaattttgtccttggcaaagagaaactgcagccggcatttgttgcagtgataaacatttctcttctgaagtgggggagggaaaaaaagagacaaaatcccttaaaggttcctaataaattttcttttttgaggagaaagcagatcaatgtcaaccatatcattcttcccacctttctgttgataatttaagagagtaagaaagaaatatgcaacatgaccacaaaacctaccattgagaatcatcacctcccatgatatcaaagaaagatggattctagtccaggatgactaagttctcaaatcatcctttcctgacttgttttaacaatttgaatgagtgatgtaacctttatttgtattatatctttacactgctgacaactggacattcttctggacattcttcattcttctttttttaaaaaaggacaatgtacatagtaaactaaagtcatacttttttttctatactcttccaactttgctttcaactccaacactcagtccccttccatacaaacaacttattaccagtttcctgagtatgctttcgtgggcagtctacacatataactgtatcacaaatacattcatatccaatcattacctgcctcgccccctttttttgagacagggtctctctctgtagcccaggctggagtgcagtggcatgttcatagctcactgcacgtcccaagtagctgggactacaggcacgtgccaccacgcccggctactttttgtatttttttgtagagacggggtgtcaccatgttgcccaggctggtcttcaactcctgggttcaagtgatctacctgccttggcctcccaaagtgttgggattacaggcgtgcatcactgtgcctggcccttacttttttccctttcctttttgtagagatgttgtctcaccatgttgcccaggctggactccacctcctgggctcaagtgatcctcccacctcagccctcttctttttctccttttaacacaaatgatagcacttgtctataccttgctgttttctcacttaacacatcagtatatacagatatgtctcctggtgagaccactttgaggattcagtctgcctagtattgaagtccttcaaaaatagaacccatgtctatgattttctttagtaggataacaaagctctgtaagcttaggctaagagacaatttccatgcccctatttggaaatacagttgtggtagacaatcagcagtcactactgtgcaaaggagactatgagtgtaatagggtacatatgtttgtgtgcatatgtatgtgactattaagcacacatgcactcatcttattctccattttgaatcctctcttatatactatatacctttcactctcctctagtggctctcttcttgtagtattttaaaacgaagtcatagcttttcatcttataaggaaaataaaagcaataaaaaactcttctttgccacttcttcctctggatttacctaccctgggtcctccctttttataaataaacttctttaaatacatcgtcttcatttccttacctctcattcatttgttctgctgaaatgtgacttccaccctaccaaccaacaaaatggctctcatcaatgttgctaaattaaaggcctgtttctaagtctctatgttgcttgacaccttcctgtaacatatgacattttgatcacacccttttctttaaaacactttcttctccccagtttccttaaggttaagactcttctggttttcctcctagtactatggtggttgctttatagataagggacttcaaatatcctaagccttctcttattctcaacagggttggggggcccatggtatttaagtttaaaatctataggatttatataacgctgattcctaaatcttttctacaacccagagttctctcacaggcttgagatctattatccaacagctacacttgacatccacagatactgctaacttacaatatccaagctcatgatctcccccctcacaaatatactttctctattgtttctatttcagcaaatagttccctcattcacccaactgcccaagacagaattttaggcactattcttaactactgcattgctaccttcacctaatccatctctacatcataaatatcacaaatcttctgaatatctctcaactctaccctctttttatttcaaaagccaatagccactatcatctctcacctaaactactgaaaaaggccttctagctagtttccctaactgtagtctcaatctcctttaatccattctctgcagtgcaggcagtataaagccttaactaaagctgaacacatcactccagggcttaaaacccctttagtggcttcccagtgaattcttttcatggcttaaaagatcctccatgatctgtccctgcctaacttccaacccctctgtctcttacaccctacactgaatctctctcaatttcttgaacctccacaattttgctttgtgccttgggcacactgttcttcgtcttatttcatctggctcattcttattcatccctcaggtattgaacaacacttctttctggaagccttactaggcacccagaatagctatgtgattttctatatcctataatttccccaacacagtactcttcatgttttattgtattgtttgccttgtttactactaaatctctagcatctagactagtacatggcacattaagtgaattcaataaatttctgcaaacatatgcatattataatctctgcccaaattatttgcctagctcagccctggccccagcatccatgtttaaaaaaaaaaaaaacaagagaatatgggaattgcttggtgcctagtacctggtgcctcatgtaatgctgttggaatgcattgccatttttgaagaccttcaggcaataagggcagagcagatgccgggtatcctcatggatcatccgaaaatggacatctacctcagagtagagtgaggagcgatattgacacacctgagtcacataggagggaaaataaggctaagaatgaagtgaacaactgagaggccttaaaaaaaaaggtagcaacaaaaatttttaaattaaaaaaaaaaagttttctcaaatgcatagaaatcaaattattttcctgactttgtaatgctgggctatgtttgtgataggtttagctattactttaaaaataggaagggacagaaagtctaagaataatccatgttctctaactaagaaaaataaagccttttctgtcaatttccaaagggcacgttcaggagacagacactcccttagaatatgcacatgttcccggctagtctacttgtggacatgttcttttatgtttttctcctgcatggaaaccctgaagataaactgtgtttactatttcttctgtacctactcagagttcctaaactgagtgtatgcagtaggtggtcaacaatattcattagtaaattctttgtattcttcctgagggcaaaactgctaaaactccctggagaaaaaggcaatacctggcaaacataaggcatctctccaggcttatgagtatccttcatatgctggagaaatagtggctcactttcaaacgcccattcacagatcttgcacttggctgtaagaagaaaagtaatcaataaatccacttgaaaataagacaaaagtcctgctgactcacaatctttattttctctgcctcctttattttgattttcaacaatcagtaaatcataggtcccttctgttctttctttaaatggctccaccttaacatatatgttgctgataatcttatgtacgtagctcagacttcttaccaaagcttcattctagattttatctataagacattttaaattggttattctatc

SEQ ID NO: 893 - DNA, 2386 bp, Homo sapiens
ctttcattttttctgctaccgtgactaagatggaagcgtttttggggtcgcggtccggactttgggcggggggtccggccccaggacagttttaccgcattccgtccactcccgattccttcatggatccggcgtctgcactttacagaggtccaatcacgcggacccagtaagttctcggcgctttcgtttgcgtagcgggagggaccgtggggcctggtgctgccggctggttttgagagcccgggaaggtgaggcggggaccccgggggcgcgcgaacggcaggggagctcagggcgcggagtcctggagaatgcagaataattggaaggaattatagaaaatcagaagcgcagctcagtgcgcggaaagagggcgcagtccatcccccctctcagctcccaccgttctcactctttaggaaccccatggtgaccgggacctcagtcctcggcgttaagttcgagggcggagtggtgattgccgcagacatgctgggatcctacggctccttggctcgtttccgcaacatctctcgcattatgcgagtcaacaacagtaccatgctgggtgcctctggcgactacgctgatttccagtatttgaagcaagttctcggccagatggtgtaagtcatccagagaacaggagagtggttcccaagtagagaggggagtcccctgttttttattcccttcgatgggatggggggacttgttgcagcgggggactgggagagttgttggaggtgggcgatctgtgtttgcaataaagtttttggcattaggtgtaaaatgggggaaggtgtggtaacttcttttggggatgggtggagaccccgacttaattctctcccttttctcacaaccaattccttttaaggattgatgaggagcttctgggagatggacacagctatagtcctagagctattcattcatggctgaccagggccatgtacagccggcgctcgaagatgaaccctttgtggaacaccatggtcatcggaggctatgctgatggagagaggttcatatgaatacaaataacttatttcctttaccacccaacctagtacctgtgtagtatctcttctgtctcttctccccaagtgaatcccactttaactcagaccccatggtccccttcttcagctaagatgaacctaaggtgaaatgagttttgacccattgtgtcctgttagcttcctcggttatgtggacatgcttggtgtagcctatgaagccccttcgctggccactggttatggtgcatacttggctcaggtaagtagtaagtctagaggtgggggaaagggaagacaaaaggaaatggattagtggttgtctgcttttctcctgaaattctgatatgagggatgggctgggatcgctattactgggcagatggttttctttgtagtctgggggctgtaggtgttgacactgattccagtgacaagatgacatgactgggagtcagtagacatgcaaagagaggacaccctagaacttcttcctgaagtggctcttagcttattttctaagcagagttcattctggtgaggcaagaagtagaatgtcatctttcactctaatgctttttataccatagatttgagacaactagcctgttattcagcccaatatccccccatggttttcccccaatctccctagcctctgctgcgagaagttctggagaagcagccagtgctaagccagaccgaggcccgcgacttagtagaacgctgcatgcgagtgctgtactaccgagatgcccgttcttacaaccgggtgagggatgtgctgggaacctaattggcgggctctggctacttgcaatccctgggtctctatgctttgaagaacagattgccttacttgtgtgactcctattttcacattggggaagacctccacctgacctttcatttaaggacttaaggcgtgggcattattgaatgctctgctttcttccagtttcaaaccgccactgtcaccgaaaaaggtgttgaaatagagggaccattgtctacagagaccaactgggatattgcccacatgatcaggtgagtaatagggaaaaaattggtgacagacttgggaggtctttggcttacactaagctgggcttttctgggaggctcacccaggaaaattttctgggtggaaagttttggttggacagtacagctatttttaggaattgatccctttatgcttcacaattttattattctgtcttccttttttagtggctttgaatgaaatacagatgcattatccagaactgaagttgccctacttttaactttgaacttggctagttcaaagatagactcttcttttgtaaagtaaataaattcttcaaaatgcttgctga

SEQ ID NO: 894 - DNA, 334 bp, Homo sapiens
atttttgtcactttaatggaattagtttcaagtttttgcaaatatgaaaactggaagcttaaagccttgggcatttactggacaatgtctaacctccccccgcccccagccccctacaccccagccaaagaaatatgaataaagttgaaataattcttttttctttttttaactaccgagaaccctggatttttgttttgagacagagtctcgttctgtctcgcacgctagagcgcagtggctcaatcatggctcactgcaaccctgacctcccaagctcaagcaatcctcccatctcagcctcccaaagtaccagaattacaggtatgagcca

SEQ ID NO: 895 - DNA, 6677 bp, Homo sapiens
tggtgaaatgcaacttcaatgtggaggaggccctgcgaaggctgcggttcaacgtgaaggtgatccgaggtgagcagcggtctgggccttccttccgctgcggccccgccctgggcactgctgaccgttctccccggcctgggccttccttccgctgcggccccgccctgggcgccgctgaccgttctccccggcctgggccttccttccgctgcggccccgccctgggcgccgctgactgttctccccggcctgggccttccttccgctgcggccccgccctgggcaccactgaccgttctccccggccgtgtttgcagatgggctctgtgcttggagtgaagaggagtgcaggaactttgagcacggcttccgtgtgcatggaaagaactttcacctgatccaggccaacaaggtgcggactccactgccaggctccaccgggggcttctcgatctggggaggggctcagggtccgcaggcacacagcacacggccgactggaggcctggagccccgtgtcctgtgtccgcctcctcaccgtgtgcccattgctgtcttctgcattttttgctactgactgctgtgggcccctttcctgtccccacaagaacaaggctctggctttgggaaagaatgtggcaaaagctgaattctagtagttgtttctgcctcacattccaccccagggccctgggcacctcatcttcaagtctgtgtcctctgagcagagcctgctggctcagtgtccagcattggccccacagcagaacccctgacacctggagaccaggggtctcctggttccctcctccagggacccaggtcctgccacccgggacaaaccctcatgacaggcaggtgctgccaagtgccggggccttctgcccttccttagaccttccccacgtcctctgtgggtctctgcatgtctgcagcagtgccctctgccctgtggcttcttgagtggtaacttccaagccagcctcttggcagtcagacatctctggctgaaaaccttcccatggctctgaccagtggcttctccgcctctgtccacgccccggttgggcactgagtcccttcaggaccagtgggctgtggccttgttgccgagccttgcttctgcctcgtgtcctgggaccgtgctccatttggggcccgatgtcgtccactgaagggcttgggtgaggaggcacctgcccggggctggttgtacggctcaggacattgctcaggtgactgtgcggtgccgtgcgcagcagcgatggactgtccttgtcagactccagcaccacgtggtgttttgattggagacagcggggcgaggtgtggctggagtgtggtgctcccaggctacacttggagcccctgtcaagtttctgtagctccgggccgtgtttctggagttgtgggccgtgtttctggactcctggccgtgtttctacagctccaggctgtgtttctggactctgggccgtgtttctatggactccgtgtttctgtagctccgggctgtgtttctacagctccgggcccatgttcctatagctccgggccgtgtttctatagctctgggctgtgtttctggagcttcgggctgtgtttctggactctgggctgtttctatagctccgggctgtgtttctatagctcccggctgtgtttctgcagctcccggccgtgtttctatagctccgggccgtgtttctgcagctccgggccgtgtttctatagctcagggccgcgtttttgtaactcccggccgtgtttctggagctccgggcaggtcctggcccagccgcgaggggccgtgtgtagccagcacacgttggtcagcctgagccagtgcgtatttcaccctggcccttcacagaagagctccctcgtggcgtgcgtttgaggtttgccctgcagggaggttgtctcggtctcgcccccaggcaggaccccacgttgttctcgcagcggtgagcatggggcatcctcgttctgggtggcggtgggttagttggcccagagcatgtccaggtgagggggtcttttccgccatcaccagcagtggccacagcctcaagctctctgtgggatgagcctcccgggtggagatgttggaggtgttgccaggtgtgcgcccagctctgtgccaggtgccacatggaacacacttgctgtgtgtcccttctcgtgtccctgaagccttgtgtgcgtgtgtgtgtgtgtcccttctcgtctccctgaagccttgtgtgcgtgtgtgtgtgtgtcccttctcgtctccctgaagccttgtgtgcgtgtgtgtgtctcttctcgtctccctgaagccttgtgtgcgtgtgtgtgtgtgtcccttctcgtgtcctgaagccttgtgtgcgtgtgtgtcccttctcgtctccctgaagccttgtgtgcgtgtgtgtgtgtgtccctatctcgtctccctgaagccttgtgtgtgtgtgtgtgtgtcccttctacgtctccctgaagccttgtgtgcgtgtgtgtgtgtccttctcgtgtccctgaagcctatgtgtgcgtgtgtgtgtcccttctcgtctccctgaagccttgtgtgtgtgtgtgtgtgtgtgtcccttctcgtctccctgaagccttgtgtgcgtgtgtgtgtcccttctcgtctccctgaagccttgtgtgtgtgtgtgtgtgtgtcccttctcgtctccctgaagcctgtgtgcatgtgtgtttggccctttatgtgctacgttgggaattttgtcgggttcacagaacccatgtgtccttctgcggtgtcttctgtgcacttgggaagcattcgctgggccctggagggatgtgttcggtgggaaagcaggcgccgcgggcttgtgcctcttcctcccggggaaggggctcagtccaggagtctgtggacccgggggttgtcactcccactcccaccccgggcctgtgagaagcaggcagatgaggtggacgcaactggcccgtggctcatggtctgggatggggtgggtgagcagtagacagaggcctggagggtacgtttgtctggctgatgctacagaagggaaaggggtctcaagccaggagctggagggctctgagggggcttgaaacaggaggcagtgccacagtgctccgagcccctgttccctgtggtgggcatagcctgtggcctgttagggtcatgggtcggggggtcttgcgttatctgagagtggtgggtgctgtgctccttctgtgctgtcccggggtcccaggacgtcctgggatcgtggtgcaggtgctggggctgggcagccggggacagagatggctcctgacccctccccgcaggtgcgcacacggtcagtgggcgagtgtgtcgagtactactacctgtggaagaagtcggagcgctacgactacttcgcccagcagacgcggctgggccggaggaagtacgtcccgtccggaaccacgtgcgtgcagccctccccagcagtaacgacaggcggccaccccgccgggggtgggcacgtgggcgcctgggcggcacctcttgggtgggggcgtctgtcctgtctgccgcccctcatggcgccctctccccacagggacgcagaccaggacctggatggcagcgaccccgatggccccggccgtccgcgcccggagcaagacaccctgactgggatgcgcacaggtgaggcttggggagtatctcctgccctgggggcggccacgggtctggagccgtgagtgaggcccggtggagcctctcctgcctggcgccctgtgctgggccagcctcgccaggaggagtgggcgtctgggtggcggagggcagccacgtgatgtggatgccgctctgtacacctggctgggagaggggagggcagggattacgcttaccctctgggcttgctggaggggtgcatgtggccccactgctggggagccccgtatggtgaggttggggtatttaccaggcctcagtctccggggagggccttcctgccccagggtggggacttagcccgtcaccaggacactcaggaaggacagggtgtccggagccgtcgccaggatcttgcacctgaggccatgacggagcacagcagggcctcgggtagggaccatgtccgatggtggtgtctgatgtggcgtccgaaggtggagacccacacggggagggtgcaaacgaggatcctttgctttctggctctgtgtttagatggttgagtctgggagggtcccccatttccagagtctggttgtttccatggtttgtttgccaaagggtgtccacctcggctacttcctagaattgtggtgaggccccttgcgctgcctgtgggaacaaaacttccaaagaccctgtattagccctcgcagcgcccccggcattgtttacacctaagtctgtgtattccacagaccctgtatttaccctctgcagtgcccccggcattgtttacacctatgtctattgtattctgctctttttaaagatgtgggttgtgacccactgttggtctgatgaactaaaatctacttctaaagctgagacccttaacctggggctcgcggatttcagtgtaactggtgtcttttgtatttgtgtggaggcttttctggggagggatccacaggctttgctggacccagcaaagttaggcaggagcctgcacaggatccgcggctgtgggcaggccccaccctctgttgcgttctctttcacagatccactgagcgtggatggcacggccggtggtctcgatgagcccggagtggcctctgatggactcccgtcctcggagccagggccgtgttccttccagcagctggatgagtcccccgctgtacccctgtcccatcggcccccagccctggccgacccagcctcataccagccagctgtcactgctccggagccagacgccagcccaaggctggccgtggacttcgccctgcccaaggagctgcccctcatctccagccatgtggacctcagcggggatccggaggagactgtggccccagcacaggtggctttgtcggtcaccgagtttggactcatcggcattggggacgtgaaccccttcctggccgcccaccccacgtgcccggcccccgggctacactcggagcccctgtcacagtgagtgccaccccatgcccggagcctccgcaacactccaaccaggtccccccagccctcaggctgagcagaggagggtgggaggcatttgccccaaggacccgaggacagtgtggctccacgagcaggctctcagtgtgtctttaggtttattctttacttgtatgtattttttgactggagaatacattcatgtggtccacattctccacaaatgggagcaggtgccaggctgtcccacccctgctccagccaccagctcccctcagggcaccccgggcccggctgccataggctgtgggggaggcaaggctgggagtctcgagtccagcgctcagcactgggctgtgcaggcacgtggggccgcactgacactctctgcgtctctcttggtctctcccctgcagctgtaacgtgatgacctgctgactcctggccgcgggcggcgtatgcggcccagactggacttagcgctgccgctgggcccgcctctgtcagtcttcctgaccccttccccaccccccgggccttggggtagcacctccttctgcttcagaacacgtcaggactggggtgaggtggctgggccgtgagcccttgcccctgtccacacagaatggacccacggccccacccagcgccgtcagcgcccggcactgccacccgggtccgggccgctgcctgcacgtgggatccgtcgggcagccggggacagaagagaccccgtccgttgggacgcagggcagagccggccacctagtcccttccagccagcagaggcgagggaaggcgtcactgccccggcggggagacgggcaggacgccctgccccgcaccagcagcctccgccggggcgccctcagctccctgcttggctctgtctctccacacccggcagggccgcgggctgccccagccctgggggtcgtgggcagctgctactcagtgccaaccccgtggggcacagagccatatacctcgctgtccggcccccaccccagcctcgccttcccaccccatcgtctccacttcaggaaaagccgcactttacacccccacctgcctcttccccctccatccctgctccccgatcctgagcggttggggtggggtccctcagcaaccccaggcgtgggtttgaggagacaggtgatttacatcccctttgctgtcctcccccggtaccaaggcagggagcctccggaggagccggccctgctggccacgcaggggccagactccagcctgtttccccagccctgcaggtcttccttctgtgggaagcttcctagcaagatggcttggagtcctggtccccctcctccctggccctctcgttcgtttctgtttctgtttacacgttggagtggggtcctccgtgggcggcggcgcgccctgccccgggtgtcgtccggcctcttgtgctcgagcccctttccgagttggactcgaccatccctcaccccaccaaggaccacactgtgaagtgataactgccttgaacccccctttgctgttttaatttacttaaact

SEQ ID NO: 896 - DNA, 10149 bp, Homo sapiens
cggctctgctccactctgctcagctccgctccaggaaggccacctcctcctccccctcctcctcccgctgtcaccactcaccgctcataacctcaagggggtggggaccccagggctggacacaccccaccgtggccccagagctcagccggtcgcacggacggacagttggaagccggaccccagagcctgaggtgggcagtgtgccagggtcccttgcggcctcctcaaggtcagtgccagctggggatgcagctactctggggctcttgagacttgtggggcacaccccaggccctcatcccaaatcacaggccccaaaaggggctttacccccggggcatctggggcaggcaggaccaggggaaagggtatgcccccgtgtccacaggccagccctggtctgggggtctatcaggagaggccccaggctgggggccagctccttgcagaggcctcactggggacaccccgcaccggccatggggagctaaaattggaaagtggcgagtgggaggcagctgacaaagctatttcacgggctcttcaccatgctccggtttcaagctcctgctccattaacctgatccccagggcctctccacccccacccaactgatgaggaggtgcctccaccctcaggccgacagcacagccatcaggctggcagcctctgctgtgggcaggggcagtggtggtcttctcttaccccagattccagaggggggtcactgagaaacccaatcctgaagggaggcaggcagaagtctgtcccaggtctgccatgtgaccttgacaggtccctgcccctatctggcccatgacccctccatctgtacgaggagaccgtcggctgctggggggcccaggggagatggctacagggctggggatgaagatttaggggaggatcaagggtgggcaaaagggccacatcagccacctcttggccccgtcagcccaagagttgcctggacatgttccctgcttcctccctttaatttgggtcctatgtctgtatccatggagtccttgggaagcccctgagccaggctgaagcgggataggaagggtaaaggtgctagctgagccgtagtacggcccagcagttctccaggggacaagctaggcccccgctggagggagtggtgagactcagccggggcctgattctggtcagcaccttggacagcagccagtgccctccctggccccgcctggccccgcctggccccacatccgctactcctgggcacctcctcaaatagcacagcctccagctggtgcccagggcctgaatacacagagcgctgagagagtggggcagtgtggtcacggacacaggcagggactgggatgtgacaggctggagctcagggacttgttgggggaatgggggtcagtgacaggctggaggcttaatgcgaggatggaggcttggctctaggggcagcacctggggtggtcatgggatctcagggaggggagtgggagtcagagaaagggtcttagagaagctggggctttgtgaggagctaagggagactcactgatcgaggtggggaccctgcaggcagaaacctgactgtagtgatagaggtggggtttctccgcacgcaggtcatgggggccttggcaggagcggttttggcagagggtggggccggtgcctctggaaggtatgaagatgtaaatgaaggtgagggaggcaggctgcgagtgagggctctgcgggcaagagccttgatgggtggggtgggggcaagagcagcagctgggatggggcactggtgttcggtggcctgtgaactgtggggggcacaggggcaggcagagtgatggtacaaggtccccaaggggctggaggggcaatctctcttcagagtgggtccccactggggtggtgggaccatgaggtggggctaggcttggctggagactgtaattccctcacccaacctgtctccccagccctgtccaggctatgggcatcaagacagcattgccggcggctgagctgggcctctactctctggtgctgagtggggccctggcctatgctggccggggcctccttgaggcttcacaaggtaatggctgtgccccggggcaggtggacaggacccttcttcccctggaggcctcagggttccaaccagcaaagccagaaagttacaggctccagacctagggtactccttctagaacacggctggatctcccttttcagcccggggttcccatctcagatagtcactggaggctgggtggagccaggttcagtcacaggaacacagagatgcagagacactgacagagagatggacacagagtcacacacatagacacacacacacacacacacagaggcctggacccagacacacacacacagagacctagacccagacatacacacacacacatcccgacacacacacacacacacagagacctagacccagacacacacacaaacacacagacatatacacacaccccccaacacacacacacacacatacacacacagagacctggacccagacacacacacacagagagagacctggatgcagacacacacacaaacacacagacatatacacacacaccccaacacacacacacacacacacacacacagagtcctggacccagacacacacacacagagacctagacccagacatacacacacacacatcccgacacacacacacacacacagagacctggaccccgacacacacacaaacacacagacatatacacacacaccccaacacacacacacacacacagagtcctggacccagacacacagcgagacccagaaagaagcagatgcagcaccaaagagactcagacccgtgccccgttcctgatgccctcgctccccagggtggggcagccttgtccacgggggaaggtggggcaggggatgtgaaggcccctctccctgaggccacactctgttctcagatggggcccacaggaaggccttccgggagtctgtgcgacctggctgggagtacattggccggaagatggtaggtcccccacatcccagggtccctcccatcccgaacccttctctgctctctgctgttccagatgttggcaagtaacagagagcttctcacagctctggggcctctggcttgagcttcagtgccttcagcttctttactggcccctcctgtatcctcctgggacatcaagtttgcccgggccctgctcacttgggaaataggtcgcattagtggagtgtgcttcagtggagcctccagcacctccttcccagaaacaaagcagtaaagggggaatggcaggcaacgtgcggaggagagggggagcttcaagcgacccggcagcccccatggtgcccttcactcctctctaccctcctgcctcggtacttccttcacagaggagtgtggagacctgcaggcactgctcttgtgtttgcataaagaggacacgttgggtttggctagtggtaaaaaataattattattattaaatttaaaaatgataataataaaagaagaacatgaaggctgggaaaggtgctggggctctgaccagcccaggttccagctcgtcctgtcccctctcccaccctcacctgccccacctccttctgccccggactgccccaggatgtggctgacttcgagtgggtgatgtggttcacctcctttcgcaacgtcatcatctttgccctctccggacatgtgctgtttgctaaactctgcacgatggttgccccaaaggtgagctggacctgggccacccagcctctccctgccagctcctctttcaccacaagggttgtgggaaccccctcctggggtcacgcccccatttatatggcgaaactgaagccttctccctgcccacagctccgctcctggatgtatgctgtgtacggggccttggctgtgatgggcacaatgggcccttggtacctgctgctgctgcttggtcactgtgtgggcctctatgtggcctcgcttttgggccagccctggctctgtcttggccttggcttggccagcctggcctccttcaagatggaccccctaatctcttggcaggtgtgaactggtgcaggggtagagggtgtagggataagatcccaaacctctcacttcatccaaagtccttgcaccccaagtatccccaagtattcccttcactttccacctgtcttcaagcctttgggtatgtcctggccacaaggtgagcacctgcatcacaggaggaactatccagatcatcccctgctcctcgcattgctgggatagagcagtggccaaagttaactggctctggaagagaggaagggacaggaccaggctgggcccctgtgggaagctagggagtggggaataggttttccagagacaggaggcaccctagtgagctggtggcctgttctttccccctccagagcgggtttgtaacaggcacttttgatcttcaagaggtgctgtttcatgggggcagcagcttcacagtgctgcgttgcaccagctttgcactggagagctgtgcccaccctgaccgccactactccttagctgacctgctcaagtacaacttctacctgcccttcttcttcttcgggcccatcatgacctttgatcgcttccatgctcaggtgaggggacaccctgtgggcttctagaacagggctgaatctcccttttcagattggggtttccatctcagatagaattccccaagcaggctgtatccccatcctcaggcatgattccaggatgaagccgtgtctcccctccctcctcagaccccaggatggggccacctttcccctccagcagggaccccagggtggagacatgtctcttttctcagacaggactcccaggccacgaatgttcccttcccactcaaatggggctcccaggacagaactgggtctcccatggctggctgtgaatcctcctcagactccagggtgacctctgtctccaccctcaggcaggactcctggataaagccatggctcctcctgccccaagtagttggtgagcccccctcagacagggctccccaggcagggcttgcctcttccctcagacccttcgcatccccccaggtgagccaggtggagccagtgagacgcgagggtgagctgtggcacatccgagcccaggcaggcctaagcgtggtggccatcatggccgtcgacatcttctttcacttcttctacatcctcactatccccagcgacctcaagttcgccaaccgcctcccagacagtgccctcggtgggtccacagaagagaaatgggggcagggctgccgccccaggaaaacagaccctctgcacccccacggtgccacagtcaggggagctgaggcacgcagggcacagcacctgagggcgtgggagcaggggcttattctttctaatgcatgggtcttggcattagcttcatcctgtggggccagagcagcatcccacggaccccacccacttcaccaggcatgactgatttccacaatatgggggggtctccgtggggcgggcagagcctggtgtctccccaaggaagtggtgggacagggtcttcatgggggcaggccccaggcgattggaccccaggcagtgacagtgccctgcccccagctggcctagcctattcaaacctggtgtatgactgggtgaaggcggccgtcctctttggtgttgtcaacactgtggcatgcctcgaccacctggacccaccccagcctcccaagtgcatcaccgcactctacgtctttgcggaaacgtgagtgctggccaggacgggggaggctcaccccctgggaccacaccttcccctagcctcttcccccatgcctggggagctctgcgcctgatggcaacatgcccatctgctttcctcttacaggcactttgaccgtggcatcaacgactggctttgcaagtgagtaggagtggggtgggggtggtcacagccatcctgccaggtgtctgagcagggcagtgccaagatgggtccacattttaaaagatcacccctgggccaggggaagcaaagagggcagtgaggaggtattggcagaggtctgggtgaaagatatagaagttaggatttaagtgagggccctcgaggtggagagaggtggtgggaggagggtcacacagtcagcagcctgaacaggacgtggccatgaactgtgggtgttgggaaggagaaggagatgacgctcaaattgctgtctgcagcctgggaggatggagggcagtttccagagagggcttcagtttaagaaatgtatagtcgcaatctaggagacatccctgtggaggttcagggaggtggttgggtctgagggtctgggtttctgagggtccagaggactgatggaactcagagcgtcctgagtgtgggcaggtggtttttaggctttgggagtgggtaagtcctcaggagagggagtggtgtgagaagaggagagacggggatggccgagattcagcctgcaagagctctgcttggaaggaaaaggagccagcagaaaggactggaaagagtagttggaggggcaggagaagaatcaaggtcatgtgccaccctggaagccaagggaagaccatccaggcatggtggggacagcttggtcagatgccactgagcctcaaggaagctggagaccgaggattagtgctggtgacatggaggttttcagcctttcatgggcaaggcaggagcaggtaaggagggaaagtcaactgaggagtagagaagtgtgtgatgactcctggaagaagcctgggactgcagggggaagacaggagtggctgagggagaagagggatgtgttaaagataggagagaatgggacatgctaagaagaattattcaacagagaagctggggatgcaggatacaggggtgattgatggagtgaggtccctgaagaggaaggaggtgagggtgtctagttccaggcggaggcctggcttcagtgggaggaggaggaagagaagccagtgtggatgcagaggaaagcaggttaatgtagacaagtaagggattccacctgaaggcttcagccttgtccatgaagcaggaggcacggccatcagctgagaaagccaggacagggacgtggagagaggcaacatatatgcttacccccacaacccagcctggatccccccactcatactatctctccactcatacttgtggggagataagaatacagtggcccttgcagagcaagggagaagcagctgactagagaaatcttggcactgagtacccaggtggtattggaggtggtgggcttatgaactccagcatgtgaagatgtgagatttcccccatggggcttagctgcctgggtgtagctgaggagaaagtaagtgattgggctctcccagatggatgacaaggaagaagtcaggaataagggtttttagattatttatagtcatgactcattggatataagcctgctaaggacggtggtgaaggtgggagggtcacaagatcaatgggattgaagaactgaagctggggggccaggaggtcaagaggagttgggcaaagaatgggaattagaaaggagtgaactttcaagtggtgacaaagttggggcatggccatgggtgtgggtggctgaggtggagtggagaaaaagccattggaaatgaggaggtcgaggaatggagaggctggttattcctgggtcttccacagaacttatttaacaaatatttattgagcacctatgtgccaggcattgttctaggcactggggatacagcagtgaacatggcaaagaccctgaactcatggagcttacagtctagtggggagaaacagaccataaacaggtaaacaaacataaataagataattttagagagtggtaagtgttatgaagaaaataaaattgcaatgggatagaagttgacaacagggtagaagcttctttagtcggggtctaggcaggcttctctgaggagatgatatttgaattgagatttgagtgataaggagatgtggagcagagaataccaggtagagggaacaacaagggcaaaggccttgagacacaaaccaactgtgtgggtgtaaaggtaagaaaggccagtgaggccagcatgatgaactgggggagcatggtggctgatttggtcaggaagggaacagaaaccagaccacttgggatcttctagccagagtaaagagactgagtttattcctattgtaatggggagctattcagagaggttaatcatggaagtgatgtgacctgagctacactcttaaaagatgcctctggctgctgtgtggagaatgaaccatgggggcaaaagcagaaacaagaagaccacttaagaggctcttgcaataatttatgtgagaagagtgatcatcttgactagggtggtggtggtagaggaggtgagtggtggtcaggactgagaggagccaacagaatttgctggcttgcttggatgtgggtgatgaggcaaactgagaatccaagatggcaccaaggcttataccctgagcaactgaatggatggtggtgccattcactgagatgaggacggagctgggtttgagcagggataggggaatctgtcaatcaagtgacatggctagtagcaattgcatatacaaatcaggagagactgggctaaagacacagatttaggggtcatcgtcatagagctagtacttgaaatcttgggtctggatgagatcatttgggaagtaaacgaacagagatagagaagctataatgtcccaggctgagcctgccacaatttgaagttggttggaggaggagctgctacgtgaggtcaggaatgttgaatgcacccagggtgacagtgttgaggaggacgccctgttgtgtgtcctctcccatctcatccctgccctttcccacactcccagtggcccttctcccatctttcctgcagatatgtgtataaccacattggtggggagcattccgctgtgatcccagagctggcagccacagtggccacatttgccatcaccacactgtggcttgggccttgtgacattgtctacctgtggtcattccttaactgctttggcctcaactttgagctctggatgcaaaaactggcagagtgggggcccctagcacgaattgaggtgagcagggaagacctggggctgggactggctgggtcatagagggcgggggggcactgctgctttctggagttgtccaaacacctggcccctaatccagaactttctcaccaccaccctcttagttgtcagagcaatggctcactctgtaggaatctgcccctccctcccttctatgaggaatggagcacctgggccttgccatgttggtcaggccttgtcctctctctggacctgtttccccatgtttaacaaggagggagagctgacctggggctctccgagacccagacatagccccaagacctgactggccaggtgggtaaggctgctgacccaccatgtcctctttcctttggcctcttgtcccgctgcccatgctttcctggaccggataggcctctctgtcagtgcagatgtcccgtagggtccgggccctgtttggagccatgaacttctgggccatcatcatgtacaaccttgtgagcctgaacagcctcaaattcacagagctggttgcccggcgcctgctactcacaggtgagggacaggggtgtggggatacagaaggtgccaggcatcagcctcaaggaccgtgaccttccaaaatgcctcctatctccctcatcacccctgggactcagaagggagggcccatcaagcggggagaggggtgggaagacaaaagtcgctgaggatgcagtgctgctcctgagcatctatgactccctccccacacagggttcccccagaccacgctgtccatcctgtttgtcacctactgtggcgtccagctggtaaaggagcgtgagcgaaccttggcactggaggaggagcagaagcaggacaaagagaagccggagtaggagggagcgggtagagggatgggctctgctcagctattcttgggccagatggggcctgaccgatagaataaaagacttttctacaacag

SEQ ID NO: 897 - DNA, 10146 bp, Homo sapiens
cggctctgctccactctgctcagctccgctccaggaaggccacctcctcctccccctcctcctcccgctgtcaccactcaccgctcataacctcaagggggtggggaccccagggctggacacaccccaccgtggccccagagctcagccggtcgcacggacggacagttggaagccggaccccagagcctgaggtgggcagtgtgccagggtcccttgcggcctcctcaaggtcagtgccagctggggatgcagctactctggggctcttgagacttgtggggcacaccccaggccctcatcccaaatcacaggccccaaaaggggctttacccccggggcatctggggcaggcaggaccaggggaaagggtatgcccccgtgtccacaggccagccctggtctgggggtctatcaggagaggccccaggctgggggccagctccttgcagaggcctcactggggacaccccgcaccggccatggggagctaaaattggaaagtggcgagtgggaggcagctgacaaagctatttcacgggctcttcaccatgctccggtttcaagctcctgctccattaacctgatccccagggcctctccacccccacccaactgatgaggaggtgcctccaccctcaggccgacagcacagccatcaggctggcagcctctgctgtgggcaggggcagtggtggtcttctcttaccccagattccagaggggggtcactgagaaacccaatcctgaagggaggcaggcagaagtctgtcccaggtctgccatgtgaccttgacaggtccctgcccctatctggcccatgacccctccatctgtacgaggagaccgtcggctgctggggggcccaggggagatggctacagggctggggatgaagatttaggggaggatcaagggtgggcaaaagggccacatcagccacctcttggccccgtcagcccaagagttgcctggacatgttccctgcttcctccctttaatttgggtcctatgtctgtatccatggagtccttgggaagcccctgagccaggctgaagcgggataggaagggtaaaggtgctagctgagccgtagtacggcccagcagttctccaggggacaagctaggcccccgctggagggagtggtgagactcagccggggcctgattctggtcagcaccttggacagcagccagtgccctccctggccccgcctggccccgcctggccccacatccgctactcctgggcacctcctcaaatagcacagcctccagctggtgcccagggcctgaatacacagagcgctgagagagtggggcagtgtggtcacggacacaggcagggactgggatgtgacaggctggagctcagggacttgttgggggaatgggggtcagtgacaggctggaggcttaatgcgaggatggaggcttggctctaggggcagcacctggggtggtcatgggatctcagggaggggagtgggagtcagagaaagggtcttagagaagctggggctttgtgaggagctaagggagactcactgatcgaggtggggaccctgcaggcagaaacctgactgtagtgatagaggtggggtttctccgcacgcaggtcatgggggccttggcaggagcggttttggcagagggtggggccggtgcctctggaaggtatgaagatgtaaatgaaggtgagggaggcaggctgcgagtgagggctctgcgggcaagagccttgatgggtggggtgggggcaagagcagcagctgggatggggcactggtgttcggtggcctgtgaactgtggggggcacaggggcaggcagagtgatggtacaaggtccccaaggggctggaggggcaatctctcttcagagtgggtccccactggggtggtgggaccatgaggtggggctaggcttggctggagactgtaattccctcacccaacctgtctccccagccctgtccaggctatgggcatcaagacagcattgccggcggctgagctgggcctctactctctggtgctgagtggggccctggcctatgctggccggggcctccttgaggcttcacaaggtaatggctgtgccccggggcaggtggacaggacccttcttcccctggaggcctcagggttccaaccagcaaagccagaaagttacaggctccagacctagggtactccttctagaacacggctggatctcccttttcagcccggggttcccatctcagatagtcactggaggctgggtggagccaggttcagtcacaggaacacagagatgcagagacactgacagagagatggacacagagtcacacacatagacacacacacacacacacacacagaggcctggacccagacacacacacacagagacctagacccagacatacacacacacacatcccgacacacacacacacacacagagacctagacccagacacacacacaaacacacagacatatacacacaccccccaacacacacacacacacatacacacacagagacctggacccagacacacacacacagagagagacctggatgcagacacacacacaaacacacagacatatacacacacaccccaacacacacacacacacacacacacagagtcctggacccagacacacacacacagagacctagacccagacatacacacacacacatcccgacacacacacacacacacagagacctggaccccgacacacacacaaacacacagacatatacacacacaccccaacacagacacacacacacagagtcctggacccagacacacagcgagacccagaaagaagcagatgcagcaccaaagagactcagacccgtgccccgttcctgatgccctcgctccccagggtggggcagccttgtccacgggggaaggtggggcaggggatgtgaaggcccctctccctgaggccacactctgttctcagatggggcccacaggaaggccttccgggagtctgtgcgacctggctgggagtacattggccggaagatggtaggtcccccacatcccagggtccctcccatcccgaacccttctctgctctctgctgttccagatgttggcaagtaacagagagcttctcacagctctggggcctctggcttgagcttcagtgccttcagcttctttactggcccctcctgtatcctcctgggacatcaagtttgcccgggccctgctcacttgggaaataggtcgcattagtggagtgtgcttcagtggagcctccagcacctccttcccagaaacaaagcagtaaagggggaatggcaggcaacgtgcggaggagagggggagcttcaagcgacccggcagcccccatggtgcccttcactcctctctaccctcctgcctcggtacttccttcacagaggagtgtggagacctgcaggcactgctcttgtgtttgcataaagaggacacgttgggtttggctagtggtaaaaaataattattattattaaatttaaaaatgataataataaaagaagaacatgaaggctgggaaaggtgctggggctctgaccagcccaggttccagctcgtcctgtcccctctcccaccctcacctgccccacctccttctgccccggactgccccaggatgtggctgacttcgagtgggtgatgtggttcacctcctttcgcaacgtcatcatctttgccctctccggacatgtgctgtttgctaaactctgcacgatggttgccccaaaggtgagctggacctgggccacccagcctctccctgccagctcctctttcaccacaagggttgtgggaaccccctcctggggtcacgcccccatttatatggcgaaactgaagccttctccctgcccacagctccgctcctggatgtatgctgtgtacggggccttggctgtgatgggcacaatgggcccttggtacctgctgctgctgcttggtcactgtgtgggcctctatgtggcctcgcttttgggccagccctggctctgtcttggccttggcttggccagcctggcctccttcaagatggaccccctaatctcttggcaggtgtgaactggtgcaggggtagagggtgtagggataagatcccaaacctctcacttcatccaaagtccttgcaccccaagtatccccaagtattcccttcactttccacctgtcttcaagcctttgggtatgtcctggccacaaggtgagcacctgcatcacaggaggaactaccagatcatcccctgctcctcgcattgctgggatagagcagtggccaaagttaactggctctggaagagaggaagggacaggaccaggctgggcccctgtgggaagctagggagtggggaataggttttccagagacaggaggcaccctagtgagctggtggcctgttctttccccctccagagcgggtttgtaacaggcacttttgatcttcaagaggtgctgtttcatgggggcagcagcttcacagtgctgcgttgcaccagctttgcactggagagctgtgcccaccctgaccgccactactccttagctgacctgctcaagtacaacttctacctgcccttcttcttcttcgggcccatcatgacctttgatcgcttccatgctcaggtgaggggacaccctgtgggcttctagaacagggctgaatctcccttttcagattggggtttccatctcagatagaattccccaagcaggctgtatccccatcctcaggcatgattccaggatgaagccgtgtctcccctccctcctcagaccccaggatggggccacctttcccctccagcagggaccccagggtggagacatgtctcttttctcagacaggactcccaggccatgaatgttcccttcccactcaaatggggctcccaggacagaactgggtctcctatggctggctgtgaatcctcctcagactccagggtgacctctgtctccaccctcaggcaggactcctggataaagccatggctcctcctgccccaagtggttggtgagcccccctcagacagggctccccaggcagggcttgcctcttccctcagacccttcgcatccccccaggtgagccaggtggagccagtgagacgcgagggtgagctgtggcacatccgagcccaggcaggcctaagcgtggtggccatcatggccgtcgacatcttctttcacttcttctacatcctcactatccccagcgacctcaagttcgccaaccgcctcccagacagtgccctcggtgggtccacagaagagaaatgggggcagggctgccaccccaggaaaacagaccctctgcacccccacggtgccacagtcaggggagctgaggcacgcagggcacagcacctgagggcgtgggagcaggggcttattctttctaatgcatgggtcttggcattagcttcatcctgtggggccagagcagcatcccacagaccccacccacttcaccaggcatgactgatttccacaatatgggggggtctccgtggggcgggcagagcctggtgtctccccaaggaagtggtgggacagggtcttcatgggggcaggccccaggcgattggaccccaggcagtgacagtgccctgcccccagctggcctagcctattcaaacctggtgtatgactgggtgaaggcggccgtcctctttggtgttgtcaacactgtggcatgcctcgaccacctggacccaccccagcctcccaagtgcatcaccgcactctacgtctttgcggaaacgtgagtgctggccaggacgggggaggctcaccccctgggaccacaccttcccctagcctcttcccccatgcctggggagctctgcgcctgatggcaacatgcccatctgctttcctcttacaggcactttgaccgtggcatcaacgactggctttgcaagtgagtaggagtggggtgggggtggtcacagccatcctgccaggtgtctgagcagggcagtgccaagatgggtccacattttaaaagatcacgcctgggccaggggaagcaaagagggcagtgaggaggtattggcagaggtctgggtgaaagatatagaagttaggatttaagtgagggccctcgaggtggagagaggtggtgggagagggtcacacagtcagcagcctgaacaggacgtggccatgaactgtgggtgttgggaaggagaaggagatgacgctcaaattgctatctgcagcctgggaggatggagggcagtttccagagagggcttcagtttaagaaatgtatagtcgcaatctaggagacatccctgtggaggttcagggaggtggttgggtctgagggtctgggtttctgagggtccagaggactgatggaactcagagcatcctgagtgtgggcaggtggtttttaggctttgggagtgggtaagtcctcaggagagggagtggtgtgagaagaggagagacggggatggccgagattcagcctgcaagagctctgcttggaaggaaaaggagccagcagaaaggactggaaagagtagttggaggggcaggagaagaatcaaggtcatgtgccaccctggaagccaagggaagaccatccaggcatggtggggacagcttggtcagatgccactgagcctcaaggaagctggagaccgaggattagtgctggtgacatggaggttttcagcctttcatgggcaaggcaggagcaggtaaggagggaaagtcaactgaggagtagagaagtgtgtgatgactcctggaagaagcctgggactgcagggggaagacaggagtggctgagggagaagagggatgtgttaaagataggagagaatgggacatgctaagaagaattattcaacagagaagctggggatgcaggatacaggggtgattgatggagtgaggtccctgaagaggaaggaggtgagggtgtctagttccaggcggaggcctggcttcagtgggaggaggaggaagagaagccagtgtggatgcagaggaaggcaggttaatgtagacaagtaagggattccacctgaaggcttcagccttgtccatgaagcaggaggcacggccatcagctgagaaagccaggacagggacgtggagagaggcaacatatatgcttacccccacaacccagcctggatccccccactcatactatctctccactcatacttgtggggagataagaatacagtggcccttgcagagcacgggagaagcagctgactagagaaatcttggcactgagtacccaggtggtattggaggtggtgggcttatgaactccagcatgtgaagatgtgagatttcccccatggggcttagctgcctgggtgtagctgaggagaaagtaagtgattgggctctcccagatggatgacaaggaagaagtcaggaataagggtttttagattatttatagtcatgactcattggatataagcctgctaaggacggtggtgaaggtgggagggtcacaagatcaatgggattgaagaactgaagctggggggccaggaggtcaagaggagttgggcaaagaatgggaattagaaaggagtgaactttcaagtggtgacaaagttggggcatggccatgggtgtgggtggctgaggtggagtggagaaaaagccattggaaatgaggaggtcgaggaatggagaggctggttattcctgggtcttccacagaacttatttaacaaatatttattgagcacctatgtgccaggcattgttctaggcactggggatacagcagtgaacatggcaaagaccctgaactcatggagcttacagtctagtggggagaaacagaccataaacaggtaaacaaacataaataagataattttagagagtggtaagtgttatgaagaaaataaaattgcaatgggatagaagttgacaacagggtagaagcttctttagtcggggtctaggcaggcttctctgaggagatgatatttgaattgagatttgagtgataaggagatgtggagcagagaataccaggtagagggaacaacaagggcaaaggccttgagacacaaaccaactgtgtgggtgtaaaggtaagaaaggccagtgaggccagcatgatgaactgggggagcatggtggctgatttggtcaggaagggaacagaaaccagaccacttgggatcttctagccagagtaaagagactgagtttattcctattgtaatggggagctattcagagaggttaatcatggaagtgatgtgacctgagctacactcttaaaagatgcctctggctgctgtgtggagaatgaaccatgggggcaaaagcagaaacaagaagaccacttaagaggctcttgcaataatttatgtgagaagagtgatcatcttgactagggtggtggtggtagaggaggtgagtggtggtcaggactgagaggagccaacagaatttgctggcttgcttggatgtgggtgatgaggcaaactgagaatccaagatggcaccaaggcttataccctgagcaactgaatggatggtggtgccattcactgagatgaggacggagctgggtttgagcagggataggggaatctgtcaatcaagtgacatggctagtagcaattgcatatacaaatcaggagagactgggctaaagacacagatttaggggtcatcgtcatagagctagtacttgaaatcttgggtctggatgagatcatttgggaagtaaacgaacagagatagagaagctataatgtcccaggctgagcctgccacaatttgaagttggttggaggaggagctgctacgtgaggtcaggaatgttgaatgcacccagggtgacagtgttgaggaggacgccctgttgtgtgtcctctcccatctcatccctgccctttcccacactcccagtggcccttctcccatctttcctgcagatatgtgtataaccacattggtggggagcattccgccgtgatcccagagctggcagccacagtggccacatttgccatcaccacactgtggcttgggccttgtgacattgtctacctgtggtcattccttaactgctttggcctcaactttgagctctggatgcaaaaactggcagagtgggggcccctagcacgaattgaggtgagcagggaagacctggggctgggactggctgggtcatagagggcgggggggcactgctgctttctggagttgtccaaacacctggcccctaatccagaactttctcaccaccaccctcttagttgtcagagcaatggctcactctgtaggaatctgcccctccctcccttctatgaggaatggagcacctgggccttgccatgttggtcaggccttgtcctctctctggacctgtttccccatgtttaacaaggagggagagctgacctggggctctccgagacccagacatagccccaagacctgactggccaggtgggtaaggctgctgacccaccatgtcctctttcctttggcctcttgtcccgctgcccatgctttcctggaccggataggcctctctgtcagtgcagatgtcccgtagggtccgggccctgtttggagccatgaacttctgggccatcatcatgtacaaccttgtgagcctgaacagcctcaaattcacagagctggttgcccggcgcctgctactcacaggtgagggacaggggtgtggggatacagaaggtgccaggcatcagcctcaaggaccgtgaccttccaaaatgcctcctatctccctcatcacccctgggactcagaagggaggcccatcaagcggggagaggggtgggaagacaaaagtcgctgaggatgcagtgctgctcctgagcatctatgactccctccccacacagggttcccccagaccacgctgtccatcctgtttgtcacctactgtggcgtccagctggtaaaggagcgtgagcgaaccttggcactggaggaggagcagaagcaggacaaagagaagccggagtaggagggagcgggtagagggatgggctctgctcagctattcttgggccagatggggcctgaccgatagaataaaagacttttctacaacag

SEQ ID NO: 898 - DNA, 802 bp, Homo sapiens
actttgagcaacaaccaaacaaaaaaagtctgaaaattgaaaagggactcagatttgagagaattgtccccactccccaccatatctttcctagtggcccttgtggcatttgggaagctggccccagggccaagtgctggtcttagctcagtcagcttcctgtccctcacgtgggctggccttgccaggtgccctcccctgccacccccctcagacacagtggagctggcctcaggctgtccaaccacagatccatgggacttccctagccctccacccctcttgccatttccgcacaccacactccctgcagaccctgctgtgtgtgggtcacccagggaaggcctcacttctgagtgtgaatccagcctttctgggcctctgggggtcagggtgtctgtggctctctaatagcctctgtttatgagcaaggctcttgtcatggagtgaatcaccggatgccccctgccaccccagtgagggccagggccagcggtatgcccattttacaactgaggatctgaggccctaagaagtgggtcacaccagctcagggtcaagtaaattggctgaacctgtgttcttaactctggggtcaaaccaccctgtctgctcccttgagccattttcttggagcctcgtgagggccccagtgtgggtgcacggggttgtcgcccctgcagggcagtcagtgccaggagcttacagggctgatccaactacttggcttcctcatgtgccaggtccttcttctcccaactgcgtacagtggcaacatcttccctatgggctgtggtgacat

SEQ ID NO: 899 - DNA, 6150 bp, Homo sapiens
gacaccagatggagagcagagaccatcgaccttggcagcccaacagcagaacactgaagccccaagtcttcaacacacctgctcactgactcttggagcactgatgcagaccctgagctgcttgctcagaaggcactttattcttcctaaagaaggagacatatctgcactgtacactgcacttgatggggatgctcccatcggaaagacgagaaggctgagtcctgtggggaactttgccagcacactcagctaggctggggcagggccagcacacggcctgggataccgccctgtggttctggttcatggatcaagacaacctagggggatatggcaacactggagaagcctctagtttctcacccttgcccaaaagtccaggactaagcagcacttccctttccttggctgacgcagcccctgaggcaccataactggatccaggtagactctggcctctcctagcctcttttctggagcccccacaaggccaggccagtgagggtcgcaggatgggaggggtgcttagttcagtctgcctgagctggtcacatcttagtcaggcacagcacattgagccgcactggtaggaaggtggcacctgctgcataggcgatctcccgcaggacaccctcccatttcttctcctcctcgttatacctggggatgagagagagtggggacaaggatggagagcttggtcagctgagtccagagtggaacgcagcagagaggggtggctgagggcacttggcccatctctagggagatctgctcctgaaaatccccaggctctgggaaaggagaccccccacaagacccaccccaaggaacacccaccccacactccaggaagggtctttctccccaggaaagatcacctctcaaggggtgttcccatattcctcaaagttcccctccaggaaggtctacactgcccacaccaccccatcaatgtcctctccttgagaatttccatgctccatttctactaagtctcacgtctcagcctccggcagcactgctccccaggggctgcctgcagcagtgcagatggctgcaggttcaggaaggagatgccccagaggctaaagtttccttctcccacccccacaaaggaccagccatagagagcaatggttctgaaaggccagggctccaactgtttcccagccctagtggcagccctccctccagaccaagcacccggaaggcaggagagaagaaaatccggctgctatttgggccctgtttctgtgagtctatgacctaagcttgggtctgctcccatctgcaacactgttgctgctccacagtggggcatggtgtcatctgtgcaagcccagactttcccaacaaactggtgagaaacggccaagcagggtatgttggctattcctccctacaggactccctagaagagggatccgctttgcccccagaggagcttgcccagtgccttggtaccccaccatggtgctatggggtgtcagccttgctcatgatgcccccttgcctccccagggtgggactcacctccagatgtcattgagctctgtgggaaccagctctccagactccgtctccagtgtggcaaagccaccaatggcatagagggtacccaccaggctgaccaggctgagtgagctacgctcctgtgggaaggcctcgaagggtgcccacctgggggtgtgtgagaaggtgcatcattgggatgcctcggcaagcccagtgactgtccctgccacccagcacccacagctccaactgcaaccctttgcaatccaagtcccaggcacccatgcccccaaccccattccccttccctgtccctctggtcttcccttccttccccattctcttgctcctccactttcctttccttgtcctcttgccattctatccaacctgtccagcaaagtccaccatggatctccccactgcccctactcctctcctgaactaactccaccctccaactcacaaccccagcccctagcaggcccccagccttgccctggacgcagtccttttgcccctcagcggcccctgcagccccacccaccttgcacacctgctctatccttcttctcccttcacagcccagttgttctcaatgtatcttcgctaccctggctcctgccttgggccttagtcccatcctccaaaactgaccttcctgaggtccacagtcactgcacacgcactgaggtcctacagcacacagccctgctgacgtgactttcctcacccatctcttcggcctcaccttcgtggcctccttcctggataatgcagctgcctccaccatcagggcttggacctcagctcctcccatttacactctctctcctgagggagcttggcccctccgtgtgctactgacccccagatctctccctccagctcagccctctctctcccgggtggggtccttttggacacccccaggtacttcaagtccacatgtcctaactggaccctcactttccctacccaatcccaatgattatccagtaaatggcctcccaccctcactcagaagcatgtacttctccccctctcacccccacatccaatcaatagctaagccctgtttctcccacctcctagactcttgctactcaaagtgtggttcatggcccagcagcgtcagcatctcctgggggtgcgttagaaatgcagacttacaggctttcagccctccgcataccgagaatcagaatctgcactttaaggcgatccccaggagatttgcatgcccatcacagtgtaagaagccctggcctgtctttgtccggtgcatcccctcaaccccatctccgctgtgcccccagctccaggcctttatcacccctgaccttcctgacccctgggaaatccctaatctgctctctatatcagttgccatgaagtactttagtagaacacagatgagatacagtccctctcctgctggcccccgctccagccccagcaccgccatcccaactccatcacccacccacctccacccagctggagcaacaccttccctcctataggccttgagttttttctccaaactgcctcagcaccacctttccttagtctggggcaacctcctcccaccaccctcaccccttttgcgagctgagtccaactgtctctcagttcagttttctcttttctgatgtcccaggcagggcagcttctgtcttgttcactgctatatcccttgcaccaggccattgcctggtatgagtccctgaatgaggaacctggcatcccctcccccagccctgggagccccctcctgcagaccaggctggccataacccttgccccgcctccccacctcactgctgatcaggagagaaagcctatttctatactgatgtccaaagtcaacactggagacccaagacagggactgcagctcctgctggggctgacagaagcccaaagccatgcagttgtccttggcggaagggacaagctttcatacttgttgtctgtgatgctgtacacttcggcagaactggtcagccctgtgtcggtgaccccagctgccacgataatgcggccatcatggacagtggccccaaagagtgagcgggcggtctgcatgggtgccagctccttccactcaaacttcttggggtcatagacgcacatcttgttcaggcacttcctgtggggtggagggtggggatgggtggagagaagcaggagcccagccacgcctccctgcaatcacctgccggggcagccaggacaaacccctgacagcctctgggagattctacctctgctccacagactcactccaggcccagcctcacctgtcactgcctttgccgccaattacgtagacaaggtccatgtgggagagcactgtgtggccatacaccacgtaaggcagcgggtccgattcaccccatttgaatgacctggaggagacgggagtgggggtgggggagggcacccatccaggctcggctcagtccctgtctctgcacccatccgcccatccacctaacacatattcgagatgcgtcagatccattgctggaacttccgaggcctctcagttctttgatcccaccctgccccccaacctccccgcccttacccaagcccaccttcactctaagcacaaggctctagctccaaatcccaccccaggccctagaccagctgcggcctccatgccccactcacccccacggagctcagccccaccccagccatgctcacagcctgtcgtagcacatgaccgagtccaggcagcgctcgccgtccttgatctctctgccaccgaccacgtagatggagttgagagcttctcccaggccaaagaggcagcggggcgagggcagcggtggcatccccagccactctgagtccagatggtcaaactgcaggccaggtgtccagtcagctaccgccccccactcccccagcctcagcccagccccactcagtcccactgccccagatcacggaggaggtcgggaacccaggtagggccaatacagcctggaggtgccctgagaaacagtgcccctcctaccatcaggctgagagcagatgagcgtcccccacacccaggcaggctcctggcaaccaccattatagcaggcggtagggcaccacagcacagaaatgagggggagctctgtgagggaggtccagctatggccttgctttcccaggctgaacaactcccaactgaggcctgcctgccccctcctctccaccccatcccactgttcaggaaacttccaaatacggccctgccttttcgccctgtaaaatctacagtccacagccttgtccacctccacagctttataattaagatattaatactaggggttcatctttttggaaagttttctgagggctgagcaccttgctgatgagcactttataagcatcatttaaccttccaacaaccttatcatgcaggaaggagaatatccccagttacaaacagaggcccagagagaataaacaatgtgcccacactgctgagctagtagctggtgaagctgccctcatcccccagtgcaaccgtaaggcctgtgagcttaaccctggcaccaagcgcctgtcacccctcttgctgatcaggcctccctgagcacaccactcaccaggctcagccccagttctatcccttgcttaccgttccttggccggaaacactgccatcttccccttcacatctccaaatcccaccccactggcaaggctcaaacttatatggccagtctccaggaaactgtctctgccctttgagatctcacagtcacaccccaactcagacctggcactccactctgctgatacctcctgggcctcagtttcctcatctgtacaatgggaggaccatacaggattgttcctttgtctgggacactgctgtgagctccgggcctggccttcacgcagaggccctgcccaggatcctcacaccgaccttgctgctccttactgtgccccaccccaacccctgtgcagggccagggcctccaacatatgccaacttggggctaccacacccctgaaattaagataccaaagttatgctgctttttggcagctgcctattgactgtcttcaaccttcaagtaggtggctatcagtcaacctccccagtctacatctcaccctagacccagtggcattcacttgtgtagacacaagccccttctgggccccaagactgtccacagtgcctagagcccagcattagctggcggctcccaaggctggtcaggcacctgcaggaagtatgcgctcatggggtcctctttgttgtcttcgttgtagaagaggcctccagccacgaagacctggttctccttggtaaccaggctgacgtggttcttggggacctggttggagagggaagcacagtagcactcgttggctgctggatcgtaggccacagcgccctcctcactgatcatgaagatgagatcctgcaggaacatgccgaagcgcagggtgtcattgaggatcccaggaaggatacgttcggcctcctcatcctcctctgctttggctttgcttgtgcccttatcagcctccttggccccggctccatccttccccttctttttcttccgcagcgtggtgatgcggccctcgtgtgca

SEQ ID NO: 900 - DNA, 1672 bp, Homo sapiens
gacaccagatggagagcagagaccatcgaccttggcagcccaacagcagaacactgaagccccaagtcttcaacacacctgctcactgactcttggagcactgatgcagaccctgagctgcttgctcagaaggcactttattcttcctaaagaaggagacatatctgcactgtacactgcacttgatggggatgctcccatcggacagacgagaaggctgagtcctgtggggaactttgccagcacactcagctaggctggggcagggccagcacacggcctgggataccgccctgtggttctggttcatggatcaagacaacctagggggatatggcaacactggagaagcctctagtttctcacccttgcccaaaagtccaggactaagcagcacttccctttccttggctgacgcagcccctgaggcaccataactggatccaggtagactctggcctctcctagcctcttttctggagcccccacaaggccaggccagtgagggtcgcaggatgggaggggtgcttagttcagtctgcctgagctggtcacatcttagtcaggcgcagcacattgagccgcactggtaggaaggtggcacctgctgcataggcgatctcccgcaggacaccctcccatttcttctcctcctcgttatacctggggatgagagagagtggggacaaggatggagagcttggtcagctgagtccagagtggaacgcagcagagaggggtggctgagggcacttggcccatctctagggagatctgctcctgaaaatccccaggctctgggaaaggagaccccccacaagacccaccccaaggaacacccaccccacactccaggaagggtctttctccccaggaaagatcacctctcaaggggtgttcccatattcctcaaagttcccctccaggaaggtctacactgcccacaccaccccatcaatgtcctctccttgagaatttccatgctccatttctactaagtctcacgtctcagcctccggcagcactgctcccacaggggctgcctgcagcagtgcagatggctgcaggttcaggaaggagatgccccagaggctaaagtttccttctcccacccccacaaaggaccagccatagagagcaatggttctgaaaggccagggctccaactgtttcccagccctagtggcagccctccctccagaccaagcacccggaaggcaggagagaagaaaatccggctgctatttgggccctgtttctgtgagtctatgacctaagcttgggtctgctcccatctgcaacactgttgctgctccacagtggggcatggtgtcatctgtgcaagcccagactttcccaacaaactggtgagaaacggccaagcagggtatgttggctattcctccctacaggactccctagaagagggatccgctttgcccccagaggagcttgcccagtgccttggtaccccaccatggtgctatggggtgtcagccttgctcatgatgcccccttgcctccccagggtgggactcacctccagatgtcattgagctctgtgggaaccagctctccagactccgtctccagtgtggcaaagccacaatggcatagagggtacccaccaggctgaccaggctgagtgagctacgctcctgtgggaaggcct

SEQ ID NO: 901 - DNA, 802 bp, Homo sapiens; identical to SEQ ID NO: 898

SEQ ID NO: 902 - DNA, 22008 bp, Homo sapiens
gcggttccaagtgtggagaaagcggctctgggtctaggtagtgtgcggagaggggcgcggggtggaattgctgcgggaagtgggaaactggaagtgggaaactggaagtggaatctggtgctccggaaagagacgttcccaacttctactttctccccagattgagggatactccccctttccaccatgggcaagaagggcaaagttggcaagagccgacgagacaagttttatcacttggcgaaggagacgggtgagtccggattcgctcagtctgcgagcgagcgagcgatctctgcccggttcgcctgctctttgcgaccattatgtacctctcctgcagaaggggtggtcggttgcgaggccggagaaatcctactagtgaagcagtttgcgcacttggttgttttgtccaggttaccgttcccgatctgctttcaagctgatccagctcaatcgccgctttcagttcctgcagaaagcccgagccttgctggacctgtgtgctgcgccagggggatggttcgtaacactcgccacaggttgctcctggtggccgctttctgggttctgagctgggatggcttccagtttcactgcgggaggggaacccgaatcccggtcctcttgggggccgtttcctttcttgattgcagagaaagggcttggaatacgtgcctatgatatgctttggccagtacacgtaacaccagggatgagagatcagttgccaagagggggaaaaggatggctctaggtttttaaatttctgttccttttataggctgcaggtagctgccaagtttatgcctgtatccagccttattgtgggtgagtaacggacagctctccttggtgttttaaggggtgggtgtataaggtattttgtcctgtatttctctcctccctgcttgaagcaaccttttagaatactctgacctgatttcttccaggagtggacctggttccaatcaagcctctccccaatgtggtgactctccagcaggacatcacaacagaacgttgtaggcaggtaataggagtctctctcttccttccccctttatacggaaacatctacatccctgaaatcctctaaaggcaagtttttcctttttaccgtgctttgagcacgttcttgcctgacatctgtacgacaagacctatggcattcgtagtgtccactccaggctttatttagagtcagggataaaggtgtttggaattgggagaagggcagagatctttagtgaagtcttctcctgtgaattcagtgtcagactgtaatctccatgaaggtagagacatactgtttttgtttactattgtatctcctgtgcctggtactgcatttggcccatgatgggcactcagcaaatgactagatggacaaatggctgaaccagggccattccagtgtttctgtttccatagttccttttcttctctttaggccctgaggaaggagctgaagacctggaaggttgatgttgtgctcaatgatggggcccccaacgttggggctagctgggtccatgatgcttactcacaaggtacagggagtgtggtgcttggagatcaggtgatggtggaggtgggcgcatgccctcctgggctgcagagtgcgtcaactaattgtctctatcctacagcccatttgacactgatggctctacgtttggcttgtgactttttggcccgtggtggcagcttcatcacaaaggttttccgttctcgtgactatcagcctctgctatggatctttcagcagctgttccgccgtgtccaggccaccaagccccaagcctctcgccatgaatctgcagagatctttgtagtctgccaaggtgggcatcatttcctttctcttgatccaggctcccaactcccaaagcacactttttaatatatcctgtcatttttaggattcctggcccctgacaaggttgacagtaaattctttgaccccaaatttgcctttaaggaggttgaagttcaggctaagaccgttactgaattggttactaagaagaagccaaaggtgtgttttggggaatggggtcactcttgggtcctggaactctagggaggttgggcctggtgggtcctacaggtaccttagaagggcctgaccaagcttctctcttttccttcctaaggctgaaggctatgctgagggtgacctcactctctatcaccgtacctcagtcactgacttcctccgagctgccaaccctgttgacttcctctccaaggccagcgaagtgagtctccagccttgagggacatgaggtagccccagaaacatggcctgaggatctcccctgacacctttccatcctcccaaacagatcatggtagatgatgaagagttggcacagcatccagctaccactgaggacatacgggtgtgctgtcaggacatcagagtgttggggcgcaaggagctcaggtatggagtggggtaggcacgggggccaggagccctggaggcagggaaaggccatgatgttggacctctgggaagaggatattgctgtgctaaaggtttgggatgggggcctgagccttttgatttatgtagccgaagcccgaaaggtgggtagtgagcctaaaacagaagggggcggggacaaagagggagatggcaagatcagtaatagtatctctggggcaggtcgctactaaactggagaacaaaacttcggcgatatgtggccaagaagctgaaagaacaagcaaaggcactggacatcaggtgaggagagaacgcagcgaggcaggtgtggactgggtgtccaggggaaaagtctgggaaaataacccaactcttgggactgttttgccagcctcagctctggagaggaagatgaaggtgatgaggaggactcaacagctggaaccacaaagcagccctctaaggaggaggaggaagaggaggaggaggaacaactgaaccagaccttggcagaaatgaaggcccaggaggtggcggaattgaagaggtgaaaggagctggggtagagcttggagttccccaacgcagggactgtgtgaagatgggagaagaaaatgcaaggcatggatagaaactttggagctgggccggttttactccctcaatccaccccctcaggaagaaaaagaagctgttgcgtgagcagagaaagcagcgggagcgtgtggagctgaagatggatctgcctggggtttccattgcagacgagggggagactggcatgttctccttgagcaccatccggggtcaccaggtgaggcggcattgggggtgcaggtttaggagacagaaggatctgtttgggtgtttggaggtggggggtgttgaatgtctttttaggttgccgaacgataggctgtggttgctgtcttcaccacagggtgccttggtgagtataaggccacaaagaaacataaaccaaaaaggatgagttaggtagatagatgagtgtgatagatttattttttttttttttgagacggagtcttgctctgttgcccaggctggagtgcagtggcacgatctcggcccactgcaagctccaccttccaggttcacaccattctcctgcctcagcctcccgagtagctgggacaacaggcgcctaccaccacgcctggctaattttttgtatttttagtagagacggggtttcaccgtgttagccaggatggtctcgacctcctgacctcgtgatctgcccacctcggcctcccaaagtgctgggattacaggcgtgagccaccgcgcccggctgatagatttattcttgaagaactagaacatcagaaaagaacttaggttatagtagatgctgccaggttacttgagtttcaagcacagatgaatagaggatctccctcagaggggagcagcattctttagttcattgagaccaagtgagcactcgcattagggtacttccactgaatactgaagaacatgtttttcctgacaaaatcagggtcacaaacaaaatgaacttttgtggcttatgtgtgggagtgtcataatcaggtcatctttgttgtacaggagggcagtagagcatggtggccctagagcagacacaggctcaggtttccttcccagctctaccacctggagctttgtgaagtgactgagctgactaccacttatccttgctgcctcagtttcctcatctgtaaaacaataatagaacctacctactagagtttttggtgaggaataaaaaaagataggtgtaatccctcatatgtgataaacactcaagaaatagtagttggagtttttcctttgagacaagatcttgttttgtcacccaggctggagttcagtggtgccatcatgactcactgcagcctcaaactcctggcatcaagcaatcctcctgcctcagcctcccaaaatgctgagattacaggtgtgagccaccatacccagcctagtatctttaccatgaggaaaataaaaggttctgacaattggtttaagtggaacagttttgttggatgtatgttggctgggccccttttattcagtggaaacaaactgtgtagacggtattctcaggagatgattgagatgctgtctgagaataatttttaaaggaaaaccagtgttgtagaatatgttaagatttggtgctatgtgggctgtaggtaccttccttaagacctatttgtgataccactgagacaagacagctgagtgggatagatcagtaacccagcctagaacgggatgttgtaaacaggccattcactaccctggatctgagctttcccatctgtgaaaggataatggatttgccagtgttctttctagtgttgctgagcatagactgaggtgagggacacagaaaaaaaaacagtatatttccttttaaatagtttacctttgtttctgttacacttcagttattagaggaagtaacacaaggggatatgagtgcagcagacacatttctgtccgatctgccaagggatgatatctatgtgtcagatgttgaggacgacggtgatgacacatctctggatagtgacctggatccagaggagctggcaggagtcaggggacatcagggtctaagggaccaaaagcggtaaggggcacgtgtgcaccaaagggaatgctgccactctgaggaagtgttagggtgggtactaccagagcctgagtagggcagcaagggctccaggcaatctgggtctctgagccccctactttcctttgggtctacagtatgcgacttactgaagtgcaagatgataaagaggaggaggaggaggagaatccactgctggtaccactggaggaaaaggcagtactgcaggaagaacaagccaacctgtggttctcaaaggtaaggagaggccgggggcaagactgcggggagatgagtcttccttgggagaagggcagctgatgttctcctatcacagggcagctttgctgggatcgaggacgatgccgatgaggccctggagatcagtcaggcccagctgttatttgagaaccggcggaagggacggcagcagcagcagaagcagcagctgccacagacacccccttcctgtttgaagactgagataatgtctcccctgtaccaagatgaagcccctaagggaacagaggcttcttcggggacagaagctgccactggccttgaaggggaagaaaaggatggcatctcagacagtgatagcagtactagcagtgaggaagaagagaggtgagtagttgcagctgagagaagggatggaaaggaagcggtggcttgaaccatttctctaaattgggggttcttaatcttggctgcacatggggagggttaaaaatactgtactgacgatcctgatttaactggtctggggtacagcctgcatggcaggatttttgcaaattccgtgggagtgcggtctgagtagtacagagtggtggaatcactcagagtcctcccctcttcacagctgggaacccctccgtggtaagaagcgaagccgtgggcctaagtcagatgatgacgggtttgagatagtgcctattgaggacccaggtgagagctctgtatgcagtggaatgagaaaagaccactggaagtctcagtattgggaattgagctttgacctttctccttccctctctagcgaaacatcggatactggaccccgaaggccttgctctaggtgctgttattgcctcttccaaaaaggccaagagagacctcatagataactccttcaaccggtaaaggggccataaactcatcaagagtgacccagggtctggtgggtaaatgggtaattttttgtttttgagatggagtctcgctctgttgcccaggctggagtgcaatggcacgatcttggctcactgcagcctgattctccttgaatcgcttgagtcagccttctgagtagctgggattacaggtgccaaccaccacgcccagctaatttttgtatttttagtagagatggggtttcaccatgttggccaggctggtcaaactcctgacctcaggtgatctgcccacctcagcctcccaaagtgcagggattacaggcgtgagccaccgtgcccagtctggtaatttctttagaaagcctggaatgttggatattagacagatgtcctttccactcaggtacacatttaatgaggatgagggggagcttccggagtggtttgtgcaagaggaaaagcagcaccggatacgacagttgcctgttggtaagaaggaggtggagcattaccggaaacgctggcgggaaatcaatgcacgtcccatcaagaaggtggctgaggctaaggctagaaagaaaaggagggtaagtgatggggcctccagagattgggtggggtgggggtggggggatggggaagaggtcacctgacaggttcctttgcagatgctgaagaggctggagcagaccaggaagaaggcagaagccgtggtgaacacagtggacatctcagaacgagagaaagtggcacagctgcgaaggtaatgggaggacaccacaaaggtacacagggctaaaagtgcagcagaaagcaagcctctaacctcttctcttcccccctgtagtctctacaagaaggctgggcttggcaaggagaaacgccatgtcacctacgttgtagccaaaaaaggtgtgggccgcaaagtgcgccggccagctggagtcagaggtcatttcaaggtggtggactcaaggatgaagaaggaccaaagagcacagcaacgtaaggaacaaaagaaaaaacacaaacggaagtaagcagagctgccaggctcccaggagagcatggggactaggaggaagggtgtggcatggctcagtctggcccccttgattaccggcctagcccctgctcacatcacagctgtctgaagaacagtgaggtggagtgcctagaactcccgtggtggtcctgagcagagaggaggatgtcctcctgcctgcctgaaggtctcccatgaaaacactgctgaactgtgttgacactcatgaccctttttttaaaccgttaaagggaagttcggtgttggagcgatactcaatgtagtcagtctacacctggacgtgtgggccacttaagccctccccacccccatcctattcctgaataaaaccaggataatggaagagttgtcttttctgacagttttaataagcacttccctatctgtccctacactgtgtgcggcactattcttaatatgtaccaattcatagacagaaatgacaaacgatccacaggtcccggtagtaaaacatttactagagagcaagcagaaaggaatgcacatcttaaagaaaccttcacaaagtcacaaaagtcaaagtttgtatatttcttttcctttttataaacgataaacaaaaatcatcaaaatcatttcagcaaaagacttttctatcattggggcaagttaaaaaaaatacaatgagatagaagacactttaaaagctgttgttgggtttcttgtttaattttaaatttagcaataccatctcaaacctggagcaatcctggaacagttaccaggatcaccttttcccttcaatccttgtggcttctgggaatcttcagagcctgggtctgaaaggtgtttcctacatgtctcagggctggatgcaaacctggctggggacctgagcatcaactcccatttagaatcagacatctcccttccctgcaaatgtctacaactaccaaattgctccccaacagttagctcaatggattgaatttgcagaagccaactcctaaaatggggactgcctggccatacaactaagaaaaagaagtcaatttatagatgcttataaggtgacaccttagtaaaaaatataagctacatacaatataaacctagagtgagttttgtgccctagaagaccctttatcccaagataacctcaacttacccacatgacaactcacctagagccaaaagaagcttcccagctctcactgcttccaaggaccaaaacagcttcccaagaaaacatccgaaaattccttctgatgaaggggtaatgtctccaagctccagctctccactaagggcagggggtccttacactttggaccccaacccagccctgagacacctagttaccaaaatctttctaaaaattaaggacaactgatttcacgctttagcacatcccctctaactgtcccatcgacttttcttgcgtttaggcggctctgggacagcaaagccgtcagctgtcttatctgtcttgctgtccaccttgtccatcttgctgctgtccactttgggttccatcttgggctccatcttgctctcacgattaaaagcttctttcctgctttccccattccgaccatcatttgcaccccggttctccccatgccggcctgcgcttcctccatgtctgttctccccgtgccgatggccatcagtatgacggctgctgctttctggatggcggtatccatctccatggcgaccaccatctccgtgacgtggactatcgctatgccgattgccagtctctccgtgactgtgacggctgctgccccggttctcagtatatctctctcttttcccgttgctgcccccagtcccttctcggctgttattccctgaagctgtgttgttgactccttgggctccggcagacgggtaggtcacaggggcaccactgatgttgccagtattgccaaagcctgggatgcccttggcggcactggtgacggggctgtcaggactgttatggccctgttgtgctgagttagttggaacagaattcaagctccctgcactagtccacccacttgccccagcagcagaacttccagccttctgattacttaaactggctgcaacaaagtgactcttgtactgtgactgaaagagaaagagacatcaggagtaggtaagatagcaagttcaagaaacttgaatatacaacttggcaaatgatgaggtttacagaaactctgtgctatcctggcactgtgagtttagtgtcctgatggccccacagtatggtcccttttgttcttgtgctataaaggaaaacttgtggatctctgtggagagatggacccccagtgttctgaaatgtacttttatagcctgattggctagaataaagcatctatgtatttagcacatttatctgcattcaaaaccaaaaagttctgaaaacttaaaaaaaattttcatactgcaatttaagtttgacagcaaaacctgccttgaactcattctatcgattcaccttagtgtgactatcagtaaattttgcttcagaagtgagttggaggtgggtgcctgggaggtgggcaacacttcaggctgttgggaagggagggaacacacaccctgctgcaggacaacaatcccaggccccaagtgtgactcaaagtagaccagcacaaggggttctctagatcaacttgcatttccaactaagctactgttaggtttatattcaaaatccaagcagcgtgaagaccctaaatctagcatcaagcctaggcgcccagctacaaccaggaaaactaagcccctctgtcactgcccaagagttactgctgaaagtgcttttaatgaaatgcttatttcagacctggaaagctgctttcattgccgttagtcgatctcccatagctcctgtggaaggcttgtaggcctcataattgctcattacattgttatttcctcgatcctaaaaaaataaacacatctatgagaatgaaaaaataagcaggaaagctcactgctatagactaggcctcattatgaaaacccttgaagtgggagctacaaaggaactggatacttttagaaagctgctactgctttgtgagaaaagacacagtgacaatcatttaaaaatgcttatgccctcaacccagaaattctatttctggaaattaaccctattaaacagaaatgcaatcagattatgcccaaagttgatcatgtatttacataaacacttccaattaattaagtaaaaattacgttaaagatgaaaaggccctgaatagcatattgtgtgactgctcaggccctgaatcaagaccatgaagggtctgaatttcggcttgaacacttgtcactgtaaccttaggtgcctcagcattgttatctgtactaacttccattcagttattttgaagattaactgagccaaaacatctgattgcttggaatggtcctggcacatataaagtgctcaataaatattacctattattatgcatcatcatcattattattataatgtgggaacagagtatgtaattacaaagatgccaagtttaatgctccagaaaagtatactggcagctttcttccctggcttggaatcaaggtgacagaaaacaggcagttaagaaaggccaccaaaagggtacatttgttacctggtttgtgagaaaaactagctcccgacttggaaattcctgatccgttcctgagtttaatgacaagatatggctagactttacagtgaccctttggcaacatttacctagcagcaggctttaggccagtgttgaagggcttataaaaccagactgctgggccccaactccagagtttctgattcacaaggtctggggttggggatgagtttgcatgtgctgctggtccagggaccacagtgtgagatcactgctaatctagaataatttcctgagcaagcctagtcaaccaagtacacaaagatgcttcttcaatagaaagttaccataagaatgagcactgcattgactcaaatcagattaaatacaaattcccttctagacagggctttaaactcactgaggctttcctgggtagatgagaatattcctaatgactttcaggacatgagaccaactataaaggcactactgtagtagtctagactcaccatgttctcagagcccaggccaggccgctccctgtagcctaggcctcctccaccaatgttcagcttttttcctttccctcctttgaatcgagatttccgaaaccaggcattctgcattgaacaaaattcaaggttaagtcaagggagggagaaaagaacagaagaagagaacgaggacaaagaggaaattaagtgggaagggggaacttttgcttaattttcagccagcactacgctaagggaggaattttcacaggaaccacagattggtttctctttggtagcataatccaccaaatttgaaaagtggctgagatccttatctaaggcttcctacagtgctccctccctcaaggctctcctggaagggaagttgttcaggtaagcttcaaacccagaggagtaactttggctacttctaacttccttgaggaaaatgagcttatattttatttctcaaaccatgtattattggacgtaaacatttggaacttaaacaactggtatgttcagaagcaaaggaaaaatgctatgtgaagtgaggcttatcagaactgactatagggacagactcccagaaaggatggtagccacacaactgaaaattttatttacccgcagagcgtaaaagttttcattgaacttgaccattgccactcaacatatttactcacattctcttaagaatgcagggcggtggctcacgcctatgaatcccagcactctggaggccgaggtgggcggatcacttgaggccaggagtcaagaccagcctgaccaacatggtgaaaccccgtccctactaaaaatacaaaaattagccaggcatggtggcacatgcctctaatcccagctgcttgggaggctgaggcaggagaactgtttgaaccggagacgcagaggttgcagtgagctgagactgcgccactgcactccagcctgggtgatagagtgtgactccatctcagaaaaaagaaaaaaaaaaaaaaaaaaaaaaagcaaatgtctctgggaaggttaaagttttatctgacaatcacatattaccagcaaaataaagtgcttgagaggtagggcagcaggcttggacaaagtcctgagcacagaaagcctgaggtacaaaaagaaatggaagaaaatgccaaagtcaaaatgtgtcctgttttaaaagtttatttaggactagctctctgtgctcaggagcaggggaggaaacattattctcttctctcctgcagtgcaggtcctttactcctaggaccagaaacttgggcactgccacattgcagctgggttgtaccagttgtgtgagctggcctaggcatttgacaaactcttaacagtttctgctctcagaaagtgttccgaacccatttgtaatttggggacagcatggattcagatgactccaggtttgatttgttagaatgcctcacttagctttagattggagcacacctggaagagggcaatcagtgtggtcagaggtctgagatctctgcaaggaacagttaagaggcaccatacaggctgggcacggtggctcacgcctgtaatcctagcactttgggaggttgaggccgaggcgggcggatcacctgaggtcaggagttcgagaccagcccgaccaacatggcaaaaccccatctctactaaaattacaaaaattggccaggcgtggtggtgggcgcctgtaatcacaactgcttgggaggctaaggcaggagaattgcttgaacccaggaggcagaggttgcagtgagccgagatcgtgccattgcactgcagcctgggcgatagagtgagattctgtctcaaaaaaaaaaggtgggggggcactatactatacacatattgttttaaaggcatcacacatttttagcctcccagaagaaaaattttgtgggggaagagcagtaaggagaatagtaaccatctttgagattaaatttactcctaagtgtgctatggggtagaaattacagcgacagattttagcacaaaggaatagcttttcaaaacagatgctgttgaaagaagaagaccagataagactagatgaattttagtatctcacaattcctatctgtacctcataagccccacatcctcctagccacccaactttcttgtcaagtttttatgttatctgttccaggactgctaaaatgtcttggtcttataaccaggagcaattgaaagtgtgcccagcccctcacctgcattgccagatctaggagttccttagaaacgtgttgattggctccttccaagttccggaccaggtcaccagcaaaattgctgtccttgggagtgagtagggtataggccacacctttctcacccgctcttcctgtgcggccaatcctatgcgtgtgggtatcaatgtctcgtgccacatcatagttaatgacagtcttaattgaaggaatgtccagaccacgggctgaaataaaaagcaaccaaattcttttattcttcatctgtagtcagaagatcaaagtaaccagaaatgctagtgctaataagccacatttcctttatctaggcaaagcgcatgggtttggtgagctgagatacaggcatgttaagtcaccaccacagattctatgatgttaggccttctagtgtaagggacttttattttttagagacggagtcttgctctgttgccagacgggagtgcagtgccatgatctcggctcactgcaacctccgactccctggttcaagcaattctcctgcctcagctttccaagtagctgggattataggcacgcgccaccacacccagctaatttttgtatttttagtagagacggggtttcactatgttggccaggatggtctcgatctcctgacctcaggtgatccgcccgcctccacctcccaaaatgctgggattacaggtgtgagccaccgtgcccgactgggacttttatcttttgcatcagtaatctgccatgccctcttctcttgcactgggaatatatatttaaaatgtgtcatgaagctgagaagttctctcctttctaggaaaaaatatcagtgtttaagggtagttattaaaacttgacagaacaaatccagaaattatattccaaaaactgttctcatcctgagttaagttgcccaactaagctgtgtatagtagatcaatgtaagggtaaggtatctactatattcagacatacaataagggcattcactgccttttttcccagagtgacttctagctgcagggattctttgattagagagaaatactaagtgaaaagtggtatctagagctccagactgtgatccctgtgctgaactgctgcttccttgggggtttgggaggggatggccagccaggccaacagtctttccatcagcctgctcagatattataggtcttatgtagtaagacagagtacccttatagcctaggaacttaatgttgttgaaaaattcatactctacctgcaacatctgtggccaccaggactgggatgtcctttttcttaaagtctgaaatgaccttgtttctctcactctgatccatatccccatggagcagcccaagattatgaccctcctgtttaaggttattcgctagctcttcagcattggcttttttagtaacaaagaggaggacactccctgaagaggtaaattctaccagacgccgggtaagccagttccatttactaggtccagaatggagaatctccacaatctgtgtcacatcttcatttgcctgagaaggaagaaatgaaacagatgattgtgacattggagccacagggcacctgaacaaggactaggcattatatttctacctgcatcgagaagaccttgaacaatcccagttctccttgggccttcagcaagtcaagtgcagctcaaaactcacctctcctttccaatcaccttgctctccacctggtgtacatacctaatttgtatgccccactactttgtagagctttccttaacaataaccatggcaagcaactgaaggattctctaagcagccataactgaattccaagtcccaattcagagtaatttttcacatagcgcatatgtacaggtaagaaatgaaacctgattttttccaggccttccaggtcaccctttccctcctgcgtaggcccctaccacaataattaaaacgtcagttccaacctaatacgctgatgcttccaggcacatctttttgtctctttgaagcctttttaaaacaattgtaagttttgagacattcaataaaacaaaaaaaacacaaaatgaacaaaatcaactcatacccatcacctagcttcaatgattcccaacattttgccagtcttgttacgtctatccccacaacttgcaaaatacccaatctcaagcatgttgcatctataaacataacatcttttttttttatctcaatagtgagaaattaattctgtgttccataatatgagaaataaacccattaaggtcccatccagccctgcttagggttacctctccaatatctccctgcaccactcgaatagggtcgatcaggatgtctctggccaacttttcaatcttcttccgaaaagttgcactaaataagagagctaaaaggtaagataaattctgttagagaaacaatatgatatctttatgcatacccattaagcttctttggcattcaggattattcagtttttttacataagctcacctgaactttaaatttagtttagaaactgattcactagggaaagatttgctcttattctatttttattacatttttagttaagacaagttgtcagtatggttcagaaaaagactcttgatttcaaatcagcagatctgtactgtacactgcttctacccactgataaaactgtataatttagggcagtttatttaatttctgatccttggttttatcatctataaaaaggaacaagttatatctagtgctaagatcctgtccagctcagataaactcattacctcccttattatggttctcaccaacagacacaagatcatttttacttccataactctgagtgcttataaaataaataagtgccctttttagtacaaatttggtttaacaaaggtgcttcatacatactctgcctgtcaggacgaacatgacttgctatggatcgaacttggtactctgcaagaaacagaacaataaaattattataacctgaaatacagtttgggaagcctggaaaaagccatattagtaaaagtcttcataagaagttgtaagaattaagaaaattagaaaccccaggccaggcacagtggctcatgcctgtaatcctagcactttcggaggccgaagcaggcggatcacttgaggtcaggagttcgcagcctggtcaacacagctatctctactaaaaataccaaaaaaaaaaaaaaaaaaaaatagccaggctgtggggtaggtgcctatcaccccaactactcaggaggctgaggcagaagaatcgcttgaaactggaaggaggaagttgcagtgagatcgcaccgctgcactgcagcctgggcaacaaaagcaaaactctgtctcaagaaaaaagaagctcctaaacatatcattcagcataaaagtgaaaaattttccctccatccaactgggctaggtctagcagtgttccaatcagtaaagacagctacgaggataggaaagcaaagggcctcgaatgatctgacattcatctacccaagaacacagaccttaacctctatgatcaaaggcatatggataaaaatgaagacagagaaaatattccccttatatacaaaggcactttgaaatttcctcaacccaataaaacctaacatacttttccagagaaaactcctaaaaatgttcatcttagctatatttctatagtctaaccccatccaggagtatttttagcttctctcatgctgaaaaaacagtctagaaagacatggaaaaaaaactagtatcatgaggatggggacagaagaaactggtattcaaggcataccaaatcccatgtcaaacattcgatctgcttcatcaaacacaaggtaagagactctttgaagattggtagctttctttttcacatgatctatcagtcgaccctataagatcaacaaaatgaacagtaagtataattaaaggcattcacagggactttctaagcagttgcactcctggcaaaagtgctaattctctagtctcagactgtaatagatactggtccaacagccacataccttatgcactacttagctcaaaggaacagaaattttgaaaactcaatcggcatcttcatttacactgtgatttaaattctgtgggaaagtggccagaagcagtttttgaggcattctaaagtgacctgatttaaagcataatgacaggtttcaatgtttaaactacactcttctaggctattctgaccatatgtatctttctgattcttgatgaacttggcaatcattttgtgggagagtataagaaaaactatttgacatagaggggaatttgtagctactagcctatatgtcacagagactctcactgaactgctaatttagccaccaatcaaaattaaaaccacagcctgccgttcatcagtatattttcaaccctgcttttaccacactttaggggaaattctctgcaaaactaatcatgttttccataccgagggaggctgagaagccatttaaacacaaggcatacttactggggtacacacaacaatctctgccccctcctgaagggccttggcctgctcccacatactccctcctccatatacggccactgatcgaagattatatgcttttccaaaccgcttacattctgcatggatctacaaagttgtgaataatatattaacaaactgtgacactaacaaatacctgtcacaacccaaacgaagttctgaaaaacagaatgtgatgtcataaaaaatcgaaacctagaacatactttaaaaccacgattttattcataaaggtataaatgaatggaataccattattgcatctcaacagattatctaaaatcttttattcattttacccccttctcttcctgatcctgtcactgcttttctaccaagataaaatgaactcatcctacagaaaaactgtcagcttataatacaaacaatccccatatcacaataggcttttcctcttaaaaaaagtagttctggccgggcacagtggctcacacctgtaatcccagcactgtgggaggccaaggcaagcagatcacttgaggtcaggagtttgagaccagcctggccaacatggtgaaaccccgtctctactaaaaataaaaaaattagccaggtgtggtggcgtgtgcccgtgatcccagcctctcggctgaggcaggagaattgcttgaaactgggaggtggaggttgcagtgagctgagatcacaccactgcactccagcctgggcaaaagagtgagactctgtctcaaaaaaagcaaataaataaaaataaataaaaacagtagtttttaggggaaaatatgtatttggttatatagaaaatatttaacacataatactttccaaaagtttcctggtagcacaacactgtgaatatacttaatgccactgaactgtacattaaaaatggttaagataatcaattttgtgtgtatcttatcacaattaaaaaaaaaagtttcctggtcattctacctcacttgactggctggtcccttgctagtccacatatggaaggaggcattctatagaaagcacatacctgctggcaaagctccctggtaggacacacaatcactgcaattggtccatcacctggttccaactccttctggtccattatatgaatcaacatgggccaaatgaaggctgcagttttcccactacctgttttggcaataccaatcatgtctctaccacttaatgccacaggcacaccctggagaaaaagtaaaatataaccactctaaaatttcaattctaaagatgtactgaagcaaatcctggggaatgataaatgactactaacatttttatttgcaatggaacaaaacatacctggtgctatgcatactggttgtgaaatagaaatatcaatatccaacattctcattaacttcttgatttataggaaatgacatcattctcattacgtggatatcagccaccacttacagaacagaaacaactccattttgtttaaaatacagaaatgaaaaatcaaggccgggcagtggctcacgcctgtaatcccagcactttgggaggccgaggtgggcaggttccctgagctcaggagctcgagaccagcctgggcaacacggtgaaaccctatctcaactaaaatacaaaaaattagccaggtgtgctggcgtgcgcctgtaatcccacctacttgggaggccgaggcaggagaattgcttgaacctgggaggcagagattgcagtgagccaagatcgcgccactgcactccagcttggacaacagagtgagactctgtccccaaaaaaaacaaaaacaaaaacaaaacagaaaaattgcaatttataatgaagggttgctaaaattttaaaaattttccccccttaagaaggtacagactatctcattcatatacagaaaatgagaatgttctgcataagaataaataaatcccatatataaatgggaaaaagaagctaaaactttcagtaatgaatgagaattttcaagtgacgaacgaaggaattctagtcattgacagtgctaaatttgtctatatacgaacctttttggttaggtttaggcctaataaattattttcttcatatcatattttcaacatacgtatcagatacaaaagaatatttgtcagccatttagtgacttcttaagagtgataaatacctctatccttatcaacaaggttctacactaaacactgttttactgctgtgatttgtttttaaattaatatagtcatgaaagactaccctactttatttttctttcattatgttttacttacctggcactgtattggagtgggctgtgtgtattcagatttccgaatctggtgcataagttgttcgtcaaacccaaaatgagcaaagctacttcctggtctaggaggtgcagcaccagagacctagagatagagacaactccccagaatgacttgtacttcaacattaacagcatttgaagttcaacaatacttacctggatctagcattttagctggagtatgaagtaaaaatacaagtctgtaagccaaaatcatacaatgaaaaggaaaaacctcaaatggtaacaaatataaacctcatattaaaaactccatgataaatattcccaagataattgtcatacaattttaaatgattaaaaatttcttaactcaaaattaattttctcataacaaataaaacggaaaaaaaattgttcaatgaattgggaagccataactgttcttttgccattttgcattaagtattaaccagatggtagaaaaaaattaatgtatcttactcttgaaatgaaaattccaagtgggctccaaataagacaagtctacacatgctggctaccaagatataatctactgcctccattttcagttatgcttgatgaattaaagtctcacttagtgatggtccagccactgtcaagccctgttcaaactgcacctaggtgaagaatggggcttataatctccattttgtcccccaaagtggtaacctttcaatgcttctctggtgatgttgatatttccaatcaggatttcaggggttttacttaaaatttttcttgggtcactggggagatgagtaacctcttggaaaacagacaagtgtacacacacaaatacacacccctcctggaaaacaggagtttaaacatcgtgtagcaactgataaggtgcacacaggcgagaaagttgtctatattagagtagatagcatagcatattttttctgtgtgtttcatttaccatctatcagcaccttaaaccaatgtagccaatgtgcagcccaaaactttctggtaggcagtttaaaccattctgaaattagtacatgcatatttttaaaaggtattagtttattctaatttttaaaataaagcatactatatgtaatttgacagacaagtttatcttcatttcaaaatattctaagatatcatctgttaacatctattccttttgtttcctcttcctttagatggggactcccacccttcatcactagcccatccagcacagaacatataaaactgactgaaatatgaaacaagaaaatgatcctatcctaaaacagcatctagaagactaaaacaatcaaattaagagacatgaacagaagggatataataattactctggcaaagacagttcagagaccattagaaaagaaattcaaggttattagtttagataaccaataatactaaatctggactaattaacattaatattaagaatattgagcttaatgatgcttacccgaagattgagcttatgccggagatctattaactgctgtggagtgaggttggttatctcttcatgctcattgtaaaagtttttttcaaatggtg

SEQ ID NO: 903 - DNA, 15500 bp, Homo sapiens
caaacctccggaggccggggacggaaggcgggcccgcagcagatcctggatccggaatctcccgggcaggagcggaatctgtcccgaaccgggtctgtgaggaactcgcgaacttggattaggaaatcccggagcccggatcgacaaatcccggaacccggaattaagatcgccaagtcccggatcgcggagcacagagcacggagtggactcgacgcggagcccggagtccggatcgcggcaccgcgggacgggacggagcgatgtcgggccgaggcgcgggcgggttcccgctgcccccgctaagccctggcggcggcgccgtggctgcggccctgggagcgccgcctccccccgcgggacccggcatgctgcccggaccggcgctccggggaccgggtccggcaggaggcgtggggggccccggggccgccgccttccgccccatgggccccgcgggccccgcggcgcagtaccaggtgagcaaggaggacgcgagcggacgggggcgagaggcgctgcgagggcgcccgggccggcggctgaaggggcctcgagtgagggccctggggaatgcatgaggaactccgggagacggtggagggcgggccgggaccctcgggctgcggcgggtcgcggtggagaagtgggaaggggaagcaggttctgcagcggagggctggaagcagctgggaggcctgggggcttccgcggcacagggattccgagtgactgggagatggaggagtttggggagccagtgaattgtggcgggtgggttgagaagtctagggtaggagggctggaaagtgatgagaaagtttgggaaagggccctcgctgagaaaccggggttaccctgcatcggccttggtcccagtccaagtctgccctgttttttctgattgggaactggcggagctctagcgtgtctgagatggctcccggctgctaataaggaggaaggagcctggcttcccacgggcacgggacgctgaggctagggccaggggattccagcttgtgcacgggcggactttactcctgaggcagggccaggcgccttcgctgggaggactccagcttagaccagagacggtggtggcctggcctgaggggaggcccagcccagtcacaggccggctctcttctgggctttctgcctcctgtcatcgtgtccgggagttgattagtctggacgtgcagagtggagccctgctggtctggggccggaggagtctgcgagagttgcttcaaagagtgctgtcctgacccctttggggttttgagagctgctcagattgcagcttcaaaagcccttgcaaagcagcgacttctgctcagtgtgtgaggacctcagcctgaccctgccagtgctctagtctgctgttcaggttgccccagagggcttggaaactgtgcccatctgccttgtcaccctctctgcatttttatttggccttcaggttctaactccaccacgtccgaagccatgtgcccaagcatttgacactggcttcttgctcatctacgggtttgctgtgggcttcctctgttttcgactcatgtctccaggcagaggtccttagggatcctcgtggagtatacacagcctacctgccccactgggccctcacttctaaggagatggcttaactagggacagtgactggatttttttttccttcttactcctcattcttcctcctttctcaagagaaaagagagtctgggtatgggcagagacagacctggtcccagggattccagctggggctcatctctcccaccttgctgtccccgttggggattcatgggcccagggtgttgctgagggctccctgcatcattcattgtagcccttgggcctgcccactgagacctggcctgggcaccatctgtgggcctttggccttggaaggacctggaacagacaagccgctccagtttccttggcatgcaagccataggaaatgtgcccttgggacagcccctgagaggatggattccacatgttttggtggggggtggccttgggcctgtggcaaggccaagctggctggctggttaggcctgggctgctagctgtgcggaagtaggagatggccctgagtctgggtttcccatcccactagctttcctcctcctggcaggagaggtagatgggaaggagaacccagccagctaactttggctgagtttgaagaggatcctatttgccttctttccaagtccagttgtatgactgccaggagaagggacttgagatctgggaaacaaaggggttcctgtctgttagggctcatgagatgcacttgaaaagtgagaatttgaggcccaagctgagcaaatagttgaaagaagggaagtgatgacctcccttcctccagagggtggttctagctgtggatcacagttaacagaggaacctaaaaaaagaaaaagaaaagaaaaaaacctccagggcaggatatggtgggctcacacctgtaatcctagcactttgggaggcccagacagaaggattacttgagaccaggagttcaagaccagcctaagcaacatagtgagaccatcatctcttaaaaaaaaaaaaaaaaatttagccaagcatggtggtgtgcgcttatggtcccagctactcaggatgctgtggcaggaggattgcttgagtccaggagttcaaggctgcattgagctatgatcctgccactgcactccagcctgggcaacaaaataacaaaaacctcagattgctgggttcactccagagagttcaaaaagttcaaaaaaaaaattttttttttctgatacggagtctcactctgtcgcccaggctggagtgcagtgacatgatctcagctcactgcaacctccgcctcccaggttcaaacaatcctctgcctcaagcctcctgagtagctgggattacaggcgcccaccaccacgcccggctaatttttttgtatttttagtagagacgaggtttcaccatcttggccaggatggtctcgaactcctgaccttgtgatccacccgcctcggcctcccaaagtgctgggattataggcgtgagccactgcacccggcctcaaaatcctttttactcatgggagagtgggtggtatgttccccaactgaggccctcaggcccaggttccaggagcatcagggccacatttggggcagggcaaagcacgctcaccggagccctggattcctcatctggggttcaggggattgatccaggcctacctggtcctgctgcaggcagggagttagggaggctcagagtgctggactgcttttttttttttctttaactcctgagttgtttttttttgtttgttttgttttgttttgttttttgaagtgggaggagttgctagcgcctataagccctatggagcttggcaaggctcagctgggacttgaactataagcagccttcccctggggccctgagtgagccaggggctctgggcccaggaaacctggagcagatgtctgggtggagcctattccagaccctgcctatgaggccttgtcttgggacttcctgttaccggagcacctgcccaggagggatgggtggtgctgcaggttttgtgaacactgcagcagggagcttcctggggaccacagggccctcgctcacctctgcaggacccactgcttcagttcttccctgtctttgtctcaggcactaggaaaaactagtctgggatgtctgggcctgggcttacagctgtagccacacttagtttttttctataatctcaggccagagaaagaacaatctttaaggcagagaaagaggctgtcttttgcctttcaacagctctgattaatctcttcctgatgcagagagactttggcaggactcccaaagccccagagccccccactttgaactttttattctcccaaacacttccgtcccaccctgctcctcctctccccatcctcacgtctgtgggtcatgtttctttccatctccgcatctggtcaagaatctgaccctctgtgttgggaacatgggtttagtgcgggatgaagaggttggggaagaatctcatctccatgatgctggggtgggggagggtcctttgatttggtacaagtctccaccctgccgggcttggttggctggttgtgctcgttgcataatctgggccctggggccagccctgtgaagctgccagggacagtgtgtgcaaggcagagctgccaaacaggccttgcaggcagcagccatggggaggcgggtgggggtggaggtgactcccagatgggctccacagaaatgtcagggagcaaggcctcaggtgggaaatccttctgcaggcatctaaagaagctatttctgtctcccactttcctgctgctcagcctgggcctctatccttgcctcccaggataatcttagcccccttctccagcttgggattgccagggctacacggagccagagccagtcctggctgccaggtggtgcctggaccactggcagagtccaggtgctagctgctctctttcccacaggccacccaggagccatagcttcccttctggggtcttctgtcataggggtagtagttgggcagtagggaggtaagaggagggtccagttctgggctgtgggtgggggctatgtgataccagactacagggtacagggtccctgtaccctgcccgaggccacccccaccagctggtacacgttccaagccatcctgttgcagccctgctcacctggggtgctgctgcctaccagacccctttctccctcggccacagaggatggggattggggctctgcgccattggcctactcatactatagtacactcctctgcctggcagtgacactgcccctgtgcctctcagccatgcttcttcttcatgatgggagaaagagaaggagggcagggcttggcaggactgtctgagagaatagggaccagcttgcccagggaatagggcacagcatgctggggctggaaggtagcaatgggccctgaaaagctccccaaggcccttccctctgcaggcaggaccctcctcccagcccaggttctggcaggcctcattcgctggcatggctgccagggcggttgcagggggcagggcaggtgtggtttacactctgtgctcaggcgcccactcccctttgttcctggggctccagcagggctctggtgtgctgctcaggccctacctggctgacgagagggatggagggcatgggctatgggtcccggagggccttgcccctgacctatgcacccccgttggctcacttcccccagcgacctggcatgtcaccagggaaccggatgcccatggctggcttgcaggtgggaccccctgctggctccccatttggtgcagcagctccgcttcgacctggcatgccacccaccatgatggatccattccgaaaacgcctgcttgtgccccaggcgcagcctcccatgcctgcccagcgccgggggtaagagcatcctgcttctctcactctgcctaactcagctctggtggtagcagagggtttccttctatcttaagagctttggtgactgaggatgactccaggctctcctgggggagagggtcctggagactggaggggcgttatgggagtgagtgtccttttttggaccattgacctcttaagtgggtttctgtcctccccaggttaaagaggaggaagatggcagataaggttctacctcagcgagtaagtgttaagaggacacctgggaggcctgcccagtggccaccttggggtgggtgtccatctctctcaaagctgggctgcagcaggaagggaggaaagagccaggctttggctgaagcaagctgatgagcttctgctaccttccttcagatccgggagcttgttccagagtctcaggcgtacatggatctcttggcttttgagcggaagctggaccagaccattgctcgcaagcggatggagatccaggaggccatcaaaaagcctctgacagtatgtgtggccctgaccacctctagccttcccaggtttccttgccttccacccccttgttttccaggggccaagcaagttgggctagagccgggtttttcacatgcaggatgcagcccactagtagagtacgaactcagttgaatgtgttggggccagtatgttttaaatgaatatatgacagtagaaaatcttaaaatacttcacagtagtacttaccatagtagtaaatggattctttcatgacatttttgtttctgataaatagatatgcagaccttgggtcataattgaaaatgtaaatcttatgggtggtggtcaaaagtttgaaaaccactagactaggggataaaggtagttcctttctccttccccttccccatccatagagaaattttcttttttttttttttttttttttctgagatggagtctcgctctttcacctaagctggagtgcagtgttgcgatctcggctcactgcaaccttcgcatcccaggttcaagtaattcttcttgcctcagcctcccgagtaactaggattacagatgcctgtcaccacgcccggctaatttttgtatttttagtatcgccatgttacccaggctggtctcgaactcctgactgcctcggcctcccaaagtgctgagattacaggcgtgagccactgcacccagccgagaagcttttcttaataataatgtagaacagtcccgagtggtgaagcctttccaggggactaggatattttggagccgtgatgggtgtttgggtttcatgtaagatgtgagccagagactggctgcgtgttactccatcatgccgtagcaccagtcccactgtgctggcattgttggtgatgcatctctttccccataaaatggtgagttccggccaggtgcggtggctcacacctgtaatctcagcactttaggaggccgaagtgggcagatcacctgaggtcaggagtttgagaccagcatggccaacatgttgaaataccatctttacaaaaacacaaaaaattagctgggcatggtggtgcgcacctgtagtcccagctacatgggagactgaggcaagagaatcgcttgaacctgggagtcagaggttgcaagtgagctgagatcgcgccactgcactccagcctgggtgacagagtgagaccatgtctaaaaaaaaaaaaggctgggactgggacttactacttctgattcccagtacctgacaaggtgcctggctggctcatggtgctcagtactgattgttgaatggttcatatgagaagatgcggtagcactgtgtcccagcatcttggtccacctccagttgtgattgcctttctctctttagcaaaagcgaaagcttcggatctacatttccaatacgttcagtcccagcaaggcggaaggcgatagtgcaggaactgcagggacccctgggggaaccccagcaggggacaaggtggcttcctgggaactccgagtggaaggaaaactgctggatgatgtgagttggggagggaggttctggagggaaggaggcctgtgtgggtttaagactgagaccaaggagtttgatactagcctgagcagcagagccagaccccatctctacaaaaaatttaaaaattagctgggtgcggtggcatgcacctgtagtcccagctactcataaggctgatgcaggaggatggcttgagcccaggaggtcgagcttcagtgagttatgatcacaccactgcacttcagcctgggtgacagagtgagattgtgtctcagaaaaaaaaagactgggccagacacttgggcgctcccagagaagtcctgccatagggaggggggcgctgctccaagcccgttggaggttgatttgtgtggttattacagtgttcctgcagatggcagtcgagtgtctcgaggaagtccctcgtgggctgcaagagggcaccatttccctgcctccagtctgcccagagtcctgcttccatccttcagggcccaggaatcttcagtatccggagctccagggctgaaatggggcttctctttcttgggatttagcatagcttgagatttgagagctcagcagcaccatctcacacccctttccatccccagcctagcaaacagaagaggaagttttcttcattctttaagagcctcgtcattgagctggacaaggagctgtacgggcctgacaatcacctggtggaggtgagagtgggcctggggcaaaagcaggctgatgtgcaggtttggcagggaaatggcctcagggcccttgggaggccctgtgttcacgcccacccccttggtgataagccatgcttccctccctgccagtggcaccggatgcccaccacccaggagacagatggcttccaagtaaaacggcctggagacctcaacgtcaagtgcaccctcctgctcatgctggatcatcaggtgacagagaccctggggtcatttctgggcccacagggacccctcaggaggggagctggttcctagaaacccttcctgtccctgccctattttcccactgttctactataagaacccgttctgactcccctccatccaactccagcctccccagtacaaattggacccccgattggcaaggctgctgggagtgcacacgcagacgagggccgccatcatgcaggccctgtggctttacatcaagcacaaccagctgcaggatgggcacgagcgggagtacatcaactgcaaccgttacttccgccaggttagccagatgccagcccccgttttctcagcccttgctttgccttgcctgctgggctactccttggccacagcctgcagactgctgccctcactggtcctggaatggtccactccactgtgcccacaagccaacgctgagcctttcgtatttcctccagatcttcagttgtggccgactccgtttctccgagattcccatgaagctggcagggttgctgcagcatccagaccccattgtcatcaaccatgtcattaggtaaatgcaaggagggggacaggaaggctcttctaagagcagattcacccttggcttgaactaaagccaaagaaagcatcaggtttctttttccctgagtgtgtgcagagaatgggccccagatttggcccaggtgggcaggatgaagtcagctatgtgccttccctccccatgtgctgcctgcagtgtcgaccctaacgaccagaagaagacagcctgttacgacatcgatgtggaggtggacgacccactgaaggcccaaatgagcaattttctggcctctaccaccaatcagcaggagatcgcctcccttgatgtcaaggtgggccctctggctccacagcttcctctggggcccaggattggggtgggctggctctgtccagcatttccatacatgtagcacctggaggacgggatgggaactctggctcagttgcttgcatgtaagctttgggggcacagtctgacacaggtaccctctccagatccatgagaccattgagtccatcaaccagctgaagacccagagagatttcatgctcagttttagcaccgacccccaggacttcatccaggaatggctccgttcccagcgccgagacctcaaggtgtagtcctctttcccgaggggactcctatgtaaagctctgggtgatttttacccacagcagttcccagggtggattagcccaggggtggggattatgctatggctttcctcctggctctttgcagatcatcactgatgtgattggaaatcctgaggaggagagacgagctgctttctaccaccagccctgggcccaggaagcagtaggcaggcacatctttgccaaggtgaggctctgccctgttttccctcctttggccgtgagtagcaaaggcctgagccacttggtttctcccttctccaggtgcagcagcgaaggcaggaactggaacaggtgctgggaattcgcctgacctaactgctcagggatctttcttcccagccctggagcctggagggagaccaccctctgggtccttgctggggccgcagacacgtaggctggggtgaggagtgtctgctgtcaccctctactctccagctttagtcttataaatgtagtgataggattccttgttgcttggtccccaaagccttatactttttgcattggctttaattgggttcagcagatgcctcctctgcccccctgcaggcaggcccaagtaggactgctggaggctgtgctttgacattgtaagacatttccgaaccaaaggctgctgggtttgcatgtttacagactccccctggggcgagggtcagagctggctctggggagctgggctaggaagaggaggtgcagcccagactcttcctagcctttctaaaccaaagttctttgccattcctacaagcccagccttgctgctggttttttcctttcctttgggtatttgcactattttgggagcaagttttctatgtgggagccactttttttgtacaggggtaagttgggggttttcagggagcctgttaggtgcctccttcttttctttcctcaatctatgcaagcggctctggccgccatcatctcctgggatgccagagggctgcctctccagcggcttgggccggggaggggacactccagttctctagcatggcctgaggtatggggtatgtgcatgtggaggccagggtaaggtgaatggggaggctgggaggactggtgttgccctttggagcttggtgaggagggtgggcctagggcttggcgagtgccacatctggcaggtttggaaatttccaaataaatccttttgtctattggtggtgcctggacctggtccttgaacagcacagccctcattaacagactggagtcctagaggacttggcccacagagctttattggagagatacacacaaaggctgtccactcacttccataatttcttgatggacatgtttttctcactgtccttctgcatgacctaggggtgggagagagaatgaacattaagttacgaacacacacatgccctagcccactgccccagagccaccactggcaaaggcacaaagatggaggcctataccttggctactgccatctcaaagtcctcctgagtgacatggactcgccgttctcgcagggcatacatgccagcttctgtgcacacgccctgaacaggaaaaggaaattgaggccccactgctgtgcccctcatctgtggcccttgagcccagagcttcctgcctctgccctgttttcagtgggtactccaattaccttcacttcagcccctgatgctcctggcatgagctcagcaatttttctcaggttgatcccccgggtcaggttcatcttccgagaatgaatcttcaaaatgtccagccgggcctggagatggcaaggaaaagcctgagccccacaccccacccccacagccagagccactttgcacagtgtccatcacaaacctcctcattggggggtgggaattcaatttttctgtcaatgcgccctgggcgaagcagtgccgagtccaggatatcaatcctattagtagccatgataacctgagcagagaaagcaagtggggatcagctaaacctcttcctcagcctgcgtggcacccaggccttccctgggcccatcccaaggatgctaccaccttaccttgatgttcttggtggcctcaaagccgtcgagctggttgagcaactccagcatcgtgcgctgcacttcactgtcccctccagaacccccctccagccgcgaggagccgatggagtcgatttcgtccatgaagatgatagatggagcatgttcccgtgccatgacaaacagctccctcaccattcttgcccctgtgtggaggccgagctggtgttagggagcttattagcttattagctctctaaccccctacccctacctcttgcttctcacattgctagccatggttaccttcccctatgaatttctgtaccagttcagagccagagacacgaataaaggtacagtccgtatgatgagccacagcccgggccaacagtgtcttcccagtgcctggaggtccatacagcagcactccctacaggggaacagcaggactcagggcagaaagctacacccctcatttcattcagtgaacatttaccgagtgctgggtcccttgctagatgttagggatacaaaaaaaaaaaaggaacatcaaggtcccttctatccaaaccacctcaccgccctaggaacacttccccagccactcttttcagggggagggccagcccaagcaagatgcagcctatcccggtgcctccccaacccctgcagtagggctggctggggcaggaggagtaagtacagcttggccctctcagagaagccctgctcctcaccttgggctgagcaatgcccagtgcttcgaagagctcaggatgcttaacaggcagctcgatcacttctttgatctccttgatctgtttgtccagtccaccaatcatctcataagttgaatctggtactttctccaccatcatcagtgacactaatgggtctaccttgttgggcaggatcttgtgcagagtgtagctgtcattccttagagccacccggcaattgggtgtcacctgggtgaagggggcgagtttcagaagtggtacagtaagagctgaccccaccaccaccaccacctcacctgctacactcacatcattgatgtcaatgtttttgtccacgtctacaacaaatttaccttcaggatgtacctaaagaaacaagggctcatgaccttccttgacagccaccaaatcactaatcctacccaggaagacctatgagaatcccacaataccttgacagaacacagaaccctgtctcccgaggctacacacaaaggggtgggaatgcagtggagaccgagctggtccctggggtcatgctgcttttaccttgaccaacactttcttcttatccatggcccggactacttcccccacataggagccctgctcctgcagcagctgtagctcctcccgcaataggcgaactagatggcaaacagacacagtggtcacctagctactcctttggagtctccaggacccaattctacgtgcatgagctaagcatcactcttattaaaggaaggccaaaggtcaaaattcatgtatttaaggaggctacaatagggctcaggaaaaagagatgcatgtgaaactactagatgatgacagggagaaaacagtaagcactgctgtgaagacacagtgcagggagataaggacagacctcagacaaactgcccacatgcggcttcccatctttctccactcacctttagcatttagttcgttcctctgtgcctgcagcctccggaggttttggctcttatcattcacaatcagctgtggcagacaagagacaaattccattattcaagggcaggagacaggaggaggtaggatcttggccaagacctcacaggtctgaatgagctgagggaagggcacagggcacctgcatgttgtttcagattctccagtatgatcctaatgaccctgccctgtccttcaagagtccctctggaccttacagcagccatcaaagaaggctgcttgtccaatactggtccaggagtaacagaatctaatggagaaaagttacagctggctcatgtaacaccaaatttcttgcaggaaggcaacaacacctggtggaaagattgttaggtgagaaacctgagttctagcccagccgctgtcaatcaaaagcaaagtaaaggtaagacaatctatttttaaaaatctagatctgttaccaaacggcacatgggtatagcatcagctaccctgcttcaagactactaaggtgaacgaataaaaacacatgaaaaagcattcaaaaatggtaaactaaacataatacctgcaaatgcacttggaattcagaattgtcttttgtggctttcccccatccaatttatattacagttgacacttgaacaacgcagggggttagggtgaaattgaaaatccatggacctgtccaaagttaaactactaacagcctaccgtaacagtataacgtaacactaacagactactgtttatgttgtctgtaaggcttactactggaagccataccttactgctggaagccttactggtaacacaaacatttgattaacaacataaacggtcctttttctatggtttagcgctttaggctagggctctgggttgcccaatttctttcattcagtctctatggaattagcattgtccagatccctcaatgatgcccttcctcacattctcacttcaccctcacccaacctcttggtgataaatttcaactcctgagcttatgtttcccttttataagaatccttttcattcgggcttcttccaaaagggttgacctttggctagaggtacctttactattaagatttgactcgaagatgtgtaacaaactgtgaacactaagaccctcaaagagatgggactggaggagaacaagagattgcttacttctgatacatacaccctactagctaagaaacaaacaagaaaggagaagcagcagcttcttccactgcactcccaaaggaattagatggatttgtggaagtccgtttccatcccccatcatcacccttcctagctccctctggagtccgtcctcacctggagttcttcaatcttggacagataatattggcggagtccgctgcctgccttcccctcctccagctccatctgaagacacagagtgagtcttaaacgacaggttaaacatccgagggggtaaagccacttgcagggcactttgaataaggcttgacaccaggtagctttgcgtagtagaaaaagtttggacttcggaggctcaggatctgggttctaatccctccctcccttggaaccctccattttcccaggactaaaataaaagaatgggaacgccgcctacctcatacgacttttaggaggaccgagaggcgatatgatatagacggggggcgctttgcactgcgtgaagtgctctacaagcccgaggtgtcagtactgacgaaggagccagcggaacggagccaaaggactggcgtcccgtctcctgcgacccgtgggccggccattcccgcgcccatcgcttccctcactcactccgcttctaccgcgtcttcctctcccagccttgccctgactcaccgagggcggcgctgacacagcagatccggtcgcaggcagcgtccagcatggactggtccaggcacctccgacccacccgacgctcctgccccggcccgctctccactcagatcacgctcgctccgcacccagccccgtaacctgccgggccgccactgcacccgccatacctgctctggtccgtcaagcgccatcttctctcttcagcagagaccgccggcatccgagccgtcttggcgcgcaagcgc

SEQ ID NO: 904 - DNA, 1121 bp, Homo sapiens
tttttttgtatttttagtagagacagggtttttctgtgttagccaggatggtctcgatctcctgaccttgtgatccacccacctcagcctcccaaagtgctgggattacaggcctgagccaccacgcccagcctattttgtgtttttttaaagctaactaccattaagatcattatagaagtttggtataatgaagatttgggtttttcagtccaatgagtttccatattcttgaatgaaaaagatccacatttcatcatttgcctgtttcattttcttttagtacttttgaacttagtttggtcagaaaatactagaattttagtttgatctaaagaaccagcttatataacttgctgttgccatgtacatttgtatgtctttgctgtgtcaaataactggatctgattttagctctttttaagtggtgaaagcaatgcatttttattcttcaaattcagacattgaatgtgtatcacaatgtgtgtgcttacctttaatcctctctcccacgacaattaggaacacgtttctccaattactgttggcagactaccaagaaaaatgttgaattagaatcccagcaccgggcacggtggctcacgcctgtgatcctagcactttgggaggccaaagcaggcggatcacctgaggtcaggagttcgagaccagcagggccaacatggcgaaaccccgactctactaaaaatacaaaaattagccaggcatggtggtgggcgcctgtaatcccaactactcaggaggctgaggcaggagaattgcttgaacctgggagttggaggtcacggtgagctgatatcacgccattgcactccagcctgggcaacagagcaagactctgtctcaatcaatctatccatcaatcgataagaaccccagattgtatagctacatgttttagcccccttttcaaagtatatgttctccttggtacttattttgacattctgacttttctacatatgctttatcaacctcttaattaaaccatcattgtctattttgagagataactgcgctgcttcccgttgtgtgttttaaatgttattgttcagtttgagtcaaataaaaggatatttaatctgtggtgccttgacatt

SEQ ID NO: 905 - DNA, 192 bp, Homo sapiens
aagaaatggcatcttagtgtaattataatttgcatttctcttatgaattaagttgaatttgcaaaaatatgcttaaggcacatttttacacccattttcggtgaattgcttgttcgtgtatcttactcatttttctagaatgtctagtcccctttttcttcactcgatataaaaagtattttttaaatatta

SEQ ID NO: 906 - DNA, 2981 bp, Homo sapiens
gaaatgttttacttgagttttctgtgtgttgagatgaaagtctcccaggctaaagatttctgaactgcacgcaatgtctgaagaagcgcttgaaaggcactttatttctcccaggtccccaaccatgggtttaggtttttatgccagaaaggggaccttcatgaacaaagacccccaagacctagagagaagaggaagtctgaaagagggaggtttgaattcagccttcaggaatgaagagggcagacagagcaggaggctcaggcaggggagtcaggaaccacagaccagaaacatggacttggaaaggttttcatgtaattgaaatgaagctattgatccatccattttaaaagaatttgaaaaattcattaaaatacttaattagtggcatccactaattaataaaagcatagggagtggcatctttaaccaaaaatgaaaatgaagaaacagactccagcccagggaccaggggcgattatgagggacatggtgcctcatacagccaagatgatccaagaggcatcatctttaatgaagctttaacacctggcagcctgctcattgtgttgtttaagaggtaagtatgaactggttttgtttgtagcttttgtgtggaatcaggtagtgctgtctgcagagtgtaaacctttatttctttaagtaggaataacagataaagtaattctatattaaatcccaagagttttattctaaattggtaatgtgactttcatctctcgagttttttcaaatcgtttttaatttgtggttgagtcttcacgaacttcttgtcatcaggcaatagttgattccccttttttgaaagctttcaatttcatttatccttagtgttgaaaagtgtcagaaaattgaaatggacacagatgattgtatctgccctccctttcaggaaagccatgttgactttaaaatatcaaaaaagaaagttcagttatgattgcagggggtaatgatagtttgatccacaaactatttgcagtgtaaaagtgaaataccttagctgacttagttcatttttgaaagttttgaatagctaaaacaaagttggcaaataggctcatagagtagttacagagtaagactaaattcatatttgatgcagattcctctctacctcccattctgggaggatttagttttactgtttggtgtttaggataatgattgttctgtttttctcaccctactatgtgaatatatattctgttagagatgggctgttatctgcaatgtggactcaataccatgggcttgagtttggttagttcatcattagagattttttttcagcagttggtttactttatgagaaaggatcatgagtttaattttcccactgatatatttgtgttctcattgctgagatataagtttcttaatgatttgttacctttttctattttcctagactagtattaaaattttgatggcatatgggtttggttccacttgtagagaataaatgttcacaacttactggtattagcacacacacatcacatgcagaaatggtgttttcttgccacttactctttctcataagatgcttatattcctgtgggcatttgtcttccacactacagcacataatttgatgaaactgattttctgtgcaagagcttgtgtttctccaactctggttttatggaccacttttcattggtatataggaggcggttaaaacgtggtggtagaatgcaggttttaggttagctgggtgtgaagaatcccaggtctttgggatagtcttggcaagttactcaactcctctaagttagtttcttgatctgtcagatgacagtaaacctcagagttgtgaaaattaaatggatataatgtgtgtaaagcacttagcataatgctttatacatcgtaaaactttcaaaaataggagtagtaattattacaaagaaatgtgaagaagagtcctagtgggctgcatgttaaaaatagtttttagttaatgaaaattaaatcacatcttagatgtttatcatctgcatggtacttttctggttgctgctttaacctttgtatagttgaaagtctgtaaactttctagtattctttgatttctggcccatttccctcctaccattcacgcttatattttttggttcaagtcaccattccttgcaaaactaattaaatacattcctaaatacataatattgccaatattcattcacatccaccacgtctagatccaagtcttcatcttctttatgctggtctaatttttgctgagccttagaagcaaagacagactccgggggttgatatgggacctccagaatggggattgcacagaataatcttatttttcctctattcttctagtctgttatgttctgaacccacacatgttttcggaaggaccagatggctgacactggctaatgggaaccaaaagacgagtgaaagtaacctggttgtcacatacccccagcttagaggtgcttcaccctgccccaaggtcaatttcttttttctctagagactttaccccattatatcaaaaacctttactacagcctgactttatctgatgttagagtatcattaagtcaagcagcagcatttattgagtgaaaaaagattgtacacaggactggaagagaagcatctgcctttaaaatacagtagaaggccgggcatggtggctcatgcctgtaattctagcactttgggaggccaaggcaggtggattgcctgagctcaggagttcgagaccaccctgggcaacatggtgaaaccctgtctctcctaaaaaaaaaaaaaaaaattacaaaaaatttgccgggcatggtggtgcacacctgtagtcccagccactctaaaggctgaggtacaagaattgcttgagcccagggtcagaggttgcagtgagtggagatcgcgccgctgcgctgcagcctgcgcgacagagcgagactatgtttttttttaaaaaa

SEQ ID NO: 907 - DNA, 2981 bp, Homo sapiens; identical to SEQ ID NO: 906

SEQ ID NO: 908 - DNA, 2981 bp, Homo sapiens; identical to SEQ ID NO: 906

SEQ ID NO: 909 - DNA, 537 bp, Homo sapiens
aaaatgtggtttgggtttctagtatttttttatgcttccaggtacccagaaccgcaaattttactttgagctcctcagaagaaaggtgctccaggcatctgagagaataccgttggggtgatacttacaaatttgtaagctaacactgaaatcttaaaacttccgaaaatattaatgcatttgtatgacttatttttcaactgagtatgtcaaagtactttatgaacaagtgttgtccctagtttgtactgatggggaaactgaggcatggggtgataaggtgactggcccaaggttacaaaatgagttattgacaactccggaaatagaagattttttaaattcccatactagatacatgtgggcattgacattcaaagcttccctcatgctatttcctttagtcctgtcctttggggattgcctctgagggtgagagggtagttcaggtttccaggcttgttcagcctttagtctctgtagaggcttccagcaagctgacaagttactgccaaaagtgagacagatggtattttt

SEQ ID NO: 910 - DNA, 334 bp, Homo sapiens
aattgaatagaagtgctaaagctaaagaaagtcctaaaataattggaataggcaagtttctgaggcttcatgaaagaggtaattctcaagcatatggaagaagattgatataattcaacttgtgtagtcaaggtgttccaggtttagagagtgacataaagatacttaggagtcgttatagacttctaaacaaaaaaatgatttagtagctgacttttcctgacacaatgcaaaagacaagttgactaagtaaaaatagctctagcctagaattacataaattaatccaaatggtagagacagccctgaaggcccagcaaatgagaaaactgca

SEQ ID NO: 911 - DNA, 334 bp, Homo sapiens; identical to SEQ ID NO: 910

SEQ ID NO: 912 - DNA, 537 bp, Homo sapiens; identical to SEQ ID NO: 909

SEQ ID NO: 913 - DNA, 537 bp, Homo sapiens; identical to SEQ ID NO: 909

SEQ ID NO: 914 - DNA, 328 bp, Homo sapiens
  misc_feature (278)..(278): n equals a,t,g, or c
aattgaatagaagtgctaaagctaaagaaagtcctaaaataattggaataggcaagtttctgaggcttcatgaaagaggtaattctcaagcatatggaagaagattgatataattcaacttgtgtagtcaaggtgttccaggtttagagagtgacataaagatacttaggagtcgttatagacttctaaacaaaaaaatgatttagtagctgacttttcctgacacaatgcaaaagacagttgactaagtaaaaatagctctagcctagaatacatanattatccaaatggtagagacagccctgaaggccagcaatgagaaactgca

SEQ ID NO: 915 - DNA, 10598 bp, Homo sapiens
cttggagagagcagacgccttctggattcaagaagacgaggtgagctgaggtacctggctttagtgaagaccctgtgggggcttcctggctgcggcttcgacgtgcctgactccacacgcccctaaggtttgaagaaaacctgctggaggtttgggacctaaccgcatcaaagtcgcctttagcggtgcctggacccagttcgcacgggaggaagtaggaggcagaatcccctttgggccacagaaagtaacgatctggactcggttcgggccgtgaaagggagggatgcagacctagttgggaccgcagaaaggaaggatcgagaaatccttcagacggtagcaagaggggaggaggatacacacagttcgggagggagataggagacggcaggactccgtttaggctggagaaagggggcagtaccccgtttgggccacagaatggagggatcgggacccagagataagagtgggcagcatcccttttgagcaacggaaaggaccagactcagacaggagaaaggaggggatatgacccggttggttccggtttgaaagggaagagacaggacctggtagggtttgagaacaggaatacacagaaggttcatacagttggatttgggggtgaggtattcatgttgcagaaagggcggagctgcacacttgcagacgtggaaagaggggggagtggtgttggttggggaaggggtggtgcagagacgtaccgcagagcggagggagggggcttattaaaggaagggaagatgaagagaaatgctgcagagcggagggaggggggtgtattgggaaggggcggtgcgtggcagtaccgcagaggagagatgggcggtgttggggtaggggcggtgcggagtggtactgcagagcggagggagggggctagtgttgggggaagggttggatcgagatgtgatgcagttagaaagagtgggtcggggtggcgccaagatgttctgttgctctgagagcagggggcagatgtgggattgagctggttagaaactgtccggtttaccaaggcgcatgcgcgcggagggcattgaagaatggttcttttgggatagaggtgggcctaagatggggggtgggggcgcctctagtcggtgcgcatgcgcactatcgagttgcggagggggcgtgtaaaggggtggggtcgtagaactgactctctcggaggcaaaaggagctgggccttggaaaccagatggcctgggttttttaggtatgaaaacccaggagttgaagggattagggcccaaggttacatgagactcccctaagtcaggataggtgagatgtctgatgaatctccccctccctctcattctctaactcaggcccattcccctcaggctcacctgttactcggcctcccagaaagatggataggagaaatgactacggatatagggtgcctctatttcaggtgaggcctctctgcattctctctaggccatctgccccatcctgagttcacttactgctcttcagaccccttccaccgtgtagtttcataattccctgcctaactcgtctcagtcctcccttacatggtgaaggagaggagaggaaaacctgcctgactctattccttccttgctccctaccccattttaattaaccactgctcagaggaagggaaggcctttgtggaaagggatgggctttagcgaggccaaatggcccagaggatggtaatcctaagtgtgtagggccctctgcctcccccggggagcctggggcttcccttccctccagatatacagactgagaccacagaagaggacagtgtcctgctgatgcataccctgttggcggcaaccaaggactccctggccatggacccaccagttgtcaaccggcctaagaaaagcaagaccaagaaggcccctataaagactattactaaggctgcacctgctgcccctccagtcccagctgccaatgagattgccaccaacaagcccaaaataacttggcaggctttaaacctgccagtcattacccagatcagccaggctttacctaccactgaggtaaccaatactcaggcttcttcagtcactgctcagcctaagaaagccaacaagatgaagagagttactgccaaggcagcccaaggctcccaatccccaactggccatgagggtggcactatacagctgaagtcacccttgcaggtcctaaagctaccagtcatctcacagaatattcacgctccaattgccaatgagtcagccagttcccaagccttgataacctctatcaagcctaagaaagcttccaaggctaagaaggctgcaaataaggccatagctagtgccaccgaggtctcgctggctgcaactgccacccatacagctaccacccaaggccaaattaccaatgagacagccagtatccacaccacagcagcctccatccgaaccaagaaagcctccaaagccaggaagacaattgctaaggtcataaatactgacactgagcatatagaggctctaaatgtcactgacgcagctaccaggcagattgaggcctcagtagtggctatcaggcccaaaaaatccaagggcaagaaggctgccagcaggggcccaaattctgtctctgagatctctgaggccccacttgccactcagatagtcacaaaccaagccctggcagccaccctgcgggtcaagagagggtctagggctcggaaggctgccactaaggctcgggcaactgaaagccagactccaaatgctgaccaaggggcccaggccaagatagcctctgctcagaccaacgtaagtgcccttgagactcaggttgctgctgctgtccaggccctggcagatgactatctggctcagttgagcctggagcccacaaccaggacccggggcaaaagaaaccgaaaggtgagatctctgacattgccatccttaactttgtgcttcttttccatttctacccttctagtttgttcatttcttctataaaagttttactttgagctagtccctgtgttcagataggctgtggaagatgctgagaagaaggtgatatagtttctgctccctagcagttcacagattggtgaggaaataagacatccatacactcagctacaacctgtatgtaatactacttgtatttaaatagtagttaccacgtgccaggctttgtgttgggtacagttacacagggtatgtctgaatgtcttgaaagtaactcttaccaacaagggatcataggtcccagttttacacttaagaaaactgagtctcagagaaatgaagtgacttgtccaagaggtaccagccagcataattggtggtagccagaggaagagaaagacccttaggctcttatcttgagttgttcctggcctggcagaggaacgaaactccttcctggaagacagtgaaagataagctcaggactcagggtggccaatggcaaggtcaggatcaggctccactacagcaaggctgagggagggggttagagggactttctgtctggagcaggcaaggtgaggagacagagccatctctttcacctggtgactctggaccttccttctttctgatgatgaagtccaagcatctgaatggggatgagagaagtggcagtaattacaggcggatcccatggggccggaggcctgcaccaccgcgagatgtggccattttacaagaaagggtaagaatccaatgctgtccagtctcttctcttcttcacttgccctcttctctgcctccttccaagttttctgcaagcatgttaagatctctccatctattcctctcctcccaggctaataagttggtgaaatacctgttggttaaggaccagacaaagatccccatcaaacgctcaggtagtgtcctaccaaccctcctccttgagctctcctctccactcccctctcctcccatagtctgggagtaacactttatggcctctttgttctgtcatatctccacacctgccctccttgcactctgccatggctggcatctcccattaactcacttcaggtctctgattgcactgacccaacaggactggcaaaagggctgcagctctgtggcccctgctaagctcagctactctcacctctccttttctacagacatgctgagggatgtcatccaagaatatgatgaatatttcccagaaatcattgaacgagcaagctacactctggagaaggtgaaggggcagtgctggcggatgggcgcaatggggaagctttgaatcgagcaaagacatacatgtcccttttggagagaatcacagaaacatgctaatccagccccattactgtgtgaatgggcagacagtggcctagggagaggtgtagatttgccatgggtcacacagcatgtcagtgatgaaaacatggctaggacagaagccactcaaattagtctcagcttctattcatagttggacatattctgcatgtatttcagatctcacctctcccttgtatccccattttctgtctccctagattcctgctcatcacaaagatgatgttgatgacaatagtacatttgctgtgtgtttactgggtgccaggcacttggctatgtgctttatgtgcattatctcactgacttcttacacatgcagaccccctaagtacactgggagttttaggatgcccggaaagttcactgatacctaagctgaattttgtgatctcacaggctattcttttacttggcagatgtttcgagtcaatctgaaagaaattgataagcaaagtagcttgtatattctcatcagcactcaggaatcctctgcaggcatactgggaacgtaagctgggaaagggctggagtgggaaggaagcttctgcttttatctgtgctgctaccccttctttgtcctacttcccccatcctcttagagagtcaggaaaaacagggtctcaaaagccctgtctcagcacctgcacatagttggagccctgctcacagtagtggcacctgattatgattgactgaagggtataggagcctagggtgggacattcctgctgtcaggtttgctgtctctgtagaagcttcccaggaaagcaggcctgtcattgcttgcctcttccgatggagtgcctggcctggctttgacagagtggttctcaaggagggcttcctggtgtggctggatcagtatgcatgaagcgcaagagtgtcagtggggctgaaggttctgggagagaaagaagggactcacattgactgagtgcttgtgttgtaccaggttgacagccattcttccatcttcttggcaacctgaggaagggagaatatgattttcccattttactgaataatagaccaaggcttgcaaggtctaagtgccttgcccagggtggcatagagctggaagcagagactgggcagaattctgtatctgaggaatctgggagaggttagcctggtgagctggctggtgtatcttttgcggatggctgctgaaacataaaccttctttctgtcctgttgaaacataaaccttctttctgtcctgttattcccttaggaccaaggacacacccaagctgggtctcctcatggtgattctgagtgtcatttttatgaatggcaacaaggccagtgagggtgagtggctgggcatgcagctgaatgggcggccatggtctggattccatgtgttcaatttctgtccctgtctcctcttgcctcccctcacagctgtcatctgggaggtgctgcgcaagttggggctgcgccctgggtatgactgggctctctcagcgcttgctgtccgtgttgtcctttggcaagagaggatggtcctaggattgcatcagtctggtggtctggtggagcgggtggggtgctggactgggtagagggcccagggttctgacctgggtggatgacgggcaaatggtcctgaactctctgctgtctctctccttaatgtcctctgtctgttctaagctgagatgttagatagaccttcagggatccctgacaaagaggcatctggtcttaactgcttgcttctagtggccatgtgctcattactttcttcacttcattgagactgccccatgtgctagagaggtctcttccatgttgggaaatgcctctgccctcatctgggcagttctgatctgtgttcatgggttatttttcccattgtcagggtgaggcattcactctttggggaagtgaggaagctcatcacagacgagtttgtgaagcagaagtaagtggtgtttggggctttgtctggccctgaagtgttctgggtatactgatctggttcagaaagtgcttagtcagtgcctttcttatactagctttagagggatgggcatcctgtgtcctagaactgatactgtctaaaattcccatgggcagacctttccaggactgggccagactcaacacaaggcccttgcagtggggtgcgctcagagcagagggccttaagaatggctcctctgtttacaacacacccaacaggaatctgggcttactcctcacaggtggcatgatactttggccttcctgtgacatcatgccctatacatgtctcccctggagaagcccaagggactgctttgcacagggccagtgggaaatggctcagtattggaggccaagaccataaactgtgtttggtagtgagtctggggctggagggtcttagaaatccctctccaggggctgtttgtatttgtttggaggaggttgccacctggtgtctagtgcttagacagcagggttgcttggttagaaacaagtttcatttcctttttccaaggtacctggagtacaagagggtccctaacagcagaccacctgaatatgagttcttctggggcttgcgctcctaccacgagactagcaagatgaaagtcctcaagtttgcatgcagggtaagaggagagctgcccgagcttggcatattaaggcaatgggatacccttggctggggcaggcaatgcacagggatgggcaggtacagagcagcctgcagctcatatataaacatgtggagcctcctttatgtcccagggtgctgctagatatatagtttacatcatctcattcattcttcatactttgtattaatcagcatgggctgccataacaaaataccatagactgggtggattaaaaaacaaatttattttctcatagttcttgagggcgagaatcctaggtcagggtccacgagggtcagttcctgttgaaggctctcttcctggcttgcagatggctgccttcttgctgtgtcctcacatggctttgtgtgtgagagagaagagagcaagctttctggtgtctcttcttataaggacactaatcctgttgatcaggaccccacccttatggcctcatttaaccttaattatctccataaaggccctatctccaagtacaatcacactgggtgttagggattcaacatacgaatttgggggcgggcacaacccttcagttcataacatatttacgctctatcatttcctgtaattataaagacacttaggctaagtgaggttaagtaacttgtccaaggtcatatagcacgtaagtcagcagagctgaaactggagttcagaactgacccatgatagagccccaataactgagaagtttaaaaaagtattgctactagtttaatacaaagcccgtaggttaatacatgattactagggttgttttcttattatgattatcatccccatttcaggtgcagaagaaagaccccaaggactgggctgtgcagtaccgcgaggcagtggagatggaagtccaagctgcagctgtggctgtggctgaggctgaagccagggctgaggcaagagcccaaatggggattggagaggaagctgtggctgggccctggaattgggatgacatggatatcgactgcctaacaagggaagagttaggcgatgatgctcaggcctggagcagattttcatttgaaattgaggccagagcccaagaaaatgcagatgccagcaccaacgtcaacttcagcagaggagctagtaccagggctggcttcagcgatggtgctagtattagcttcaatggtgcacccagctccagtggtggcttcagtggtggacctggcattacctttggtgttgcacccagcaccagtgccagcttcagcaatacagccagcattagctttggtggtacactgagcactagctccagcttcagcagcgcagccagcattagctttggttgtgcacacagcaccagcactagtttcagcagtgaagccagcattagctttggtggcatgccttgtaccagtgccagctttagtggtggagtcagctctagttttagtggcccactcagcaccagtgccactttcagtggtggagccagctctggctttggaggcacactcagcaccacggctggctttagtggtgtactcagcactagcaccagctttggcagtgcacccacaacgagcacagtcttcagtagtgcgcttagcaccagcactggctttggaggcatactcagcaccagtgtctgttttggtggctctcccagctccagtggtagctttggtggtacactcagtaccagtatctgcttcggtggctctccctgcaccagcactggctttggaggcacacttagcaccagtgtctcctttggtggctcttccagcaccagtgccaattttggtggtacactaagtaccagcatctgctttgatggctctcccagcactggtgctggctttggtggtgctctcaacaccagtgccagctttggcagtgtgctcaacaccagtactggttttggtggtgctatgagcaccagtgctgactttggcggtacactaagcaccagtgtctgctttggtggctctcctggcaccagtgtcagctttggcagtgcactcaacaccaatgctggttatggtggtgctgtcagcaccaacactgactttggtggtacactaagcaccagcgtctgttttggtggctctcccagcaccagtgctggctttggtggtgcactcaacaccaatgccagctttggctgtgccgtcagcaccagtgccagcttcagtggtgctgtcagcaccagtgcttgcttcagtggtgcaccaatcaccaaccctggctttggcggtgcatttagcaccagtgctggcttcggtggggcacttagtaccgctgctgacttcggtggtactcccagcaacagcattggctttggtgctgctcccagcaccagtgtcagctttggtggtgctcatggcaccagcctctgttttggtggagctcccagcaccagcctctgctttggcagtgcatctaatactaacctatgctttggtggccctcctagcaccagtgcctgctttagtggtgctaccagccctagtttttgtgatggacccagcaccagtaccggtttcagctttggcaatgggttaagcaccaatgctggatttggtggtggactgaacaccagtgctggctttggtggtggcctaggcaccagtgctggcttcagtggtggcctaagcacaagttctggctttgatggtgggctaggtaccagcgctggcttcggtggaggaccaggcaccagcactggttttggtggtggactgggcaccagtgctggcttcagtggcggactgggcaccagtgctggctttggtggtggactggtcactagtgatggctttggtggtggactgggcaccaatgctagtttcggcagcacacttggcaccagtgctggctttagtggtggcctcagcaccagcgatggctttggcagtaggcctaatgccagcttcgacagaggactgagtaccatcattggctttggcagtggttccaacaccagcactggctttactggcgaacccagcaccagcacgggcttcagtagtggacccagttctattgttggcttcagcggtggaccaagcactggtgttggcttctgcagtggaccaagcaccagtggcttcagcggtggaccgagcacaggagctggcttcggcggtggaccaaacactggtgctggctttggtggtggaccgagcaccagtgctggctttggcagtggagccgccagtcttggtgcctgtggcttctcgtatggctagtgaggtttcaggtaactgcaatatttccatagccaggacccacagggatgggtacaagagctgggagatgttgtaagaaacactaaggcaggacagcagggtggaaaggtgagggcaattaaggaattatgagaagacagtgtatttggtgctaaaatgtgttcctatttgttttgttttcagatttattccccatgtttacagataccgctaataaattgcagtagtccttcccatggagccaaagtacatccttggaatctttgtccacacagcagtcaaggcagttatggccaatcagctgagggtgtcatgtgatggaaaaatctgtttgctgttcctgctttattgtttgctttctgtgtgctgtcatattttggtatcagagttacattaaatttgcaaaatgaattgga

SEQ ID NO: 916 - DNA, 14809 bp, Homo sapiens
catgaacagacgcttctcaaaagaagacatttatgcagccaaaaaacacatgaaaaaatgctcaccattactggccgtcagagaattgcaaatcaaaaccacaatgagataccatctcacaccagttagaatggcaatcattaaaaagtcaggaaacaacaggtgctggagaggatgtggagaaataggaacacttttacactgttggtgggactggaaactagttcaaccattgtggaagtcagtgtggcaattcctcagggatctagaactagaaataccatttgacccagccatcccattactgggtatatacccaaaggactataaatcatgctgctataaagacacatgcacacgtatgtttattgtggcactattcacaatagcaaagacttggaaccaacccaaatgtccaacaatgataggctggattaagaaaatgtggcacatatacaccatggaatactatgcagccataaaaaatgatgagttcatgtcctttgtagggacatggatgaaattggaaatcatcattctcagtaaactatctcaagaacaaaaaaccaaacaccacatgttctcactcataggtgggaattgaacaatgagaacacatggacacaggaaggggaacatcacactctggggcctgttgtggggtggggggaggggggagggatggcattaaggatatacctaatgctaaatgacgagttaatgggtgcagcacaccaacatggcacatgtatacatatgcaactaacctgcacattgtgcacatgtaccctaaaacttaaagtagaataataaaaaaaaaaaaaaaactaggagttaggtacaaagtatagttagatagaatgagtaagatcgagtgtttgatagcacaacagggtgactatagtcaacaataatttatagtacattaaaaataactaaaatagtataattggaatatttgtaacacaaagaaatgcttgaggtgatggataccctatttaccctggtgaaattattacacattgtatgcctgaatcaaaatgtctcatggaccgtacaaatatatacacaatctaccaataaaaataaaaaataaaaacatctaaaaataatgaactttttgagtaagtttagatttacagaaaagttgcaaaaatagtacagataattgctgtatacctctcactaagtcgcccctaattttatcatcttatttttaccatgttatattcactaaacctaggaaaccaacactgatatataacagaactctacactttcatgtttgtccatgaatgtcctttttgtattccaggatccaatccaggataccacattccatttagttggcatgtcttgcagtatcctttgatctctgatagtctatttttggttttcatgagcttgacggttttgaggaatactggttagcctttctgtacaatgtccctcaatttgggtttgtcttatttttgtttacttgattaaactgggtttatgggattttacatcataacagggagtacaggatatccacatgacatcattagtgatgttaactttgattacttggttaagatactgtttgctagatttattcacaaccctattcacaatacaattactattttcccctttccatactttgttctttagaattaagtcactaagttcaatctacaatgaaggggtagttaacctccacctcctattagtacagaggggctacatattctacttgaaattcttctttaggaaagacttgtgtcttctcctacattgatttattcattatattatttatcagtatggccacatgtatatgctttaaattttattttattatccatattttttgaaatccaatactacatcatttattttcttgctcaaattgtttcaactttggccactgggagctcttttgagtgggctctagtgaccttttgacatatcccattcctttgttttttgagtatttccttactttctggtactacaagatgtcacaagttcactttgtattttttttaaagcccagtcctagaatcagtcatttctccaaagggctctggttccttttattggaaaacaatatttagaaatcactaagtgatgggtttactaattgttattgggggtgttattatttctaggccttctcaatgagagctagggaatgtatttcttctttatgcttaaaccatacatgcatagatatatttaattgtttctgtattcatccatctgtgtatatattaaactaaacattttttttttgtttctgttgcccaggctggagtgtagtggtgcgatctcggctcattgcaacctccacctcttgggatcaagcgattctcctgcctcagcctcccaagtagctgggattacaggcatgtgccaccatacccagctaatttttgtattttcagtagagacagggttttgccatattggccaggctggtttcaaactcctgacttcaggtgatctgcccaccttgtcccaaagtgctgagattgctggtgtgagccactgtgcctggccaactaaacataatttcatactgcagtttctgacttcaattcaggactgcatgctgagttctagcctacccatcttacttatctgtaacttctctctctgatggtaagaagtctggctcccaccatctaccatccctttacttatttattcaaccccagtatacatgtaaagcagtttctaaattactaacccacactacaatgatgaaaataatttataacctaaactacagcatgtatgtaaagttccttttgtttttagcctttcagtttccagtcaaaacacagttttccaaagttacttgggtaagctcttccttttcttcacatcttcacaaagttacttaggtaagctcttcctttttttgtccttcacttcctttttcaaccttcactatgcaaatatatgtcattgtagcatatatttgtaatatagttagattcatttgtcattgtctatatgtcatccagggatccctgtatatcctggctaattgtttcttttttttttttttttgcatatattgatgtttagtctttgtgatgtatagttctatgggttttgataaatgcatagagttatgtatccatcaccccaatgccatatagaacagttcccagcccaaatgcctatcaatgatagaccggataaagaaaatgtggtatatacacaccatggaatactatgcagccataaaaaggaatgagatcatgtccattgcagggacatggatgaatctggaagccatcatcctcagcaaactaaaacaggaacagaaaaccaaacactgcatgttctcactcataagtgggagctgaataatgagaacacatggacacagggaggggaacaacatacactgcagcctgtccttggggggcgaggggagggagagcatcaggacaagtagctaatgcatgcagggcttaaaaccaaggtgacaagttgatagttgcagcaaaccaccatagcacacgtatacatatgtaacaaacctacatgttctgcacatgtatcccagaacttaaagtaaattttttttagaaaaggaagtatgggtaccaaaacagagatatagatcaatggaacagaacagagccttcagaaataatgacacaactctctgatctttgacaaacctgagaaaaacaagcaatggggaaaggactccctatttaataaatgatgctgggaaaactggctagccatatgtagaaagctgaaactggatccctttcttacaccttatacaaaaatcaattcaagatggattaaagacttaaacgttagacctaaaaccataaaaaccctagaagaaaacctaggcattaccattcaggacataggcatgggcaaggacttcatgtctaaaacaccaaaggaatggcaacaaaagccaaaattgacaaatgggatctaattaaactcaagagcttctgcacagcaaaagaaactaccatcagagtgaacaggcaacctacaaaataggagaaaatttttgcaacctactcatctgacaaagggctaatatccagaatctacaatgaactcaaacaaattgacaagaaaaaaacaaacaaccccatcaaaaagtgggcaaaggacacgaacagacacttctcaaaagaagacatttatgcagccaaaagacacatgaaaaaatgctcaccatcactggccatcagagaaatgcaaatcaaaaccacaatgagataccatctcacaccagttagaatggcaatcattaaaaagtcaggaaacaacaggtgctggagaggatgtggagaaataggaacacttttacactgttggtgggactggaaactagttcaaccattgtggaattcagtgtggcgattcctcagggatctagaactagaaataccatttgacccagccatcccattactgggtatatacccaaaggactataaatcatgctgctataaagacacatgcacacgtatgtttattgtggcattattcacaatagcaaagacttggaaccaacccaaatgtcgaacaatgataggctggattaagaaaatgtggcacatatacaccatggaatactatgcagccataaaaaatgatgagttcatgtcctttgtagggacatggatgaaattggaaatcatcattctcagtaaactatctcaagaacaaaaaaccaaacaccgcatattctcactcataggtgggaattgaacaatgagaacacatggacacaggaaggggaacatcacactctggggcctgttgtggggtagggggaggggggagggatagcattgggagatatacctaatgctagatgacaagttagtgggtgcagtgcaccagcatggcacatgtatacatatgtaactaacctgcacattgtgcacatgtaccctaaaacttaaagtagaataataataaataaataaataaagtaagtaatgggtttttcaacttggctttcatggaatttatattgtcttggggtcactgagattctcatatatgaaaatttatcttttgcctcatttggaaagctttcagtttttacttcttcaaatgtattttctgcccaagtcctgtctctttggaactccaattatacatatgttagttgcattgataatgttcatcaggtctctgagttttgtttattttttccccaacatttttctccatgttactcagatctaataatttttatcattctatctttaaggtaactatttttttccctctgtaactggcattctgttattgagcccatccaatgtattttaattttacttattgcattcctcagttctaaaattttcatttgtgtttttcttacaggttctatttctcttccgaagtttcttttcccttcattcatttcaaatatggttttctgtaccttatggagtatagttacaatagctgctttcaagttatgtctcataattccaacatttaagtctcttttgttttgtcacatattgattttcttcttccttgagaatggggcacattttctggttctttgacatggactaattttctatcatatcctggacattgcagatgttattttgtgtagcctctgggttgttataatcttctgaaaaatgttgatgcttttcttttagcaggcaatcaacccagttagattctggccatcagttctgtcttgccttttctgggttatagttaaaatctcagtatagttcttaaaactggtatatatatatttatatatatatatttatatatataaatatatatatttatatatatatatataaatatatatatttatatatatatatttatatatataaatatatatatatttatatatatatttatatatatatttatatatatatatttatatatatatatatttatatatatatatatttgaggctgagacttttgtaggcgatttaattctctgctcagttccctaagcctttaaatacttgtttggttaattcttgaacatgcattgtttaatggttggggtgagaattgtgtggtttcatacacatatatgggaatattttctctatctcttttccttctgagacttcttgttcatgctgcatcctacccaggttcttttttctgcttcctctggccagaaagatggcagagaatccctcagagttttagtcatgtgctctgctccagtctgtgagtgggacacactcatggcaaggctgagaggagaaaaaaaaccctggacaacttacccttatgcaggtcacttctctatgttttaactctcttccacaatctgcctggttttagttaccttgcagagtgcttaggcaggttttcttttctttaaaaaaatttgaccagaatttttaggtataattaatcagtgtggtggtgcctgtagggggtttatactgccatagctgagtgggaacttctaagagcactgtattttaaatttcattctatttctcacttctttatttaacattatgttgataactatccatgttgttatatacagatttaatcgattatcttttcccactgcatgagatcattgtaagagatcaaacgcaaatgctcatacaacaatttacatatttattctgtgattatacactgctaggttgcccaaactttttgctaccacaaataatgccatgataaacatcctgtacatgtcacttagtaggccagaaagagatcttttctggagtggcatttctcagttatagtgtgaatgattcttaatttcgctaaatactgccagattgctcttcaagatgacttcactggtttgcattctcaattgaagtacctaagggttcttgtttcccctcatcggttgacataatctgatttgcttatttttcctattttatgggtgctgaatgaggtctcaggcatcacattgcctgacttcaaactgtgctataaggccatagtcaccaaaacagcatggtactggtataaaaataagcatacaaactgatggaactgaacagagaacccagaaataaagccaaatacttaaaagccaactgatcttcaacaaagcaaacaaaaacataaagtggggaaaggacactctattcaacaaatggtgctggcataattgggaagccacaagtagaaaaataaaaccggatcctcatctctcatcttatacaaaaatcaactcaaatggaacaaagacttaaatctcaggcctgaaaccacaaaagttttaaaagataacattgggaaaacattctagacatggggaaatgcaacaaaaacaaagataaatacatgcaacttaattaaactaaaaagcttctgcacagcaaaagaattaatcagtagggtaaacagacaacccacagagtgggagaaaatcttctcaatctatatatccagcaaataactaatatccagaatctacaaggaactgaaaccaatcagcaagaaaaaacaaacaatcccatcaaaaagtggacatgaatagacaattctcaaaagaagatatacagatggccaacaaacatatgaagaaatgctcaacatcactgattactagggaaatccaaatcaaaaccacaatgcaataaccaacttactcctgctagaatggccataatcaaaacaataaaaaaatagtagatgttagcatggatgtggtgaaaagggaacacttttacactactagtgggaatgtaaaatagtacaaccactatggaaaacagtgtggagattccttaaagaactaaaggtagatctaccatttgatccagcaatcccactactgggtatctacccagaggaaaagaagtcattatatgaaaaagacacgtgtgcacgcatgtttataggagtaaaattcacagttgcaaaaatatggaaccagcccaaatgcccatcaatcaagtagataaagaaattgtgattttatatatatatatatataataccataaaaggaggtcttaaagatcattatatatacatttatatatgaatatataattatataattatatataaaataataatataatatctataataatataagaatatattataaatttatatataataatgtaatatatattataaatttatatataaatatttatatataatataatatatactatatataaattatatatagtatatataatatataatacaatataatataatatataatatgtattatatttattatactatataatatactatatattatatagtatactatataatataatgtaatatataaattatatatatttatatattagtatataataataattatatatttatacacaaatatatataattattataatatataatgacctttaagatcttcttttatggttattgtatatatataatcacagtttctttatctacttgttgatcgattgatgagcatttgggctggttccatatttttgcaactgtgaattgtactgctataaaaatgcgtgcacaagtgtctttttcatataatgacttcttttcctctgggtagatacccagtagtgggattgctggatcaaatggtagatctacctttagttctttaaggaatctccacactgttttccacagtggttgtactagtttacattcccaccagtagtgtaaaagtgttcccttttcaccacatccgtgccaacatctattattttttattttttttgattatggccattctagcaggagtaagttggtattgcatgtgattttgatttggatttccctggtaattagtgatgttgagcatttcttcatatgtttgttggccatctgtatatcttcttttaagaattgtctattcatgtccgctttttgatgggattgttttttcttgctgattggtttcagttccttgtagattctggatattagttatttgttagatatatactaatacgtatatcagtatatatatacgatatactaatacgtatatcgtatatatatactatatactaatacgtatgtcagtatatatatactatatactaatacgtatgtcagtatatatatactatatactaatacgtatgtcagtatatatatactatatactaatacgtatgtcagtatatatatactatatactaatacgtatgtcagtatatatatactatatactaatacgtatgtcagtatatatatactatatactaatacgtatgtcagtatatatatactatatactaatacgtatgtcagtatatatatactatatactaatactatgtcagtatatatatactatatactaatacgtatgtcagtatatatatactatatactaatacgtatgtcagtatatatatactatatactaatacgtatgtcagtatatatatactatatactaatacgtatgtcagtatatatatactatatactaatacgtatgtcagtatatatatactatatactaatacgtatgtcagtatatatatactatatactaatacgtatgtcagtatatatatactatatactaatacgtatgtcagtatatatatactatatactaatacgtatgtcagtatatatatactatatactaatacgtatgtcagtatatatatactatatactaatacgtatgtcagtatatatatactatatactaatacgtatgtcagtatatatatactatatactaatacgtatgtcagtatatatatactatatactaatacgtatgtcagtatatatatactatatactaatacgtatgtcagtatatatatactatatactaatacgtatgtcagtatatatatactatatactaatacgtatgtcagtatatatatactatatactatacgtatgtagtatatatatactatatactataagtatgtcagtatatatatactatatactaatacgtatgtcagtatatatatacatatactaatacgtatgtcagtatatatatacatacactaatacgtatattagtatatatatacatatactaatatgtatgtgagtatatatactaatatacatatgtatactatatgtatactaatatgtatactaatatacatattagcatatatactaatatacatattagcatatatactaatatacatattagcatatatactaatatacatattagtatatatactaatatacttatacatattagtatatatactaatacacttatacatattagtatatatactaatatacttatacatattagtatatatactaatacacttatacatattagtatatatactaatacacttatatatattagtatacacactagtatatatatctatatatctggatataagttatttgtcagatatataggtatatattatatgttatattatatattatatatatagtcaataataatttaattgtacatttaaaaataagtaaaagagtatatatatcatgatatattatataatatataatattaagtaatatatactttatattatatataatcacagtttatctacttgttgattgatgggcatttatatatacacacacactcacacacacacacacacacacacacacatatatatatatatatatatatatatatatacacaccatagaatgctacccagctgtaaaaaggtatgaaataatcacattctcagcaacctggatggaattggagaccattattctaagtgaagttaactcaggaatggaaagccaaacatcatcgtatgttctcacttaagtggatgttaagctgtgaggacgcaaaggcctaagaataatacaatggactttggggacttgggggaaaggttgggaggagttgagggataaaagactacacattggatacagtgtacactgctcggtgatgcatgcaccataatctcagaaatcaccactacggaacttattcatgtaaccaaacaccacttcttcccttaaaacctattgaatttaaaattaaaaaaagaaatacaactgatttttgtatgttgaatttgtttcttagttattttttgtggattctttatctacatataaagttatgtggtctgctaacagggacaattaaacttcttttttttccaaattggattacatttctttctcttgctgaggatgtcagtactatgttgaatataagtggtgagagcaggcatacttgctttattcctgaccttagagaaaaggctttccacttttcaccattgagtaggatgttagctataggtttgttgtatatgagctttattgtattgaggtacgtttccttttatacctaatttgctgagcgctttttcttaaaatcaagaattattgttgaattttatcaacgccttttctgcatctactgagatgatcatgtggtttctgtcctttattctgttaaggtattctatcacatttagtgatttgcatgtgttgaaccatccttgcatccttgggataaatcacacttgatcatgatgaacgatctttttaatatggtgttgaatttggtttgctagtattttgctgaggagtttgcatctatgttcctcagggatactggtctgtaattttcttttcttctagtgtctttgtctggttttggtgtcagggtaattctggttctgtaaaatgactttggaagtgtttctttctcttcaatgtattggtagaatttgaaaaggattgatattcattcctctttaaatgtttggtaaaattcagcagtggatccaccaggtctggagattttctttgatgagagacttttatcactgatttagtctcctttcccattacatatctgtttagattttctatttcttcaagcttaagtcttggtaggttttatgtgtctaggaatgtatccatttcttctaggttatccaatttcctggcatataattgttcttagtattctcttaaaatcttttgcttttctgtggtattaattgtaatgtctcctctttcatttctgattttgagtcttctcttgttttttcttagttgatctagctaagggcttgtcaatcttatttatcttttcataaaaccaactcttggtttcactgatttttttcctattgtttctctaatctctacttcatttacttctgctctgatctttattatttccttttttctactaattttgagcttatttgttcttttttttccagttccttgaagtgtgatgttagattgtttgggatcttttttctttttgatgtatgtatttattgctataaacttcgttcttagaagtgcttttgctgcattctataagttttagtatgttgtatatacattttcgcttgtctcaagatattttaaattttccctttaatttcttccttgacgtattggttattctggaatatgttttttgatttccatatatttatgaatgttccacaattcttatcattaatgatttctagttccataccactgtgcatatattacttgatgtgatttcaatattcttaaatttgttaagacttgtttttgtctgtcactttgaaaaaattcaacaaccttcatgctaaaaactctcaataaattaggtattgatgggatgtatcaaaataataagagctatctatgacaaacccacagccaatatcatactgaatgggcaaaaactggaagcattccctttgaaaactggcacaagacagggatgccctctctcaccactcctattcaacatagtgttggaagttctggccagggcaattaggcaggagaaggaaataaagggtattcaattaggaaaagaggaagtcaaattgtccctgtttgcagatgacatgactgtatatctagaaaaccccattgtctcagctcaaaatctccttaagctgataagcaacttcagcaaagtctcaggatacaaaatcaatgtacaaaaatcacaagcattcttatacaccaataacagacaaacagagagccaaatcatgagtgaactcctattcacaattgcttcaaagagaataaaatacctaggaatccaacttacaagggatgtgaaggacctcttcaaggagaactacaaaccactgctcaatgaaataaaagaggatacaaagaaatggaagaacattccatgctcatggctaggaagaatcaatatcgtgaaaatggccatactgcccaaggtaatttatagattcaatgtcatccccatcaagctaccaatgactttcttcacagaattggaaaaactactttaaagttcatatggaaccaaaaaagagcccgcatcaccaagtcaatcctaagccaaaagaacaaagctgggggcatctcgctacctgacttcaaactatactacaaggctagagtaaccaaaacagcatggtactagtaccaaaacagagatacagatcaatggaacagaacagagccctcagaaataatgccgcatatctacaactatctgatctttgacaaacctgagaaaaacaagcaatggggaaaggattccctatttaataaacggtgctgggaaaactggctagccatatgtagaaagctgaaactggatcccttccttacaccttatacaaaaattaattcaagatggatgaaagacttaaacgttagacctaaaaccataaaaaccctagaagaaaacctaggcattaccattcaggacataggcatgggcaaggacttcatgtctaaaacaccaaaagcaatggcaacaaaagccaaaattgacaagtgggatctaatttaactcaagagcttctgcacagcaaaagaaactaccatcagagtgaacaggcaacttacagactgggagaaaatttttgcaacctactcatcagacaaagggctaacatccagaatctacaatgaactcaaacaaattgacaagaaaaaaacaaacaaccccatcaaaaagtaggtgaaggacatgaatagacacttctcaaaagaagacatttatgcagccaaaaaacacatgaaaaaatgctcaccatcactggccgtcagagaaaggcaaatcaaaaccacaatgagataccatctcacaccagttagagtggcaatcattaaaaagtcaggaaacaacaggtgctggagaggatgtggagaaataggaacacttttacactgttggtgggactggaaactagttcaaccattgtggaagtcagtgtggtgattcctcagggatctagaactagaaataccatttgacccaggcatcctattactgggtatacacccaaaggactataaatcatgctgctataaagacacacgcacacatatgtttattgcggcattattcacaatagcagagacttggaaccaacccgaatgtccaacaacgatagactggattaagaaaatgtggcacatatacaccatggaatactatgcagccataaaaatgatgagttcatgtcctttgtagggtcatggatgaaattggaaatcatcattctcagtaaactactgcaaggacaaaaaaccaaacaccgcatattctcactcataggtgggaattgaacaatgagaacacatggacacaggaaggggaacatcacactctggggactgttgtggggtggggggaggggggagggatagcattaggagatatacctaatgctaaatgacgagttaatgggtgcagcaccccagcatggcacatgtatacatatgtaactaacctgcacattgtgcacatgtaccctaaaacttaaagtagaataataataaaataaaataaaaaa

SEQ ID NO: 917 - DNA, 3544 bp, Homo sapiens
tcatccctagccctcagtgtactcatggtggccaggtgaggagggcagatatagagtccctttgaggagaagagggcctgccagcccaggtacagatgcttccctcagggtccaatctccctgatgtcccctgccatggccacacactgagccttgcttctgatccttggaggctagatagttccagaatggccacacgttggcgagggcttagtcaaccagctctgactgcatctgcaaggatgcagtggggaattcctgactgacgggtctaccactggacattctgaggtttcttcctccgtgccacatcctgggtcaaccctggattgtctgatgatatagttcttgatgctgataactggggtgctagggtatctcctctgcacaccttagtcatgactcaggtggggcttgagcactttctctacgcaccttctctacaaccctggtgggctgggacactccctcttaatgccttagtcagtgcctggtgggaccatagatgttgcagggtgtttggaatttggacagagatcctggtggaaaagggacaagatgaaccataaagaggagccagtgcttgctggggacagaagatggagggttagaaattcagtctgtggagcagtcttggagagaaattggcaggcacccagtacctcccttggtcgaaggctgctccagggtagtacagttctctggccagccggtcttgccaggcaagtgcctgagccctgaggaagcaagaaggctctctacctgcagtcagagtctgctctgggagaaagtacacagtgcgttgtgatcccctttaatctctctattttctgtttgtagaaagtccatgagatgctgaagaaggggtgggatgctgaaggttctcccttccgaggccagcgattcgaccctgccatgttcaacatctccccgggggctgtgcagttttaatgaccagaaggaaaggaaaccctcgccggtggggaggcagagccttatcctcggctgcccttcttggctccctgcattccagggacttgctcgtcttgtttacccctagccatcctttctttcaagggtgaaccaggccttccaccctgaccttgcatctccagactgttccagagaaggtgcggggccagctgctatgtggtggccgctgtggctgacactgagtgaaggtgtttgaaatgcaggagaggatatcccagcaaattgggatcacatgcttttgtctccacagcaaccagccactgcaggcagcatgtctttcctcccctgctctctgcttgctgttgttttgacgctattctgcttgcatgtcttctggttgggatgtggagttgttgctggactctcaggcgaagctgaagtcattgaagtgtgtgaagctctgtgcttgcatgagggcaagcaaggaatggctgtgcctgaggctgctctgggaaactccttgccccttgacctcttttgagagcattcacgtggtcttcttgctcatccccttataaatgtgctttgcctgcctcagcctcatggtcagagcagtggagactggagccctgtttgcacgttctagttgttcggagaaagcctaggttctgggctcaggtccagatgcagcggggattctgttctctgactgtggcgaccttgctttggttcttgttgaagtgaaccaagcccggccaccacgcatggcatgctgtgcttggctccccataagacgtcctctttgggtgcacggtgtcaaagtgtgggcaggagtggagagctggtgccctcaggaggagaccacagcatgtccatcagctcagcagagctcgacagccacaagtcctgagaagctttgaccttgaagggcttctgggagaggaggaatttctgcatggggcgtgaaggcacactgtcccaccacaactgaaccagaagagagtgaagactcccctcttcccatcctctgtgccaggtgccagactgtgctccttggaacttatggcccaatcttacctgttctccagggactggtcactgcctcaggacccccaagcctatgccctgagccatggctgctgactgactccagccaaggtgcaaagacgagattatgagacaggtcctcaggcctgtgttccaagtactcacaggggctctgggtgcccatcgccgggagtatggttcagctgccaccggcactgtccatttgcctgtctgtcaagctcagagcatggataagccacacagcagggcagtgcaccctggcaccatgcacggccagcaagaatcaaggcccgcagatgctaagagggcctattgtcaggggaaggtccccgctcctgcacactctctatggatacttgggttgtgggggctctcttggagagtaagtttgtggtttgtttctggtttacagtggtggctgacaccccttgtaagaaagcattcctgggaagtcttctgtgggtccaaacatgttgctccgatcatcacaggagagcaaaaggccctagataccccctttggaatgtgagagtcttgttgtctgatatttgccactgagctggtgaagcccctctaaagagatctcgaccctggggagcagaattcttgtcatctatgaggggtcctgagaaagacttgtcattttttttcctggagttcttcccattgaggtcctaggatttgcacaccactgtcccacaagagctttcctgcctaatgaaaggaggtcttgtggtgtgtgtctcctctcttctctatagttcccgagttggcccccattgcagcccccaccctgtgggtagtcttccagaagtgatgcagtggtgtgagatgccctacaccttgttatttgggagactttgagagtcattcacttccatggtgactagtgtttgttttgcctgattttatattctgtgttgcatttctccccactccctgccctgctttaataaacagcaaaccaatatctaggaagaatgactgagggatagtattgggtattggccccatggcaggaacagccacttgcatctggtcccggtgccacactgcggtgcttggtgtggttgtggagcctgtccctgcgcgccttgctcccgttgagccacgctgtctggtgggtgattctctgccctgagccaccaccctggactggcccagtctccagagctggcacaccctgcctgttttctctttttagacacaacagccgcagtttggccagccactaagtcccaccagctgaggtccgaggaaagcggggtgactcatttcccttgtccagggcccgaggagagtgaggtgtccagcctgcaaagctattccagctccttggtgttggtttgcaataaattggtatttaagcagttctgggtctgcgtgtgacatttgctgctgagacagttctgtctgtgcatggtcattattgttgcattctagccttgaggtcccaggccaacgtacacagcaaacaccagcatggggaattcttaggggttgtttcccatctggtctgaatgcactgggcaagatctcaata

SEQ ID NO: 918 - DNA, 309 bp, Homo sapiens
ccacaggtgtcatttgccctacagctggctggggttctgttgaaaggttcagaggcttcatgcagctgcctgctgaagtcatccattcttgtgttttgttgaggctgtgcagaggggcttcatgtagtcttctctgcacccacagccactccatgtgagctgcagcacttgttctcaaaatggtctttccaaagtctctgatgtgagttgcctgtaagaaattgatagtaatgtcaattaatccctagtatatagtatctgtctttgatatgcttgttgttgcatcacttaggtcttaaaaaaagaaaa

SEQ ID NO: 919 - DNA, 468 bp, Homo sapiens
cactgcccagaacactgcgcttggggaacagacctcacccccacctcaaatctgctctccactgggcctgttggcagccagctcagctggggaagggacagcatgactcgctttgtcgatgaaaagcacgaagttgtcagcacagaacctggccagtccttgagaaactccctccttggtggtcagaggtcaagcagcccatgtggcccacggtcctgaagaactgggctatgtccctgaggctcctctctaccgtctgactgtggggtctggggaacaggcatttaaaccaggctgctgccctggggagtgcccactggacgccagggtgccccatagggacagggtcacaaagccctggggcttcccctgccagtcctggtgaggacagtgtggtcactatctcagagagacgaaaaatgaatattctgtcatttcagactaaactactcacccagctcacactaa

SEQ ID NO: 920 - DNA, 5877 bp, Homo sapiens
gatcccgcccccctcggagcgcccctgtggtctgacttcagcagcactttccggcaggagactgggcactcgctgtcacccgcgagctgcctccctcagcgagatctgagcatctttccggaggctaacagacctgggcttcggggtgaccactgtgcttgcctcagtttccttttctggagcaggggaaggcccggctccctgcccaaaggcggctgtgcgctaagtggcagacgctcggggagagccggcgcggggcggaccccagcgccagtagtgacaggggcgaacgccgccgggagactccagccggcgggcgagcagggtaagccaggccgtgggcgggagggcggggcagctcaccggtaaaaggcagagtccccgagtgggttccagttcgccgtgtagcagtccatggctggtgcagacggcagctgggaagcaccgaggggacacccacctagagcgggctccaggccggcacttccgcttccgcccgtccgggtcacgtggcgaggccgccgccgcggccatcaccactgtgggcagcctcacttggctgccgccccgagaccccagcccgtacctgggcttcgcgcccgccaagtgggcccagccctggctcctgcgccctgtggcggccacctccatcgccttgctttcccttcgggcactgggggtcgctcagggcgggacatgggtgaacggaagtggaagctgtgagcgtcgcagcccgaggcgccgaggcctgaggcgccgtcggggccacagcgacgctcgcatggagagcgctgggcgctgggctgtgcaccgacggctaacctggacccacggtctctgcggggcgggagctttgcagaaccgactggccgactggggcgcgggaacatgaggcttggctaggagcccgctgcgggccaggcgcgcggtgcgcaggcatacccgggtcgcgggtgaacaccgcggagccccgggacttggtaattggcgcgagcgggtgcgcgcatgcgcgggacggcggcgggcacgtggcgaggcgcagggcggcgccgcgcgggaagctccccagtgccctggaggcctgctggctggacgaccccctgcctctggtaccaagtgtgaccaaggctggcgccaccatggctctgctgccgtcacctcctccctttagcattgagcagccccggaggggctagccctgaggctgacctgcccagagtccccaccatcgcgctgcttagtggcctctccctgcagcctgtcgttgctggtggcggcatggtcttctgtctgtcgagcgaggagccgcgccgcccgctgcgaagcgacatggtccacttccaggcctcggaagtccagcagctgctacacaacaagttcgtggtcatcttgggggactccagtgagtgcctcttctagggtgacgcttccagtcccacaccttgcagcccgttcagtgtgtctggaccatttgtttccatctcacatctcttgtctgtcttctggtctgttccgtccagtaggttttctctttttatgtcccacacatcttccacaggagtcctgacaggtgtaataacctgtgcactttttagcccatccttgctcagcatttctcgccctgacagctccccataatttccatcacgaaagcgttgcattgtgtagtgtgtctcctgggtgacttggccgacttaatttctgccaggtgatcttgggtcactgtatactgctggccaggaggcacacagaacagaggcaatgccaggactttttaacctcatcttttctcctgcgtctaagtcaaccacagagctggtgtcgggcacctcagccctgggaaaatggggtcctggacttggaaggagctggggcaggctgaggtctgcctcagccttgggatctctgtctcctcccagttcagagggctgtgtacaaggacctggtgctcttgctccagaaagactcactgctcacagctgcccagctgaaagccaaggtgagggaagcttggtggccatgtcagtggtgggtgggcacagaccctggcctggcagggttctcctccctggcatgggtctgaccagtagggtggggggggtgggtagggggagctgagctttgaacaggaccagctggtggctgggggccagctgggcgagctgcacaacgggacacagtatcgtgaggtccgccagttctgctcgggctctggccaccaccttgtgcgcttctacttcctcactcgtgtttactccgagtaccttgaggatgttctggaagagctgacatatggacctgccccggacctggtgatcatcaactcctgcctctgggatctctccaggttggggcgagggaaaggggaatactggttggggctggaagtacggctgaggcagtccacccttgtgctcttgcccaccctgtgtgttatccaacagatatggtcgctgctcaatggagagctaccgggagaacctggagcgggtgtttgtgcgcatggaccaagtattgccagactcctgcctgctggtgtggaacatggcgatgcccctcggggaacgtatcactgggggtttcctcctgccagaggcaagtgactgaggcccatcaggacaagagatgggatagcagactggtagataggacaccctgctttcagaccctgctgcgttctgtggctcttagaggctgcactttctcacttagctccagcccctggcaggctccctgcggcgggatgtggttgaagggaacttctacagtgctacgctggccggggaccactgctttgatgtcctagacctccactttcacttccggcatgcagtacagcaccgtcatcgggatggtgtccactgggaccagcatgcacaccgccacctctcacacctgcttctgacccatgtggctgacgcctggggcgtggagctgcccaagcgtggctatccccctggtgagccctaccataagtgggggggtagtgatgcactggggccctcagaggacagggctcagaaacagaatgggacacagccactcaagggaagtagaggtcccttgaaggactcctgtggcttctgcatgcaccttcctcaacccctgaggagggttagatcatcggagcaatattcttgtccaagttccagttttctacagtctggctgtgtagtcatttctgtgtgcttgaaggagcttgtacaagtattgaccacataaggcagcatgttgcaagggtcctacccaacagattaacaggaaagaaatggggcatgggtgtgaggagtggaaagacagggaggaagggccatccaggcagtgtggcagaagcaaagaagcccacagctggggggtgggggtacagtcaactggcagggtgtggaacagggatgttgcatcgggaaggccagccttatggacttgggctcaatggacagtgttccataggcttcttagttcagcctcagagtcccactgtgactggtgcagcttggtgtagctctcctcgggccccatctctgggcctttggtggaggcttctgagggccccactcccccttgttttgaggcactgctccccatcacatctcaactgtaacactctgctgcagaacctctgtttccatgtcaacaccctagtccctgcatgcacacaaagagggcaccatggctgattgtctccatggctgcttctcccctgcatcgtgtccttaaagggcaagtttcctgctgcacttgttgacgactcacccctttcagccccagtgtctagcacaatttccctgtacacagtatcaacagaattgtatttgttgaatgggaggcacgagtcatgttagaaggccgattatggcagcacaagaggatgtgggggcacagagagtccaggaatatcatagagacagacctgtaacacttggtagccaggagttggagcatcagggaggtgaatacagattttggttaaacatccccattttcttgtttagatgtaataattgatccccagcaaatgatgggatgccctgaaggttgtaaggctagttttgatggcttaggcctttgaaatccaatttggagctacagaagttagggccatgaaaagggagagttgatttggggtggaaggatgagttggtgagtttggtcacagcagattgatttgaggttctttggaaatacagagtagatttgcagtcattggtacccagcagagagattaaaactgagggcacagtggcagctgtgagggagacagaacgatgctcatgctttggattggcaggaaagaggggctatggcggaaacaaaaggagatgagggcaggggcacttttaggaaggactgaggctgctggcagtgtcacatgactgttgagaagaagggaatttgttagcaagtggttacatttagtaggaaaagtgttgagggcatgggtttggattaaaggagggagtgagcaattgaggaggaagtggaaattgggcaaaacattccttttggaagtttggatggtaaaaggaagttgttggggaagggaataacaggatctttatgtttggcttatttactggtctatggggaggaggtgggcgaggaaaaagctagatacaagacctgggcaaacaaagaaggctctggagggaagtgtaggttagaacaaaggtaagtctgagaggtaagagagaaggaacacactttgggcttggcctgaaatgagagggaatgaggaaaactgggtagagggcaaggatgctccagcctggtggctctgctctccaagaggaaggaatagagctttagaagtgtggatggccagagttcagggcagcctggctcccaagcctacctaaaacaaccatcccattcctagacccgtggattgaggactgggcagagatgaatcatccattccagggaagccataggcagaccccagacttcggggagcacctggccttgctcccacccccaccttcttctttgcctcctcccatgccttttccctacccgcttcctcagccctcgccacctcccctcttcccacccctgccccaggataccccttttttcccaggccagcccttcccaccccatgaattcttcaactataatccagtggaggacttctcgatgccaccccacttaggtaggtgcttctgcagctcccccaccctcttgtacctccccttacccagcctcctatgcctaggtgagctgagaggagttgggtagctccttgtgcccctagcactgggtttggtcacagcagtccctgagtctgaaacatcatctgtaggttcattaatcagctcactggttgtcactgtttcaccgtctgaaggtaggggaaggactatcccttttttgtagatagggaaacagagaagctcacctggaggacaagagttgcttcaaggcagagctgcactcactctggccagaagcctgctcttataatgactggttcttttgtaggatgtggccctggagtgaactttgtgcctggccctctgccacctccaatccctggccctaatccccatggtcagcactggggcccagtggtccaccgggggatgccacgctatgttcctaacagcccctaccatgtgcggagaatgggggggccctgcaggcagcggctcagacactcagagagactgatccacacatacaaactggacagacggcctcctgcccattcggggacatggcctgggtagactggatcttgggctgggactggatgtgccaatggcccttcagggcctgcctggcacctcaggtactgggctagggtgtctgctatgcctggtattgttcttgtccattgctgtcaccaataaaggcatggaagaacagagtgacaaa

SEQ ID NO: 921 - DNA, 636 bp, Homo sapiens
gatcctcctaactcagcctctccagtacctgggactataggaacatgccacaaagctcggcccagtaaaatatttttaaaaaactttaatgggcaattattacatagcaagcactgttctaaatatgcactggtgataaagagaagcaagaaacatgcttttggccgggctcagtggttcacgcctgtaatcccagtactttgggaggccaaggtggatagattgcttaaggtcagaagttcaagaccagcctggccaccatggtgaaacctcacctctagcaaaaaatacaaaaattagccgggcgtggtgacaggggcctgcagtctcagccactcgggaggctgaggcaggagaatcccttgaacccgggaggcggaggttgcagtgagccgagtgcccctgcactccagcctgggcaacagaggaagactctgtcaaaaaaaaaaaaaatgctttcagccctgaaggagcctggtttagcagaagaaacctatacaaatgtcgcctaaatatacaaatagaccatacctaaaagaccctagcactgggcccagtgaggcccacaggattctattgggggagaatcaggcacagttccagaaagaacccttgaactactaagtcctgaaggat

SEQ ID NO: 922 - DNA, 102 bp, Homo sapiens
gaggttgcagtgagctgagatcacgccactgcactccagcctgggtgacagagcaagactccatctcaaaaaaaaaaaaaaaaaaaaaaaaaactaataatc

SEQ ID NO: 923 - DNA, 1271 bp, Homo sapiens
agtttccgttccaggatcttgagtacagacatatgtggttttattgcactttgctttatcatgctttgcagatattgtgttttttacaaattgaagatttttgacaatcctatgtcaagcaagtctattggtgccattgttccaacagaatgtgctcactttttgtcacattttggtaattctgaaatatttcaaaagttattattaatctgttatggtgatctgtggtctttgatgttaatattgtaattgtttgggagcacaacaaaccatgcccatgtaggttgcaaacttagttggtaaatgttgtgtgtaatagttgctacaccaaccagctgttccccaatcactctccctctccttaggcctccctattccttgagacaaaataatactgaaattaggcaaattcacaaccctataatggcttctaactgttcaagtgtaaggaagagtcacacatctttcactttaaaccaaaacctagaaaggattgagcttaataaagaaggcatgtcaaaagctgagataggccaatagctaggcctcttgttccagttagccaagttgtgaatgcaaaggaaaagtccttgaagaaaactagaactactttagcgaatacacaaatgataagatagtgtgacattctaattgctgatatggagaaagttttagtagtctggataggagatcagccacaacattctcttaagccaaagctaactctcttcaattctatgaaagcttagaggtgaggaagctgcagaagaaaagttggaacctggcagaggttggttcatgaggtttaaggaaagaagccatcctcatagcataaaagtgcaaggtggtgcagcaaatactgatgtagaagctgcagcaagttatccagaagatctagctaagattattgatgaaggtggctacactaaacaagagattttcagtgttgacaaaagggttttcttttggaagaagatgccatcttggctttgaatagctggagagaataaggaaatgactgacttcaagggacaggctatcttgttaggggctaatgcagcaggtgaccttaagtcgaagcccatgctcatttaccattctgaaaatcttagggcccttaagaattatattaaatctatcctgcctgtgctttataaatagaacaactaagcctggatgccagcacatctgtttatagcatgatttactgaagattttaagtccactgttgagacttactgctcaaaaactaaaaaaaaaaaaaaaaaaaa

SEQ ID NO: 924 - DNA, 2450 bp, Homo sapiens
ggccgaggcaggtgggtcacaaggtcaggagattgagacaatcctggccaacatggtgaaagtccatgtctactaaaaatacaaaaattacctggatgtagtggtgcacgcctgtaatcccagctacttgggaagctgaggcaggagaatcgcttgcacccaggaggtggaggttgcaatgagctgagatcacgccgctgcactccatcctgggtgacagagcaagactctgtctccagaaaaaaaagaaaggatagattttaattgcttgatgcaagtgtggttttcctgaatctgttcattgacttgtctctgttcttacagaaaacatcggttgtgaagagaaagccaaaaagaatgccaacaagcctttgctggatgagattgtgcctgtgtaccgacgggactgtcatgaggaggtgtatgctggcagccatcaatatccagggagaggagtctatctcctcaagtttgacaactcctactctttgtggcggtcaaaatcagtctactacagagtctattatactagataaaaatgttgttacaaagtctggagtctagggttgggcagaagatgacatttaatttggaaatttctttttacttttgtggagcattagagtcacagtttaccttattgatattggtctgatggtttgtgaactcttgctgggaatcaaaatttccttgagactctttagcattcatactttggggttaaaggagattcctcagactcatccagcccttgggtgctgaccagcagagtcactagtggatgctgaagttacatgagctacatgttaaatatttaaagtctccaaaataaaacaccccaacgttgaccttacccggctgatggttagccccttgctgcctgctccatgtgtcttatgagagcccgtagttacagtgtcctctaatttgaaatccataagttaacaagtctatatcaggtgcagctggctttgattaaaggccatttttaaaacttaaaaactcaacacagaaaaagaaatggcctcagtttgatctcgttcagaatgacccagattgtttctgctttgggtgcagctgtttagttcagagttatattacagagaattattttctgagataatcttaaactagaatgttcaaaactaattgataattgaagtatcaagatacgtagaacacctcagagatttttcttcaggaacttccacaaactttgaatccttgtatctttatttggtattcatactactagtagcaaaatacaggttttttgttttgttttgttttgttttggcttcatagagtatctcaaattgaaacttttctgcacaaagaataaaattaaggattttataaactcaaattggcacctactgaattaaaatacataaaatcatttaaatataattcagcatatgggaagtaacattgcactaatatggaaatcactgccagagacagtctattttcttttaatttgttactacttagtcacaaaccccacattattccagtttggaattacttattaaggagaattggaaatacatatgcccatgcttaaattttatagctttaatttgtgttatttctttattgacgggaagaggtacatctttttttccttactgaaaacaaatatggattaattgcctcaaatttgtataagtgattggctagtgattcttgttttcagaagggagagtggtatagatagaaaatgacaaagatggcaatatacacttaatgttgttattgtatgttgttactgaagtacttagatttttaaaatttcaaatcctaaatcacttcttgtaggagggttttcattaactgcagtatatacagttcactacatatggttgtttgagttttttgtgtgctgtatttctttctgttttttaatacctggttttgtacatatctaactctgttctcttttggttgttcagaaactggatttttttttcttaagcagtgcttaatttgtgttttttaattttgattcagaagtagtcccagctcataggtgttcatactgttacatccagaacatttgtcaggctctctgtcagctttcatgtacatatggtatagaaaccatggagttaggcacttcctggattttttttttatgagaaaaatactgtatttaaaatgtaaaataaacttttaaaaagcaggcactaatatatatttcttccagcctttgattacaaatttgtccttgcacatgttaagatgaattatctcctaaaaatatcattgttcttgggagcagtgtatgttactttacatagcagcggttcctgtcatgtgttcatgtcagaatatttttggttttaaactttcttattgcctttggctgttgattagtacagtacaagtgcgatttcaaaaagatcttgaaagtaatatatttaatcaattaaaatgtttatctgtaa

SEQ ID NO: 925 - DNA, 466 bp, Homo sapiens
ggttaaattggcctagtgaaaataattgaattttcagagtatctctgaatgcctatctctctactatgattttttcattttactgcttatatttaagatatacagaaagcaatagtcctcacaaatcatcttccatctttctaaaatggggaggactcatattggtcagaaggaggatgatgagagcaacattttcatgttactcagatgagtgaaattcctgaggatgaattaggaattgaatggctatggaaaggggaaaatgggaccttgaaataggaatggtagtaagcacagaaagagataggatgctgaccactgctaccactagatgttcatcactgggctcccagggctcagaacagggtttggtgtatagcacatacttaggtatttgaatgaatgagtgaatgaatgaatgaatgaacgaactaataaatgctcacatgcacataacttgttaaat

SEQ ID NO: 926 - DNA, 1782 bp, Homo sapiens
cccagcaagcacacccttttcttaatctcattagaatataaacacaaatgttatgatcttttatttaggataaatttcctcttttaaatgtttttgtttattcaaaagaaaacttcacaaagttactattactagttaaaatatatattagaagtgcctgatttttgtcagagattcttacaaacaatattaaaaacaaacttgaaaagtatctactacagaagcacttagactatcacagaaaaatacaatgaagagttaaatgtctgagataagaccagcaagcttatagttataaagaaaaacacactgtacaatgtttgggggggaaatctgttgtttatagaaaagctttacctttttcttatttatcctcagataacgttgtgaaatctgctcatcagtaaggatgatatggaaagaattctctttttctatctatggtttatttacatattaaaattttactcagtttattaagtacacatatgataccacactagatgcaaatatatatacaggctatgacagtcaatgttcaatttaatactggtcaataaagtgaatttattcaaatgtaacaacttcacttgaattttttggatcacacatatcctatataaagccatctggtttctaatattatgcacaacacattccattttaattataacattcatctacaagaaaaacaaggaaaacaattcaaaactatgttagtaattagttcttgtttggtccattgtacgcaatcaggaaagtataggacttaattagttgctatcaaattgaagcaatgaaaaaggttaaaaatcaaagtacttaaaataaaaatatggaaataaccccccctccccaatactaaagggacacaaaacaacaactactgtcccatcaagcaaaagtggaaaacaaacagagcatgtgtgtaacctcacttaccatctttttgttattctacttcaacgggtcaagaaaggtgaagagagagaaggtagaagtaagagtcagaaaaggcctaaataaaatcctcactgaaatgtttaaacatacaagcaatagagacaattaggttgaggtcagatgcagtactactatatttaatggagttaataattagggccaaattaacatggacagttattcctgaatgcaaattaactcattaaacgatttaaatttccatttttcagtctaccacattttagctaacaagacacaaaaagtataagtcaaaatactaagcacaggaattccaaaaagtaagcttctttaattcattactgaacttaagaactttaattaagaaaaataaatgataacagcaaaggtctagctgagtaggcagagtgttagatagctcagggttgtttttccaagctctagtgttcaagttaaatttatttgacacaggtatcttttgctgttttctactcgaagaataatttaacttgataggcttacaagattgcacagagtgaacagaattgagccaatagaatacagaatgacaaaccatacaagcaaatgctgctagggaattccttggcaaaaatgttttattagcatactgacaaatttgatttctatcacttggccttaaacacgaagaaagtgggcatgaagagatgtgtagttatttgtgcctatgttgcaaaataaatttatggctatacatgatatttcttcatacctcaaaaattttattgtccagtatataaaaaagccattctttaaaaacctgacactgaataaaaagtatagccttcaacttcattaaac

SEQ ID NO: 927 - DNA, 98 bp, Homo sapiens
gagtctcactcttgcccaggctggaatgcagtggcgtgatctcggctcactgcaacctctgcctcccgggttcaagcgattctcctgcctcagcttcc

SEQ ID NO: 928 - DNA, 1044 bp, Homo sapiens
ctgccgtgtgcacggccgtctggtctctctcccacacgtgtgcgcaacctgtcatggagatgtgagggccttgtgtgtgcttccgtgtgtgactgtgtgactgcgggtccagacccccgcctggcggtgatgtgggcccttaaatcactcttcctgctcaccccctccccagtgattcggttttactttgcagcactgtggatccgggcagctgggcggcttctcgggggtgggggatcccccaccccgcccacaagtctggccccagggttctcggaggcagggggtctctgttagtgcgctccctccagctgcaggcacatagcccgagctcacagctggcctgagtcgacgccggctggggtgaaagctccaagtgggcctctggccttcccgctgctctgggtccagagtgtctggagcatgtggcacagaccagggcccctcgtcctccgaggagggtgggacatcctctctgtctcacgcccctgggtggagattctggctggcctcctctccctgtttgccaaggtcaaagtgggccaagggtgcaggtgcttagcctggttccctctcccgggccccgaggttctgtgggtcgggcagattggagacaggactcgtgtaagggctctgctggggtgaaggatggagacagagaaaatcaagatcctttcacaagttaattctacgtctgctgagccccagcccccgacacatcaccctgaggaggtgctaggcttctctgggccccctgtgccccatccacatgttgcagagtaaatctggccccttggacctggggtccgagatggacgcctggctgcccctcctggactgcgggtgacagctggcgagacactgcggggcttgggtgcggggagatggagtggggctgagctgcatttttccagccaccccacatcccacagaaggggagtcatggtcagtgccttgagctggaaagacgggcaatgcttccggcccacaccaaccaagaaaaccaccaggggctcattcatcctctcaaagaggctaagaaaa

SEQ ID NO: 929 - DNA, 207 bp, Homo sapiens
ggttcaagtgattctcctccctcaacctcccgagtacctgggattacaggcacctgccaccacacccggctaatttttgtatttttagtagagacggggtttcaccatgttggtcaggctggtctcgaactcctgacctcaggtgatccacccgcctcggcctcccaaagtgctgggattacaggtgtgagccactgtgcctggcca

SEQ ID NO: 930 - DNA, 169 bp, Homo sapiens
aaaatacaaaaattatccaggcgaggtggtgcacacgtgtagtcccagttactcgggaggctgaggtgggaggatggcttgaacctgggaggtgaagattgcagtgagctgagatcacaccactgcattcagtctggataatagaacaagactctatctcaaaaaaaaa

SEQ ID NO: 931 - DNA, 170 bp, Homo sapiens
aaaatacaaaaattatccaggcaaggtggtgcacgcgtgtagtcccagttactcgggaggctgaggtgggaggatggcttgaatctgggaggtgaagattgcagtgagctgagatcacaccactgcattcagtctggataatagaacaagactctatctcaaaaaaaaaa

SEQ ID NO: 932 - DNA, 7734 bp, Homo sapiens
attgttcagtcactaccttagagcctgttttattttttcttaattttattgactcatttatatctcagccctttttattacaaattatttattgtttagtcactgccttagagcctgttttattttttcttaattttattaaaggataatattgatgatgaaatgtcttacgatgatcatttagaggtttattttgaacaactggcaattccaggaatgatggaataaagcatacgaagtagaaggactggaacctccagaaaaagtactttaagttacctacaggtgatcctagtcaggtatgttacagtcttaatggcttttcagaaatttgacagaaaatcactattgatctcactggatgtttacatgaattttaagcctttggttttcttttaactctgttttttacaggtatgaattgataagaaatgcctgcaccttccctccttcctatctttcccttgcctacagaaaattaaaaggcaaaacaatagacatctgcatattcttcattcagatcaaccagtggctagcatttgccaccttttgcagtttctttctctttccataagtactttcttctctgaatcatttgaaagtaagttgcaaagagcatggtgttttaccccaacacttcagcatttatctcttgtgaataatgacatgttctatgtaattacagttctaccatctaactataatacagtaatttgatgtacagcccatattcagatttacctaattgtctccaaaatgttctttatttttgttttagatccacagtttaatcaaagattaaccttgcctttggttgtcacatctctctattcttttactttggagtagttctttcaatacatgaaacattttgaaaaatctaggctctttgttttgtggagtgacccataatctagatatatctggttgcttttttcttctgactagaatagattgagcattttggcaagaatacagattaaacagtgttctcatgaatggatccagattaaacagggaataatgcctaattcagattaggcagtgttgcgtacttaccacctcacaccaggagatgtttgcgtctgtttgtcccacgattgctgatgctatgtttaataattttggttgagatagtgtcaactggacatctccttgtgagggtagcttttcccttttgttattagtcatctgtggaatgagacatcaaagcactgtgaacatcttactccccggcaaacttcacgagctggtttcagcgtcattgctgaaggctcttggaaacattgcttacacccgtggttccaatggtgatttttctcattccttttacattgattacctgcctccttgagtgaggtagatgttgtctgctccccatgttttcccttcaaatgtttaattttaatttaaatgattaatacagctaagttattctttcaacaggcaaatgaaaacagtagcctaaagtgtcagtttcaaccagaaaataacagctctgatttctcatggctcatactcgtctgaaacgactcaggtagaggctgaggaaggccgtgttgtttgtctacctgggactagtaagtatagaaatagaattcctttgttcttaaattctacctttgactttacttttaaaatataatttctttggtacgatttagctcatgcctataatcctagcattttgggaggccaaagagggagaattgcttgagcccaggagtttgagaccagactctacacacacacacacacacacacacacacacacacacacacacacacgcgcacacgaagcgggaatggtggcatgcgactgagaccccagctacctgggaggctgaggttggaggatcatttggacccaggaggtggaggctgcagtgaaccatgattgtgccactgtactccagcctgggtgacagagcaagaccctgtctcacaaaagaaaaagaagaagagatcatctattagtcttcttgatttttgttaaaatgtgttatgtgatagttgataagctttatgcatatgtcaatctgtggccatttaattttgggctaaggacttgttctattatagcacagtaatcattttactaaatagtgactatttgtcattaaaaacaatatatttagttttaatacagttgaatactcacaaatttctgggggaacttggtcaggacatttcaactgagaattgtcaggcaccttctcactgataggcatgctgctcggtggtgcagctcataagcagacaacccccttcacgtaatttagtaggaaaatgacagaaatacttgtgtaactataaagtaaagcagaattctggttattgaatcacagcacctactgaaagaagttctcaagttctgattgagttctaaaattttttgaagattggaattcttcatatgtaagtaaaaacaatttctgatgacccatttctagtccatcttctaaagaagtatttaatctgggccaggcacagtggctcacgcctgtaatcccagcactttgggaggccggggtgggtggatcatgaggtcaagagatcaagaccatcctggccaacatggtgaaaccccatctctactaaaaacacgaaagttagctgagcatggtggcgcgtgcctgtagtcccagctactcgggaggctgaggcaggagaatcacttgaacctgggaggtgggggctacagtgagctgaaattgcgccactgcactccagcctggcaacagagcaagactccatctgaaaaaaaaaaaaaaaaaaaaaaaagaagtatttagtctaagctgggcatgatggctcactcctgtaatcccagcactcttagaggccaaggtatgagggttactataaaccaggagtttgacaccagcctaggcaacaatagcaagaccccatttctacaaaaaaaaatttaaaaattagctgtgcaggaggctgagttgggaggatcacttgagcttaggagttagaggttgtagaaagctatgatcataccactgcactccaggctggatgacagtgggccctgtctctaaaacacaaaaaaaaaccaacaaaaaaagtgtttaatccataagatgaccacatttataggaggctcccggcaatcttagcctgaagccatgaaggaagacgcagtgtgaaggcaagtgcaggctggcctctggcagctgaggatcaggacaggatgtggagtgaacatccacatcaaagctttattgcttggattggaaaaaaaattcctatctgtaggtcagccttaaaatacaccatttcataaaatattgattgtctttcccatattttgagcccatgcaatttgtgctacctgagggaacagtattgtgtccttgatttggtgagatcagtagctttcttatcttattgagtgacagctacagaactcagaaacagaagctgcatattaagcaaatttatatctttcttgttataatattattgtgtataagaaatagagatggccgggtgcggtggctcacgcctgtaatctcagcactttgggaggctgaggcagatggatcacacggtcaggagtttgagaccagcctggccaacatggtgaaaccctgtctctactaaaaatacaaaaggcaataagaggttctatgtggactttgaaggtcgtctctatcaatttgaggttggaaagaacagttttgttgacatcctttagctgtgttacaagtacaattttgttttttactcaggcaaaagaaaatgtgtgtgtgtgttaaatacagtcagccctctttatctgtgggtcctgcatccttgctttctaccaacctcagatcaaaaatattccagaaaaaaaaggatggttgcatctgtactgaatatgtacaagctttttttcttgtcattctttatgcaataaagtataacaaccatttacgttgcatttccattgtattaggtattgtgggtaatctagagatgatttgaaggatattggagggtgtgtccaggctgcaggcaagtactatggcattttatgtcagggacacctacagatttttgtctccagccatggttcctgtatagtttaacatttccacacgctgagggtgtgatgggtctgagttgggttggtcccccatgtttgaggaagtgtgcccatcatgattgtacacccttgttgtaaacttcggatatgtctattttgatatttaaaacattttcaggttaagtctgaaaaatgccaagatagtaacaatattttaaaagggaattcagaagtattactataataatagaactcattattagaacattctaatagtagaaaaggaagtctatttattttataaaattgtcagttcagcttaagatctaatagtcttttccaattagcagcaacttaattgagactacctcaaaagaagaatttaacatttatttttgtagaaaaaaagcaattttaaaatagcctgggaaaacttaggtaagttttccttaatcctgactcctaatttgtggctagaagtggcaatgatatgaacataagttgtgctatttgttaatatattgcttttcataaatcaatcccttttttgtaattaggtaaaaagagaagagaaagacattcttgattttggtgactagagttgtagatgctggaagctttgccactaacattgatgaaccagatgcatgtcaccagcccatcacggtgattcttaatgccgttaagtatgaacatacagtaaaagactgttgatagaatacatcggtcttatgaaatgaaatgtgttggttaaggattttttaaacgaatttcacattacacaactggctttactaaatctgagtcttgtatttctgaacagggcaccatgggcccggcactgccacgttttccaaggaacctgccggagctcctgcggaagctgctcctcaggcgatggagtcccttcgctggtaggcccttcttcagtcaccacaggatgcctgccattcatgaacaagaaggagaggacgggctttgaataaaaaacaggtaagtttccaaactgctttttttcatcaagatttcaatcttggctgggcaaagtggctcacgcctgtaatctcagcattttgggagaccaaggcgggcagatcatgaggtcaggagatagagaccatcctggccaacatcatctcctcagcacccagctcagtcatttagacaaagaaaatatgtaagatggccgagcacggttgctcacgcctgtaatcccagcactttgggaggctgaggtgggcggatcacgaggtcaggaggtcaggagatcgagaccgtcctggctaacacggtgaaaccccatctctactaaaaatacaaaaaaaaaaaaaaattagctgggcatggtggcaggcacctctagtcccagctactcgggaggctgaggcaggagaatgacgtgaagccaggaggcggagcttgcagtgagctgagatcgtgctactgcactccagcctaggcaacagagcgagactccttctcaaaaaaaaaaagaaaagaaagaaaaagaaaacacgtaagaaatagttgccaaaataattgaatacaggatcttcaactgagattattttctttgttaggatccaggaaatatttgtgaggccatttggacttcagtgtgaaatggtgttaaaagatgaagtcatttattcaagaagtaaacctctgccacctggactgtgcgcagacatttcattgattttgtttaataaacattttctggctttgggaggtgtctctcttggtagaacacagtgtcaaagatggacaagatggacacatagtccattatttggtattgtttgtgtatgggagcagaccacaaattaatgtttggagaacaattttgtcataacacactgttgaggctcagttgtacagaactggaaaagtcttcagcttggcacatgtcctgattcagcctttgtttaacatacattccaatccggattctatcttcactggctacaaagaccacctgatacgtgcaccacgacacaggagctgctggagagggggtagtgttatcacctcaaacccacagccatatttttcaaaagccagcttagagagaggtgtactgatagctgcatagagaacatgcagtccatccattcttcccagtgatgtacatttctcaatcagtaaccacgtggtataccagccttgagtgtcacatctcccaaccataccaaatggatcacctaactggaggtggggggggccctcagaaatgagatttcgtatttactgtaaaattgccttattttttcttttgaggtggagtctcactctgttgcctgggctggagtgcaatggtgtgatcactgctcactgcaacctccgcctcctgggttcaagcagttctcctgcctcagcctcccaagtagctgcaattacaggtgcatgccaccactcccagcaaatttttatatttttagtggagacagggtttcaccatgttgaccaggctggtctcaaactcctgacctcaggtgatctgcccaccttggcctcccaaagttctgggattaaaggtacgagccaccgcaactggctgagaatctttttatttgctgatttgtctcttgtgtattttctttgttcagatgtctcttcagatctttttctcacttttaaattgttttttaattgttaagaattttctgtctagtttagatataagccctttatcagacatgtgttttgcaaatattttctcctagtctgtggcttgtattctgtctcttaacactcattttatttttacttttggaactaaagaagaagaatggtcagctttccattattcttgtaacagtaatggcagaaccaagtctgctaatgctacactgagcaaagaaagtcacctggtgaagtccaacattaatgaaatggggtagtacatgcaggcagcgttgggggtggggagggaacaaatgcttcttgagagtaatataatctgccataccatccaggaacctacaatggctatctattaccttattctctggtttgtttaatgttcgaatctttccgaaagatccttcaacctttctggaagaatctaatctgataacaccatcaaaaacacattacttcttttggcataatttaaattgtaagacatcattcacatttatcaatgttacatatataagaactcacccaccatattcttccttgaggaattacagcatgtaattctataatcatttttataatcgtctaacaattttataatggattggttgcttactatcaattttttaaaagtcatggcttctccagtcatttcttgcttatcgaaattatttcatgagatgggtctctccttgtatatttgaaaatgaggtttgcttccttctacttaaaaaacaacttgaacatacctgtttggatcacatggtcttgtcctgataacttggaagaggttgcttcagcattgttcttattgttgtggtggttattattaatattgtttcatattctgtttaaaaaattaaaattttacacaagaccaatgtcttcttttcaattccagtacatttttcagaagtaactaatgctattggctttgtgcattgtaatttcagaccattttatatgtctttagttatatgtacagtatacacacatatgtgtcatattattccattttttctagcattaaacattgctatggaaaa

SEQ ID NO: 933 - DNA, 294 bp, Homo sapiens
gagactccacctcggaaaaaaaaaaaaaaagccagtgccaacttagaccatgactgagagctcttggtttatcttatccttgctgagctgggtgttacaacattgaagccttctgcagtgtcctccctccctttttctctctttctctctctctcctccctttcttccttttacttctcttatgataggctcgtctgtacttttttgatagaggtaaccatttgccacaccattttctgaagggcctgctctcttccccattcatttgtgatggcacatttatcctaccctaag

SEQ ID NO: 934 - DNA, 98 bp, Homo sapiens
catattcttcattcagatcaaccagtggctagcatttgccaccttttgcagtttctttctctttccataagtactttcttctctgaatcatttgaaag

SEQ ID NO: 935 - DNA, 407 bp, Homo sapiens
gtcccagctactcaggaggctgaggcaggagaatggtgtgaacccaggaggtggagcttgcagtgagccgagatcacgccactgcactccagcctaggtgacagagtgagactccacctcgaaaaaaaaataaataaataaaagccagtgccagcttagaccatgactgagagctcttggtttatcttatccttgccgagctgggtgttacaacattgaagccttctgcagtgtcctccctccctttttctctctttctctctctctcctccctttcttccttttacttctcttaggataggctcgtctgtacttttttgatagaggtaaccatttgccacaccattttctgaagtgcctgctctcttccccattcatttgtgatggcacatttatcctaccctaag

SEQ ID NO: 936 - DNA, 640 bp, Homo sapiens
aaattgtaagcgttaatattttgttaaaattcgcgttaaatttttgttaaatcagctcattttttaaccaataggccgaaatcggcaaaatcccttataaatcaaaagaatagaccgagatagggttgagtgttgttccagtttggaacaagagtccactattaaagaacgtggactccaacgtcaaagggcgaaaaaccgtctatcagggcgatggcccactacgtgaaccatcaccctaatcaagttttttggggtcgaggtgccgtaaagcactaaatcggaaccctaaagggagcccccgatttagagcttgacggggaaagccggcgaacgtggcgagaaaggaagggaagaaagcgaaaggagcgggcgctagggcgctggcaagtgtagcggtcacgctgcgcgtaaccaccacacccgccgcgcttaatgcgccgctacagggcgcgtccattcgccattcaggctgcgcaactgttgggaagggcgatcggtgcgggcctcttcgctattacgccagctggcgaaagggggatgtgctgcaaggcgattaagttgggtaacgccagggttttcccagtcacgacgttgtaaaacgacggccagtgaattgtaatacgactcactatagggc

SEQ ID NO: 937 - DNA, 606 bp, Homo sapiens
gttatatttttgttaratcagctcattttttaaccaataggccgaaatcggcaaaatcccttataaatcaaaagaatagaccgagatagggttgagtgttgttccagtttggaacaagagtccactattaaagaacgtggactccaacgtcaaagggcgaaaarccgtctatcagggcgatggcccactacgtgaaccatcaccctaatcaagttttttggggtcgaggtgccgtaaagcactaaatcggaaccctaaagggagcccccgatttagagcttgacggggaaagccggcgaacgtggcgagaaagkaagggaagaaagcgaaaggagcgggcgctagggcgctggcaagtgtagcggtcacgctgcgcgtaaccaccacacccgccgcgcttaatgcgccgctacagggcgcgtccattcgccattcaggctgcgcaactgttgggaagggcgatcggtgcgggcctcttcgctattacgccagctggcgaaagggggatgtgctgcaaggcgattaagttgggtaacgccagggttttcccagtcacgacgttgtaaaacgacggccagtgaattgtaatacgactcactatagggc

SEQ ID NO: 938 - DNA, 628 bp, Homo sapiens
aagcgtaatatttgtaaaattcgcgttaaattttgtaaatcagctcattttttaaccaataggccgaaatcggcaaaatcccttataaatcaaaagaatagaccgagatagggttgagtgttgttccagtttggaacaagagtccactattaaagaacgtggactccaacgtcaaagggcgaaaaaccgtctatcagggcgatggcccactacgtgaaccatcaccctaatcaagttttttggggtcgaggtgccgtaaagcactaaatcggaaccctaaagggagcccccgatttagagcttgacggggaaagccggcgaacgtggcgagaaaggaagggaagaaagcgaaaggagcgggcgctagggcgctggcaagtgtagcggtcacgctgcgcgtaaccaccacacccgccgcgcttaatgcgccgctacagggcgcgtccattcgccattcaggctgcgcaactgttgggaagggcgatcggtgcgggcctcttcgctattacgccagctggcgaaagggggatgtgctgcaaggcgattaagttgggtaacgccagggttttcccagtcacgacgttgtaaaacgacggccagtgaattgtaatacgactcactatagggc

SEQ ID NO: 939 - DNA, 640 bp, Homo sapiens; identical to SEQ ID NO: 936

SEQ ID NO: 940 - DNA, 513 bp, Homo sapiens
gagtgttgttccagtttggaacaagagtccactattaaagaacgtggactccaacgtcaaagggcgaaaaaccgtctatcagggcgatggcccactacgtgaaccatcaccctaatcaagttttttggggtcgaggtgccgtaaagcactaaatcggaaccctaaagggagcccccgatttagagcttgacggggaaagccggcgaacgtggcgagaaaggaagggaagaaagcgaaaggagcgggcgctagggcgctggcaagtgtagcggtcacgctgcgcgtaaccaccacacccgccgcgcttaatgcgccgctacagggcgcgtccattcgccattcaggctgcgcaactgttgggaagggcgatcggtgcgggcctcttcgctattacgccagctggcgaaagggggatgtgctgcaaggcgattaagttgggtaacgccagggttttcccagtcacgacgttgtaaaacgacggccagtgaattgtaatacgactcactatagggc

SEQ ID NO: 941 - DNA, 612 bp, Homo sapiens
ttcgcgttaaatttttgttacaatcagctcattgtttaaccaataggccgaaatcggcaaaatcccttataaatcaaaagaatagaccgagatagggttgagtgttgttccagtttggaacaagagtccactattaaagaacgtggactccaacgtcaaagggcgaaaaaccgtctatcagggcgatggcccactacgtgaaccatcaccctaatcaagttttttggggtcgaggtgccgtaaagcactaaatcggaaccctaaagggagcccccgatttagagcttgacggggaaagccggcgaacgtggcgagaaaggaagggaagaaagcgaaaggagcgggcgctagggcgctggcaagtgtagcggtcacgctgcgcgtaaccaccacacccgccgcgcttaatgcgccgctacagggcgcgtccattcgccattcaggctgcgcaactgttgggaagggcgatcggtgcgggcctcttcgctattacgccagctggcgaaagggggatgtgctgcaaggcgattaagttgggtaacgccagggttttcccagtcacgacgttgtaaaacgacggccagtgaattgtaatacgactcactatagggc

SEQ ID NO: 942 - DNA, 462 bp, Homo sapiens
caacgtcaaagggcgaaaaaccgtctatcagggcgatggcccactacgtgaaccatcaccctaatcaagttttttggggtcgaggtgccgtaaagcactaaatcggaaccctaaagggagcccccgatttagagcttgacggggaaagccggcgaacgtggcgagaaaggaagggaagaaagcgaaaggagcgggcgctagggcgctggcaagtgtagcggtcacgctgcgcgtaaccaccacacccgccgcgcttaatgcgccgctacagggcgcgtccattcgccattcaggctgcgcaactgttgggaagggcgatcggtgcgggcctcttcgmtattacgccagctggcgaaagggggatgtgctgcaaggcgattaagttgggtaacgccagggttttcccagtcacgacgttgtaaaacgacggccagtgaattgtaatacgactcactatagggc

SEQ ID NO: 943 - DNA, 640 bp, Homo sapiens; identical to SEQ ID NO: 936

SEQ ID NO: 944 - DNA, 640 bp, Homo sapiens; identical to SEQ ID NO: 936

SEQ ID NO: 945 - DNA, 654 bp, Homo sapiens
aataccgcatcaggaaattgtaagcgttaatattttgttaaaattcgcgttaaatttttgttaaatcagctcattttttaaccaataggccgaaatcggcaaaatcccttataaatcaaaagaatagaccgagatagggttgagtgttgttccagtttggaacaagagtccactattaaagaacgtggactccaacgtcaaagggcgaaaaaccgtctatcagggcgatggcccactacgtgaaccatcaccctaatcaagttttttggggtcgaggtgccgtaaagcactaaatcggaaccctaaagggagcccccgatttagagcttgacggggaaagccggcgaacgtggcgagaaaggaagggaagaaagcgaaaggagcgggcgctagggcgctggcaagtgtagcggtcacgctgcgcgtaaccaccacacccgccgcgcttaatgcgccgctacagggcgcgtccattcgccattcaggctgcgcaactgttgggaagggcgatcggtgcgggcctcttcgctattacgccagctggcgaaagggggatgtgctgcaaggcgattaagttgggtaacgccagggttttcccagtcacgacgttgtaaaacgacggccagtgaattgtaatacgactcactatagggc

SEQ ID NO: 946 - DNA, 414 bp, Homo sapiens
tgaaccatcaccctaatcaagttttttggggtggaggtgccgtaaagcactaaatcggaaccctaaagggagcccccgatttagagcttgacggggaaagccggcgaacgtggcgagaaaggaagggaagaaagcgaaaggagcgggcgctagggcgctggcaagtgtagcggtcacgctgcgggtaaccaccaccaccgccgcgcttaatgcgccgctacagggcgcgtccattcgccattcaggctgcgcaactgttgggaagggcgatcggtgcgggcctyttcgctattacgccagctggcgaaagggggatgtgctgcaaggcgattaagttgggtaacgccagggttttcccagtcacgacgttgtaaaacgacggccagtgaattgtaatacgactcactatagggc

SEQ ID NO: 947 - DNA, 647 bp, Homo sapiens
  misc_feature (29)..(29): n equals a,t,g, or c
cgcatcaggaaatgtaagcgttaatattntgtaaaattcgcgttaaatttttgttaaatcagctcattttttaaccaataggccgaaatcggcaaaatcccttataaatcaaaagaatagaccgagatagggttgagtgttgttccagtttggaacaagagtccactattaaagaacgtggactccaacgtcaaagggcgaaaaaccgtctatcagggcgatggcccactacgtgaaccatcaccctaatcaagttttttggggtcgaggtgccgtaaagcactaaatcggaaccctaaagggagcccccgatttagagcttgacggggaaagccggcgaacgtggcgagaaaggaagggaagaaagcgaaaggagcgggcgctagggcgctggcaagtgtagcggtcacgctgcgcgtaaccaccacacccgccgcgcttaatgcgccgctacagggcgcgtccattcgccattcaggctgcgcaactgttgggaagggcgatcggtgcgggcctcttcgctattacgccagctggcgaaagggggatgtgctgcaaggcgattaagttgggtaacgccagggttttcccagtcacgacgttgtaaaacgacggccagtgaattgtaatacgactcactatagggc

SEQ ID NO: 948 - DNA, 640 bp, Homo sapiens
aaattgtaagcgttaatattttgttaaaattcgcgttaaatttttgttaaatcagctcattttttaaccaataggccgaaatcggcaaaatccsttataaatcaaaagaatagaccgagatagggttgagtgttgttccagtttggaacaagagtccactattaaagaacgtggactccaacgtcaaagggcgaaaaaccgtctatcagggcgatggcccactacgtgaaccatcaccctaatcaagttttttggggtcgaggtgccgtaaagcactaaatcggaaccctaaagggagcccccgatttagagcttgacggggaaagccggcgaacgtggcgagaaagsaagggaagaaagcgaaaggagcgggcgctagggcgctggcaagtgtagcggtcacgctgcgcgtaaccaccacacccgccgcgcttaatgcgccgytacagggcgcgtccattcgccattcaggctgcgcaactgttgggaagggcgatcggtgcgggcctcttcgctattacgccagctggcgaaagggggatgtgctgcaaggcgattaagttgggtaacgccagggttttcccagtcacgacgttgtaaaacgacggccagtgaattgtaatacgactcactatagggc

SEQ ID NO: 949 - DNA, 640 bp, Homo sapiens
aaattgtaagcgttaatattttgttaagattcgcgttaaatttttgttaaatcagctcattttttaaccaataggccgaaatcggcaaaatcccttataaatcaaaagaatagaccgagatagggttgagtgttgttccagtttggaacaagagtccactattaaagaacgtggactccaacgtcaaagggcgaaaaaccgtctatcagggcgatggcccactacgtgaaccatcaccctaatcaagttttttggggtcgaggtgccgtaaagcactaaatcggaaccctaaagggagcccccgatttagagcttgacggggaaagccggcgaacgtggcgagaaaggaagggaagaaagcgaaaggagcgggcgctagggcgctggcaagtgtagcggtcacgctgcgcgtaaccaccacacccgccgcgcttaatgcgccgctacagggcgcgtccattcgccattcaggctgcgcaactgttgggaagggcgatcggtgcgggcctcttcgctattacgccagctggcgaaagggggatgtgctgcaaggcgattaagttgggtaacgccagggttttcccagtcacgacgttgtaaaacgacggccagtgaattgtaatacgactcactatagggc

SEQ ID NO: 950 - DNA, 571 bp, Homo sapiens
aataggccgaaatcggcaaaatcccttataaatcaaaagaatagaccgagatagggttgagtgttgttccagtttggaacaagagtccactattaaagaacgtggactccaacgtcaaagggcgaaaaaccgtctatcagggcgatggcccactacgtgaaccatcaccctaatcaagttttttggggtcgaggtgccgtaaagcactaaatcggaaccctaaagggagcccccgatttagagcttgacggggaaagccggcgaacgtggcgagaaaggaagggaagaaagcgaaaggagcgggcgctagggcgctggcaagtgtagcggtcacgctgcgcgtaaccaccacacccgccgcgcttaatgcgccgctacagggcgcgtccattcgccattcaggctgcgcaactgttgggaagggcgatcggtgcgggcctcttcgctattacgccagctggcgaaagggggatgtgctgcaaggcgattaagttgggtaacgccagggttttcccagtcacgacgttgtaaaacgacggccagtgaattgtaatacgactcactatagggc

SEQ ID NO: 951 - DNA, 640 bp, Homo sapiens; identical to SEQ ID NO: 936

SEQ ID NO: 952 - DNA, 639 bp, Homo sapiens
  misc_feature (88)..(88): n equals a,t,g, or c
aattgtaagcgttaatattttgttaaaattcgcgttaaatttttgttaaatcagctcattttttaaccaataggccgaaatcggcaanatcccttataaatcaaaagaatagaccgagatagggttgagtgttgttccagtttggaacaagagtccactattaaagaacgtggactccaacgtcaaagggcgaaaaaccgtctatcagggcgatggcccactacgtgaaccatcaccctaatcaagttttttggggtcgaggtgccgtaaagcactaaatcggaaccctaaagggagcccccgatttagagcttgacggggaaagccggcgaacgtggcgagaaaggaagggaagaaagcgaaaggagcgggcgctagggcgctggcaagtgtagcggtcacgctgcgcgtaaccaccacacccgccgcgcttaatgcgccgctacagggcgcgtccattcgccattcaggctgcgcaactgttgggaagggcgatcggtgcgggcctcttcgctattacgccagctggcgaaagggggatgtgctgcaaggcgattaagttgggtaacgccagggttttcccagtcacgacgttgtaaaacgacggccagtgaattgtaatacgactcactatagggc

SEQ ID NO: 953 - DNA, 397 bp, Homo sapiens
atcaagttttttggggtcgaggtgccgtgaagcattaaatcggaaccctaaagggagcccccgatttagagcttgacggggaaagccggcgaacgtggcgagaaaggaagggaagaaagcgaaaggagcggacgttagggcgctggcaagtgtagcggtccgtgcgcgtaaccaccacacacgctgcgcttaatgcgccgctacagggcgcgtccattcgccattcgaggtgcgcaactgttgggaagggcgatcggtgcgggcctcttcgctattacgccagctggcgaaagggggatgtgctgcaaggcgattaagttgggtaacgccagggttttcccagtcacgacgttgtaaaacgacggccagtgaattgtaatacgactcactatagggc

SEQ ID NO: 954 - DNA, 648 bp, Homo sapiens
gcatcaggmaattgtaagcgttaatattttgttaaaattcgcgttaaatttttgttaaatcagctcattttttaaccaataggccgaaatcggcaaaatcccttataaatcaaaagaatagaccgagatagggttgagtgttgttccagtttggaacaagagtccactattaaagaacgtggactccaacgtcaaagggcgaaaaaccgtctatcagggcgatggcccactacgtgaaccatcaccctaatcaagttttttggggtcgaggtgccgtaaagcactaaatcggaaccctaaagggagcccccgatttagagcttgacggggaaagccggcgaacgtggcgagaaaggaagggaagaaagcgaaaggagcgggcgctagggcgctggcaagtgtagcggtcacgctgcgcgtaaccaccacacccgccgcgcttaatgcgccgctacagggcgcgtccattcgccattcaggctgcgcaactgttgggaagggcgatcggtgcgggcctcttcgctattacgccagctggcgaaagggggatgtgctgcaaggcgattaagttgggtaacgccagggttttcccagtcacgacgttgtaaaacgacggccagtgaattgtaatacgactcactatagggc

SEQ ID NO: 955 - DNA, 434 bp, Homo sapiens
gggcgatggccccactaccgtgaaccatcaccctaatcaagttttttggggtcgaggtgccgtaaagcactaaatcggaaccctaaagggagcccccgatttagagcttgacggggaaagccggcgaacgtggcgagaaaggaagggaagaaagcgaaaggagcgggcgctagggcgctggcaagtgtagcggtcacgctgcgcgtaaccaccacacccgccgcgcttaatgcgccgctacagggcgcgtccattcgccattcaggctgcgcaactgttgggaagggcgatcggtgcgggcctcttcgctattacgccagctggcgaaagggggatgtgctgcaaggcgattaagttgggtaacgccagggttttcccagtcacgacgttgtaaaacgacggccagtgaattgtaatacgactcactatagggc

SEQ ID NO: 956 - DNA, 624 bp, Homo sapiens
tattttgttaaaattcgcgttaaatttttgttaaaccagctcattttttaaccaataggcggaaatcggcaaaatcccttataaatcaaaagaatagaccgagatagggttkagtgttgttccagtttggaacaagagtccactattaaagaacgtggactccaacgtcaaagggcgaaaaaccgtctatcagggcgatggcccactacgtgaaccatcaccctaatcaagttttttggggtcgaggtgccgtaaagcactaaatcggaaccctaaagggagcccccgatttagagcttgacggggaaagccggcgaacgtggcgagaaaggaagggaagaaagcgaaaggagcgggcgctagggcgctggcaagtgtagcggtcacgctgcgcgtaaccaccacacccgccgcgcttaatgcgccgctacagggcgcgtccattcgccattcaggctgcgcaactgttgggaagggcgatcggtgcgggcctcttcgctattacgccagctggcgaaagggggatgtgctgcaaggcgattaagttgggtaacgccagggttttcccagtcacgacgttgtaaaacgacggccagtgaattgtaatacgactcactatagggc

SEQ ID NO: 957 - DNA, 509 bp, Homo sapiens
gttgttccagtttggaacaagagtccactattaaagaacgtggactccaacgtcaaagggcgaaaaaccgtctatcagggcgatggcccactacgtgaaccatcaccctaatcaagttttttggggtcgaggtgccgtaaagcactaaatcggaaccctaaagggagcccccgatttagagcttgacggggaaagccggcgaacgtggcgagaaaggaagggaagaaagcgaaaggagcgggcgctagggcgctggcaagtgtagcggtcacgctgcgcgtaaccaccacacccgccgcgcttaatgcgccgctacagggcgcgtccattcgccattcaggctgcgcaactgttgggaagggcgatcggtgcgggcctcttcgctattacgccagctggcgaaagggggatgtgctgcaaggcgattaagttgggtaacgccagggttttcccagtcacgacgttgtaaaacgacggccagtgaattgtaatacgactcactatagggc

SEQ ID NO: 958 - DNA, 654 bp, Homo sapiens
aaatacgcatcaggaaattgtaagcgttaatattttgttaaaattcgcgttaaatttttgttaaatcagctcattttttaaccaataggccgaaatcggcaaaatcccttataaatcaaaagaatagaccgagatagggttgagtgttgttccagtttggaacaagagtccactattaaagaacgtggactccaacgtcaaagggcgaaaaaccgtctatcagggcgatggcccactacgtgaaccatcaccctaatcaagttttttggggtcgaggtgccgtaaagcactaaatcggaaccctaaagggagcccccgatttagagcttgacggggaaagccggcgaacgtggcgagaaaggaagggaagaaagcgaaaggagcgggcgctagggcgctggcaagtgtagcggtcacgctgcgcgtaaccaccacacccgccgcgcttaatgcgccgctacagggcgcgtccattcgccattcaggctgcgcaactgttgggaagggcgatcggtgcgggcctcttcgctattacgccagctggcgaaagggggatgtgctgcaaggcgattaagttgggtaacgccagggttttcccagtcacgacgttgtaaaacgacggccagtgaattgtaatacgactcactatagggc

SEQ ID NO: 959 - DNA, 546 bp, Homo sapiens
  misc_feature (20)..(20): n equals a,t,g, or c
ttataaatcaaaagaatagnccgagatagggttgagtgttgttccagtttggaacaagagtccactattaaagaacgtggactccaacgtcaaagggcgaaaaaccgtctatcagggcgatggcccactacgtgaaccatcaccctaatcaagttttttggggtcgaggtgccgtaaagcactaaatcggaaccctaaagggagcccccgatttagagcttgacggggaaagccggcgaacgtggcgagaaaggaagggaagaaagcgaaaggagcgggcgctagggcgctggcaagtgtagcggtcacgctgcgcgtaaccaccacacccgccgcgcttaatgcgccgctacagggcgcgtccattcgccattcaggctgcgcaactgttgggaagggcgatcggtgcgggcctcttcgctattacgccagctggcgaaagggggatgtgctgcaaggcgattaagttgggtaacgccagggttttcccagtcacgacgttgtaaaacgacggccagtgaattgtaatacgactcactatagggc

SEQ ID NO: 960 - DNA, 654 bp, Homo sapiens; identical to SEQ ID NO: 945

SEQ ID NO: 961 - DNA, 7793 bp, Homo sapiens
gctggggtggtcgttttgaatggatgaggatgacggatcaggaatagagccagcctgggcccatttgtcctgtcactgtctgtgttacatgaggttccttcttctctcactttttccccactctgctactgaaacaggaatctttctcaaatgagtgttttgtatttcttgcccattcgtatagagaagggttgcctggcgcaatttgatcagggcaggagagggatactatgggatgttctagtcgaagtgtatgtatctgcctgttgcttatgattcacagtattcctgctggaagggttcatttttctgaggcttgaggagaagttgcttgtccaggattctgttcttccttgggtccttggattctcacgctgctgtcgtttttcctgttcagtcctaatccagacctctgtggtctgtcacatagcaccctcctccctctctgtgagtctcctgcttggctctgtcatattcctctttttttccttttctagaaagaaaagtcaaaatcgaacagttcagcagcccgagaacctaatggctttccttctgatgcctcagccaattcctctctccttcttgaattccagggtgagttgcatctctgtgtcttccttgcaggagaatgaaaacttggatgaatgcattaataagaagaattggccaggtgcagtgactcacacctgtaacctcagcactttgggagtctgaggcgggcagatcacctgaggtcaggagttcaagacgagcctggccaatatggtgaaacccagtctctactaaaaatacaaaaagttagctgagcgtggtggcgcgtgcctgtaatcccagctactcgggggtctgagacaggagaatcgcttaaacccaggaggtggaggttgcggtgagccgagattgcgccactgcactccagcctgggctgcagagtgagactccgtctcaaaaaaaaaaaaaaagaattctgtgtatcaattcagtgcctgctgtttcgctggtattttgcgaggcacttgacctaaatcttttcatttaaacttcacgataactctgcaagataggtaatggtattctcattttccagttaaggaaactgaggctcagagaggttaagttacgtgtctaaagttacataacttgtaagtgacagactccatgtcaggtcctggttgtccgaatcagaagcttttttttagattgtacttcattttttattttttattttttgtagagacagagtctggctatgttgtccaggctggttgtgaactcctggcctcaagcagtcccccagccttgacctcccaaggtacaagcatgagccactgcacctggcctagactgtatgttttatcatagtcgcttagagtaggctacccaaagccgaagcttctgcttacccactgttaggacatgttctgcctcctaaaccaatcccgccggatcatcaccgtagtcatgatactgccttttacacctacctgctaggtactgtctacgaagcacttttactttactttctcatttttacccatgtatcagcctgtgatataaaccaggcagttattatcatccctatttaaggaaactgatgctcagggaggaacagtgttttgtctaagctcaaaagtgacagttttattcatttggtgacaaaatgctacttccattttagtgtgggtattaaaggtctttataggagtcaagactagcatgagtttatgactttctcttcaaaaccagattggagctaacccagcgtgtagttattccttccccacctctttcccaggccccaccaaggtcaaccatgtgctgttggaaagggaacaccaacgtgtgttcagtagtcagaaggctctgggagacatatgaggctccatttcctcagtctggccaccatctcctccttttcatttagtaaacacttaatgaactcccactgtatgcaggtaccgtgcgttgcactggggagtcaaggacaagtgagccacagagcctgtccacagaggctcatgggaggaagcacgtgtgcgaaatgataaatgcaggcgtgcacaggctatcacaggagagtaagagagggtgggcatttccacctatgcgagccagggaggtagggctccgcggaagaagtgatgtcggggctgtgttgggaggtctgaggctttccaggacaagagaaggcagcctagccaaggaacagctgggcagaagcacccatgcatgacgaagctcttgggttagggtccagtctgcctggagctgaggatgcttgtaggagaacagtaggcactgaggccagagatcagaaaggacttcctatgttgcgataaggccagctcctgcctctcctaagaagtactgggtatggctgggcgtggtggctcatgcctgtaatcccagcactttgggaggctgaggcaggtggattacctgaggtcaggagttcgagaccagcctgaccaacatggtgaaaccccgtctctaataaaaatacaaaattacccaggcgtggtggcgcaagcctgtaatcccagctactcaagaggctgaggcaggagaatcagttgaacccaggaggcagaggttgtggtgagctgagatagcaccattgcactccagcctgggcaacaagagcgaaactcggtctcaaaaaaaaaaaaaaaaaaagtactgggtatgacatttctcccttaggcagcagtggagcgtcgaagggtttagaaaggtctctctggcagtggtttgcagttcagtttaaggtacgtgagactggaggcagggcagtgaggtatgtggctgttgcaggaggccaggctggagatgatgaggcttgaactgaagcagtaggagaggaaggaatgagcacaaatgataccagagcaggagggggaaacactttggtgactggctactgtaggtgcagcggaggaatgcattggtgactcttactttttttctttttttttaattttaatttttattttttgagacggagtctcgccatgtcacccaggctacagtgcaatggcacgatctcagctcactgcaacctccacctcccgggttcaagcgattttcctgcctcagcctcccaagtaactgggattacaggcgcgtgctatcatgcccggctaatttttgtattttcagtagagacggggtttcaccatgttggccaggctggtctcaaacttctgacctcaagtgatccgcccaccttggcctcccaaagtgctgggattacaggcgtgagccactgcactcggcctggtaactcttttttttttttttttttttttttttgagacagagtctcgctctgttgctcaggctggagtgcaatggcgcgatctcggctcactgcaagctctgccttctaggttcatgccattcttctgcctcagcctcctgagtagctggaactacaggtgcccaccaccacagccggctaattttttgtaattttagtagagacggggtttcaccgtgttagccaggatggtctcgatgtcctgaccttgtgatctgcccacctcggcctcccaaagtgctgggattacaggcgtgagccaccgtgcctggcctcggcctggtaactcttaagttttgcaccttgatggtgactttaagccttcaggcagaactcccaggtgctaatccgtcagtccggcagccgaagcctgagctcaccaccttcagacaccaccagcctccttcagatgcccaaggatgcctgacaaatgtcattttctacacatcttatgatgtgagaaggattgagaagtactgaccagagacacagctacatccctcccttccacaagctgcaatcagtggataataaagaagagtttaataagcatatcctgaccttcctaaagtgtaatgttgcataaacataaagattctggctgcctctggtgcttagaatctatgtcgtgtaggccgggcacaatgattattatactcagttgtatccttggctgcctaaagtgatgccaggcccttggctctgtccagagttcctcttgaggaaaatgaccacgctcagctgctgcctttgttctgtttggttttcagacgaaaacagcaaccagagttccgtgtctgacgtctatcagcttaaggtggacagcagcaccaactcaagccccagcccccagcagagtgagtccctgagcccagcacacacctccgacttccgcacggatgactcccagcccccaacgctgggccaggagatcctggagggtgagtcgtggttggccgaggatgagtttcctagaagggccttgctttctgctcttgttgtgtctcgtctttagagtaacaggctcgagagagcacctcagagccaggcagcaccaagccctttctcgatagcttaggaatgattatagtttcccctttcacagagggaagggagaaaacaagcattagagttgcgtgccaggctgtgtggaaggaacttgagtatttgacgcctgctataattctctcaaaaatcctgtgaggtggcagctattgtcttcttttacagatgaggaaaatggacattcaaagcttagaaaggttaaattgggctgggcatggtggctcacacctgtaatcccagcactttgggaggtcgaggtgagcgggtcacttgaggccaggagttcaagaccagcctgaccaacatggcaaaaccgtctctactaaaaacataaaaaatttagttgggcgtggtggcatgtgcctgtaatcccagctactccggaggctgaggcagaagaatcacttgaacccaagaagcagaggttacagtgagctgagatcacaccagtgtattcttgcctgggcaacagagtgagactccatctcaaaaaaaaaagacctggcgcggtggctcacacctgtaatcccagcactttgggaggccgaagtgggtggatcacctgaggtcaagagttagagaccagcctgaccaacatggtgaaaccccatctctactaaaaatacaaaaattagccaggcatggtggcgcaagcctgtaatcccagctactcgggaggctgaggcaggagaatcacttaaacccaggaggcagaggttgcagtgagccaagatcgcaccagggcactccagcctggcgacagagctagacttcatctcaaaaaaaaacagagaaaggttaaatcgcttgtctgagatcacatagccagtctagtaactgttggaatgaatgtcactttaagtccttctattttcagcatttatgctgtctgcattacatgctaaatttttttcttttctttttttttttttttttttttttaaagagatagggtcttgctctgttgcccaggctagaatgcagtggctgaatcctagctcactgcagtcttgaactcctggggtcaagtgatcctcttgcctcagactccgtagtagtaggactgtaagcctttgccaccatgcctggctttcttttaattttctgtagaaatggagtctcactatgttgcccaggctggtcttgaactcctgggcttcaagtgatcctcccacctcagcctccagagtagctgggattataggtgtgagccaccatgcccgacccaggtttcttgttataatatggatatatagatgtgtcttaggcccttgttaccttctcctgtgctgtgacctgttaacagccaactacaaaatggaacttgtttctccatgggaaatgccaattgtagttaatatttattgtgttcttactatttggcatgtgctgttcttagctcctgtgttttattacttcatctcgtcctcatagcaactctcagaaaactgggagattgagttagagttgtgatgtttgggctagaggatgacaagatgagctgctttgtcggttccagatatctccagcccagcagagatggccctctgcagtctagccgtattttgcccttccaccattcttggctgtgacctggtccagctgggccctgaatgaatgtttgcttctcaggccagtattctcccctcctcaccaagccacctccacacagctctaaggaagctcccccaggtccaggcctcaggggagccctgccctcaggccgaccctactgccttttcagagccctccctgccctcctcggaagttgctgatgaacctcctaccctcaccaaggaagaaccagttccactagagacacaggtaagcaatcactttgagttttccagttttttgtttttttggtttaaggcagggtctcgctgttgcccagactagagtgcagtggtgcgatcctggctcactacaacctccactgcctcctgggttcaagcaattctcctgtttcagcctcctgagtagctgggattacaggcgcccactaccacacctggctaatttttgtatttttagtagagatggggtttcactatgttggccaggctagtctcgaactcctgagcccaagtgatccacccatctcagcctcccaatgtgctgggattataggtgtgagccactgtgcccggccaggcttcccagtttctaagtcaaaaaaccaggaaagactgtggatgtggggttggatctgcagcgccggaaatgagtcccagggttgtaggcaggggaggatgtttgatcatctgctggaaggagcagagtggacatcccattataattcgggtgggtgggaaggttctggttgggaggggtggccctggcattccatgctctgcctgctcctaggtcgttgaggaagaggaagactcaggtgccccgcccctgaagcgcttctgtgtggaccaacccacagtgccgcagacggcgtcagaaagctagcaccatcccggccctccgcctcctggccctgcctctatttattgcattctggttctggccgcgccgcgttgctggggtaagggcaagcactggggtcaagagcctgcacacatgagccttccgggctggaaggctggcgtaggacttggggctgtagcatcatcttcctgaccctggcacctgtgtctacttgctcccgagaagaggagcgctcatgtcttttttgcaccccaagttggctggagcatcggccaccccaagattcatctgtgacctccaggcagcagtctctgctccagaatctctggacggagctgctggcagcttctgcgagaagagagagatgtggaaggcaccttctagaagagagcgtgcctcaggttacttgaacttgaacggagactgtagactcccggactttcccctaggactgggggccctgtaggctgctgttggaggactgggtagagacattggagggaagggaagggcttttctccacacaagggcagagagtccgtctagatttcttgctgtcctgccagctctgcccatgcctgaggtggtcctacctctcacgggcaccctagctgctgacagccctttgtggccgccgtccccatcccctgccctcagcacacacatctgcacacacgcagctttgttctcacctctacctgtcattccagcatccctgcctcttgtcacaaactgccccagcaagaatttgaggttctgacaacagtacccatcccccacagtaccccttcagctcagtttctagaaagctcccttttctttgaaatctgcatgttgaattgaactttgtgattttattttttgtttcaaaaaagtttaagaaaatggaaatgggcaacagtgagtgaagacatattttagcactgaatagaatatttttaaaattaaactatttgaaatatgtcctgtt

SEQ ID NO: 962 - DNA, 141 bp, Homo sapiens
gagatggagtctcgctctgtcacccaggctcgagtgcagtggcacgatcttggctcactgcaagctctgcctcctgggttcacgccattctcctgcctcagcctcccaagtagctgggactacaggcacccgccaccacgc

SEQ ID NO: 963 - DNA, 215 bp, Homo sapiens
atctcggctcaccgcaagctccgccacccgggttcacaccattctcctgcctcagcctcccgagtagctgggactacaggcgcctgccaccacgcccagctaattttttgtatttttagtagagacggggtttcactgtgttagccaggatggtctcgatctcctgacctcatgatctgcccgcctcggcctcccaaagtgctgtgattacaggc

SEQ ID NO: 964 - DNA, 3278 bp, Homo sapiens
tttttttacagtatacaggaggatgtgcataggttaaatgcaaatacgccattttctctcagggactcgagcatctgaggattttggtatccacggaggtcctagagccaatcacctgtgaggatactgaggggcaactgtatttcacctttccctcagccttccaggcctctcactttcacaaggtggcatcactgagtttgaggatgcagctccaccttacctcttcagtggctcttctcccacttgcttacaataattgctgtttgcccgcccctctgcctttctctcccttgcttttgtgtctttgtattcccgtcttctgggagaggcttgttgaatgaatggatgataggtacatacacgtgttcaggaaggctcctttttgtctcttctcctcagggccgcccaataactccagtatacacggtggctccaaacgttcagagaattcctactgccgggatctacggggccagttacgtgccatttgctgctccagctacagccacgatcgccacactacagaagaacgcggcagccgcggccgccatgtatggaggatacgcaggctacatacctcaggccttccctgctgctgccattcaggtccccatccccgacgtctaccagacatactgaggctggtgaccagcacgaagacagaccacacaaacaccactgaaggaacgcttgactatttatgaagaaggaacatgttggattcacacatgcaacctgaaagtgaagaatgttagcagatttatttctgaattattttatatacatgaagttttcactagttttttaagactattttcaacttagcatgcctacgttcatacatttccaaaagacttgcaatggttcgtgccttcattccatcttttaaaaatttgtatgctgtactacatttgtatagaggtttttgttgttgtttttttaaggatatattttcagtatgaaggttattttcttaacttctgcactccagagatttctattttgtagtaccttcaataatatatcaactatatattaaaaaagcacacttgaggagctagggaactattttgaaaaatatatacaatatttaaagatacaaacagtagtgcttaaaaatactacataaagcattattttaaaggttatactggaaagtgcaattttaaaatgagtaaaacctctgtatttctgctggcattaagggttgatggtgttaccatgtatcatcatggcggtactattttttaaaagaaattaaacactggatctctccttaagccaacattgaaaagacttgccgcacttctgagtccaaacactggaaagctctcctttgccaccgttagccggggctcattctccatgtgccttagccttaaacatgcccccactcccacatctctcaccctgtcccctcctccccagattcccaatcccaccgcaatgtttggcaagcctaggactgataagtagctctgatagaggagctggtggcttttatacttcttcctgggtttttgttggggtttgttgtttcgttgttttttgtttttttttttgtttggttggggaagtattgtcttctacgtgtgctattttcagtagcagagtaagcacaaggttttaatcgagttgcataagacacctttgcatagctatttaattgcccaatgtaaaactttaatgccatttctaatgcttttattcatttttgaagtatgagtttgtagggacaaagaatgtatgttatcgtagacaagacccccagagactcttttcagcagaaagttatgcttctagttgccttaccatgtttcttgcaaaactgtccatggtcctcaagggtgttggaaacattatgtttattaaatgggcctctcttcctttgctgtgcacttgatgggtgaactggattggggtgtgcacatccaggaggaggaggagagacctgtagaagtttaaagatagtttgtaaatatcttctaatgcttgtttttagtccttttatgttggagaagttcatggtatgtagtttaatgcaaaatgaaaccattttatttcaatgttattaaaaaggtttgttttattaggaagttaatgtattgttgcagtgttttgtgcctgtttaaaggcttttgtttagcagagtgaatgtaaaatacagtaaaatgttaagattgtcatctactttttaaaaaaaaatatcaacttggaattgttttttaaaggctcaatcaaggaagtgaggtgtgcaataaggtagcaagtaaaacgcagttgcgtttttatgtcatgttagagatccatacaattttccactcacgggatttttgttgatggctgaattcttgtggattcataagaggatcatgcccttagcaagtacttttgttttgttttaaattaagagattcccaaatgcctttttccccctcatcttgaaatgagatgagtttttatgtgtaagcaatatttatttaactattctataaaattattgagtgcctactgaggcctttaagcaccgctaacattcctttccatcattcttttaaatgacataaaataattgtgcaatgttcctgatgatgtaccccacaagctgcattcaaactcaaatctgtgggaatgagtgactcgacaaaatgtaattcggatcagatcctcatcccctgactgtgtgaaaaaagtactctccttctagtgaaggattgtcacagagtttcactggatgaaactatgacccagtattcttactgtattttacatatgcctgtaaattatttgcaaaaaagaagaagaagaggaagaaagaaaagaaagaaaagaaagaaagaaagaaagaaagaaagaaagaaagaaagaaagaaagaaagaaagaaagaaaaagaaagaaagaataaaaaaaaatgataacatggcaaccaccaaactcccttaaaaacaaacattggtgacatggccaattaagtatcagtgagcctcctatctgggacttatctgttcctattgtttcaaaaccatttcatgtacactactgaggtaagtttataacttgaaatgtgaacttttttttttttagtgttaagaacaaactatataaatgtaaaaaaaaagttttagagttctgttttcaaacattgctagtggtttagttaactttagctgctttatatttgaaaagcttttatttagatcttgctccatttacagtacattcttaggatgtatgtagtaaataaagctttctttaaagcaatcgcaagacctta

SEQ ID NO: 965 - DNA, 3270 bp, Homo sapiens
tttttttacagtatacaggaggatgtgcataggttaaatgcaaatacgccattttctctcagggactcgagcatctgaggattttggtatccacggaggtcctagagccaatcacctgtgaggatactgaggggcaactgtatttcacctttccctcagccttccaggcctctcactttcacaaggtggcatcactgagtttgaggatgcagctccaccttacctcttcagtggctcttctcccacttgcttacaataattgctgtttgcccgcccctctgcctttctctcccttgcttttgtgtctttgtattcccgtcttctgggagaggcttgttgaatgaatggatgataggtacatacacgtgttcaggaaggctcctttttgtctcttctcctcagggccgcccaataactccagtatacacggtggctccaaacgttcagagaattcctactgccgggatctacggggccagttacgtgccatttgctgctccagctacagccacgatcgccacactacagaagaacgcggcagccgcggccgccgtgtatggaggatacgcaggctacatacctcaggccttccctgctgctgccattcaggtccccatccccgacgtctaccagacatactgaggctggtgaccagcacgaagacagaccacacaaacaccactgaaggaacgcttgactatttatgaagaaggaacatgttggattcacacatgcaacctgaaagtgaagaatgttagcagatttatttctgaattattttatatacatgaagttttcactagttttttaagactattttcaacttagcatgcctacgttcatacatttccaaaagacttgcaatggttcgtgccttcattccatcttttaaaaatttgtatgctgtactacatttgtatagaggtttttgttgttgtttttttaaggatatattttcagtatgaaggttattttcttaacttctgcactccagagatttctattttgtagtaccttcaataatatatcaactatatattaaaaaagcacacttgaggagctagggaactattttgaaaaatatatacaatatttaaagatacaaacagtagtgcttaaaaatactacataaagcattattttaaaggttatactggaaagtgcaattttaaaatgagtaaaacctctgtatttctgctggcattaagggttgatggtgttaccatgtatcatcatggcggtactattttttaaaagaaattaaacactggatctctccttaagccaacattgaaaagacttgccgcacttctgagtccaaacactggaaagctctcctttgccaccgttagccggagctcattctccatgtgccttagccttaaacatgcccccactcccacatctctcaccctgtcccctcctccccagattcccaatcccaccgcaatgtttggcaagcctaggactgataagtagctctgatagaggagctggtggcttttatacttcttcctgggtttttgttggggtttgttgtttcgttgttttttgttttttttttgtttggttggggaagtattgtcttctacgtgtgctattttcagtagcagagtaagcacaaggttttaatcgagttgcataagacacctttgcatagctatttaattgcccaatgtaaaactttaatgccatttctaatgcttttattcatttttgaagtatgagtttgtagggacaaagaatgtatgttatcgtagacaagacccccagagactcttttcagcagaaagttatgcttctagttgccttaccatgtttcttgcaaaactgtccatggtcctcaagggtgttggaaacattatgtttattaaatgggcctcttttcctttgctgtgcacttgatgggtgaactggattggggtgtgcacatccaggaggaggaggagagacctgtagaagtttaaagatagtttgtaaatatcttctaatgcttgtttttagtccttttatgttggagaagttcatggtatgtagtttaatgcaaaatgaaaccattttatttcaatgttattaaaaaggtttgttttattaggaagttaatgtattgttgcagtgttttgtgcctgtttaaaggcttttgtttagcagagtgaatgtaaaatacagtaaaatgttaagattgtcatctactttttaaaaaaaaatatcaacttggaattgttttttaaaggctcaatcaaggaagtgaggtgtgcaataaggtagcaagtaaaacgcagttgcgtttttatgtcatgttagagatccatacaattttccactcacgggatttttgttgatggctgaattcttgtggattcataagaggatcatgcccttagcaagtacttttgttttgttttaaattaagagattcccaaatgcctttttccccctcatcttgaaatgagatgagtttttatgtgtaagcaatatttatttaactattctataaaattattgagtgcctactgaggcctttaagcaccgctaacattcctttccatcattcttttaaatgacataaaataattgtgcaatgttcctgatgatgtaccccacaagctgcattcaaactcaaatctgtgggaatgagtgactcgacaaaatgtaattcggatcagatcctcatcccctgactgtgtgaaaaaagtactctccttctagtgaaggattgtcacagagtttcactggatgaaactatgacccagtattcttactgtattttacatatgcctgtaaattatttgcaaaaaagaagaagaagaggaagaaagaaaagaaagaaaagaaagaaagaaagaaagaaagaaagaaagaaagaaagaaagaaagaaagaaaaagaaagaaagaataaaaaaaaatgataacatggcaaccaccaaactcccttaaaaacaaacattggtgacatggccaattaagtatcagtgagcctcctatctgggacttatctgttcctattgtttcaaaaccatttcatgtacactactgaggtaagtttataacttgaaatgtgaactttttttttttttagtgttaagaacaaactatataaatgtaaaaaaaaagttttagagttctgttttcaaacattgctagtggtttagttaactttagctgctttatatttgaaaagcttttatttagatcttgctccatttacagtacattcttaggatgtatgtagtaaataaagctttctttaaagcaatcgcaagacctta

SEQ ID NO: 966 - DNA, 339 bp, Homo sapiens
tttgttaaatgaatgttttattttattcagaatctcttttcaatgaagcatctcacagaactagttccatggcaaacactttgggaaatactgaaccacagtcttcccattcatactcctgtttgttctgaaaacatcttatgttgcactttcaagtagacagaaggaagtagcaggggcttttctagagccagtggtggccgtcaacagttcaggcaactttacttagcttgtccttgcccacttcttcctcatttggaaactgctctttatccttcaaaactcagctcgaatatccccgctgctgagacattttctccaacttccccattagttggt

SEQ ID NO: 967 - DNA, 339 bp, Homo sapiens
tttgttaaatgaatgttttattttattcagaatctcttttcaatgaagcatctcacagaactagttccatggcaaacactttgggaaatactgaaccacagtcttcccattcatactcctgtttgttctgaaaacatcttatgttgcactttcaagtagacagaaggaagtagcaggggcttttctagagccagtggtggccgtcaacagttcaggcagctttacttagcttgtccttgcccacttcttcctcatttggaaactgctctttatccttcaaaactcagctcgaatatccccgctgctgagacattttctccaacttccccattagttggt

SEQ ID NO: 968 - DNA, 6790 bp, Homo sapiens
cggagacccgcccccgcatgcggaaccgccctctgcgaggcccggtttgggccgtgcgggaatgggcgtggcctgggcggggcgggcgctaggacccaccggagcgccgtgaacgtcaccgagcggcgccgaggccccgggttgagcgggaggcgcgatcggtccggtcggtggctccccgcggcggggccgggcccgatctcgggcgggaaccgagcgcagagccggtactgggggaggggagagggggcgggattcccgccgggagggatccggcgtagcagggggcggagtcttattccaaccccgcttcgctttccgcatgtcccgctttgcgctcccggccctgggcatcccgctgtttccctctgcgtccgcggccctgcccttttcgggggcacagctgtggtctttccaccccgcgagacagcggggcgagggggcgcgggcggccagtggatagaggctgatgcccccaagcacggacgccagcgtgggggtggaggttcttccagctgccctgagcctgtgcgaagcgggaggtccttccccagttcccacagactgtggggagggaagagacggtggaagcgagcgggttctgggctcctgggtctctggaactaccctctgcccttgccccaacactcaggtagcgggaaggatgaccacgctcacacgacaagacctcaactttggccaaggtagggaggctggacctgcgggcccgggggcgggggcgtctgggccggcgggcttcctcgagcgcgccaccggcttgtgcccccctgcagtggtggccgatgtgctctgcgagttcctggaggtggctgtgcatctcatcctctacgtgcgcgaggtctaccccgtgggcatcttccagaaacgcaagaagtacaacgtgccggtccaggtgaggcacgtcccagaaccacagagtgggtacagggtggacttttaaaaattctttggtcgggcgccgtggctcacgcctgtaatcctagcactttgggaggccgaggcgggcggatcacctgaggtcaggagttcgagaccagcctgacaaacatggtgaaaccccgtctctactaaaaatacaaaaattagccgggcgtggtggccaaggcctgtaatcccagctactcaggaggctgaggcaggagaatcccttgaacccaggaggcggaggttgcagtgagccgaaattgtgccactgcattccagcctgggtgacaagagcgaaactccgtctcaaaaaaaaaaaaaaaaaaaaaaaaaaacctcttccacttcgggccaagccacctcattccgcagggccctgcccatgccttccaatgccttccagttccaaagtggtgatgcctacccacccctcagaagagagttccccttgccagaagttagggaccaggcctgataagagttaccccgggggtggccgggcatggtggctcacacctgtaatcccagcactttgggaggctgaggcgggcgaatcacaaggtcaggagttcaagaaaccagcctgaccaacatgatgagatcctgtctctactaaaaatacaaaaattagcctggtgtggtggtacgcgcctgtaatcccagttactagggaggctgaggcaggagactcgcttgaacccgggatgcagaggttgaagtaagcccagatcgtgccactgcactccagcctgggcgacagagcaagactatgtctccaaaaaaaaaagttaccctgggggcatggtggcactttgaaggagctcgtgaagctggtgaaccttggtgtgaggagggtatttccaaaaacctccaaatcttctccctaccatttatcctaaactcaatgggttaaggctaaaaggcagacaaagcagtgtgcatcgcactgtagctccagtccctagaagtgcctgtctctggaaggcactcaggaaacatgagaataagtggtagaagctcaaaggacatccaggtggtccccgcttcaagtccccacaccaccattgttttctcacttccagtatggtattcaagacattacttgaggtagtcagcactttattttttattttatattttattttattttattttttgagactgagtctcgctctgtcgccctggctggagtgcagtggcgtgatcttggctcactgcaacctccacctcctgggttcaagtgattctcctgcctcagcctcccgagtagctgggattacaggcgtgtgccaccacatctggctaatttttgtatttttagtagagacaaggtttcgccgtgttggccaggctggtctcgatctcctgacctctggtgatccacctgccttggcctcccaaagtgctgggattacaggcgtgagcactttattatgaaacaggttttgtgttagataatgttgcccaactgtgggctaatgtgttttgagtgtgtttaggtaggcctggctaagctatgatgttctgtatgttatgtgtattaactgcattttccgctggcgatatttgattggtttatccaaacataaacccatagtaagttgaaggtcacctttagaggggaaaggaaaaaacaattgacatttactcacttcttctttatgatgaagtgattgaagcccagagaagttaaggaatttgcctgaggccacacagttccttagttcttaacttttgacatctgattacattttcctggatcctttttctggaaaaatgcccaagtgcacaaagatacaactttagggatttttcagactctggaggagtccatggaccccacattaagaacccctaatggtatattaaatgctcatattgggattgagttcttatctttcttttcctttgagatggagtcttgctttgttgcccaagctggagtgcagtggcttgatctcagctcactgcaacctccgcctcccaggttcaagtgattctcctgcctcagcctcccaagtagctgggattacaggtgccacctcacctggctaatttttgtatttttagtagagatggggttttgccattttggccaggctggtctcaaactcctgacctcaggtgatccacccacctcatcctctcaaagtgctgggattagaggagtgagccactgtgcccagcctgagttcttatcttctaacttctttctctatggataagttcacagttcttagcctctggtttttttttttttttttgagatggagtctcgctctgttgcccatgttgcagtgcagtggcgtgatctcggctcactgcaacctccgcctcccgggttcaagcgattcttttgccttagcctgccaagtagctgggactaaggtgcctgccaccatgcccggctaatttttgtatttttagtagagatggggtttcaccatattggccaggctggtctcgaatacctgaccttgtgatccacctgcctcggcctcccaaagtgctgagattataggcgtgagccaccatgcccggccagttcttagcctcttgagggaaagtggggtctcctgggtagggagccctggagagctgctgggcctcggaccgaaggcagatggggccttaggctcctggttgtgttgggtggtttccccatctgtgctttgggcctcacgagccgcatggtattgtgtgcagatgtcctgccacccggagctgaatcagtatatccaggacacgctgcactgcgtcaagccactcctggagaaggtgagggtgcactgggctccccagccatctcaccccatgctcacccccgtccctgtgtgctcacagtccaactctgggatggggtgaagctaggactctgtggggtcttcatggctccaatacccagaagcctgttccctgcactctggagaccatcccaacccaggggcaggccccaaggcatgcgggccatgttcagggtgccttgggcctgggagcccgggttggagctggctctaagtaggggctgccccagagggttcggggttcttctcacatccgtcccctgttctccacgctaaacgttctgtctgagctgagcccctcagggtttcttccccatctagtcctgatctcagacttcctgggaccttccctatggggcccgggcattctctcagcctacaccactcatgctggagggtgccggcttctcaaactcgctatctggcctcttggggacccccagcctagcagctgagcagggctgtgagtgggccgtttctcctccttccttgggcaagggggtggaggcagggtggtgtagtcggggtggggtgcctggctctgcagtgggggttcctctctttgcagaatgatgtggagaaagtggtggtggtgattttggataaagagcaccgcccagtggagaaattcgtctttgagatcacccagcctccactgctgtccatcaggtgggctgcccctgcccctcgcccactagctggcatcaggtgtgtctctggcaacacacccacccctttaaggcggcccttgaataccttggtaaaggcctgggaggagaaagggcaagaagcaccagcatgacaaggggacagcctgtgagcagctgagatgggtccagagagatgacatgagctacccagggtcacctgggtgggggcagagcccaggacacagaagcagttttctgactccccaggcaagtgtccagtcaactcgaagttgacctctggcacatgcgttagttggtcaactgcatgcttccaatggtgaggtcagggcactggaatctggcaccaacctgtccccacggcctgtgtggccttaggcaagccctttcccctcctggcttggtgtcctggttctgggtcctggctgcacattaaaaccacctagggaggcctcctcaggctgcccctacctcccctgtcccctaccccccgccgaattctgactttatctggggtggggctgggcatttcttttaaactcccttgctggtttaattgtgtggaccggatagggagctgggtcctaggcatgcagcactctcacaggcactggagggggtcttgtaccccaggtctgcatccaggcttgatgcctgtggtggaggggagggcgccagtgtgatgggaagacctcctctcactcccagctcagactcgctgttgtctcatgtggagcagctgctccgggccttcatcctgaagatcagcgtgtgcgatgccgtcctggaccacaaccccccaggtgtgtccactccccaccctctcttcccttggcatttccatggttatctcgggttggtctgtgttcccaggtccatgtttggctgttctgagactcatctcttcctaaccctgagagtccacctcctctgggaagcttccctgattgattctacctggcttccatctccctattgactggggcttttcttagcacttgctttgccatctgctctgggggtgctgctgagccagcaagggaagtgggaagaggctgggcccagtggctggcaccagggcggtgggggagcctccaccaacctcttgcctctccaggctgtaccttcacagtcctggtgcacacgagagaagccgccactcgcaacatggagaagatccaggtcatcaaggtgagatgagatgggtctgggtctgggcgcaggctctagaaacgtgatgtcgcagttccaggcgggcaggggcactgcctgtggccagccacccattacattggtgtggcagcgcctggcacccagcaggtcctcaggcctgtccactgctccatctgggcacttggggcagtgaggagcccaggtggagccacctactggggcccccagctcatcctggctcttctgaagtgggggctctccagggaggggtcctagcccaccaggttcagcgttggtgcctggagcctgttcgtcacttgggttctatggacttggcctctgtgggggatgggggcggtcctggggtctgcatcaccaacagcttcctagtgattctgaggctcaggttggaggcccctggtctggagtgggagggacagcaaagtgagggcaggccagggcccagccccgtcacccccctgacctttgtctcctccctaggatttcccctggatcctggcggatgagcaggatgtccacatgcatgacccccggctgataccactaaaaaccatgacgtcggacattttaaaggtgagcttcgtggggacccgggaagctttatttaggggctgcttaacgaagtgaggcccggtgctgaggccttactagagggcttgcgggagagaacgggggagtgcctggtggagggctcctcccatctctactcttctccaccatggctatggccacgaggccccacctgtggtggaggtctgcccaccaggggcttctgtgtcctccagcagggatgccctggctgtcttgctgactgtggctgtttgcttgtgtccgtcagatgcagctttacgtggaagagcgcgctcataaaggcagctgagggggcacctgccaccccactgatgcccaaactgtcagactttgggggatccccgcctagggcagtgctgcatggctgccctgattccaagtgctcttatcgcctctgtgtgtggatcgcccgccccagcccggggccgctcaggtctgcttggaggatgcctcccccaggagggcagtgagggatgccgcaacctcgacttctcagcctcctggggttccgccggccaacactgtctgtctcaaatactgtgctgtgagttgtttcaataaaggggccccaagggctgggctgagctg

SEQ ID NO: 969 - DNA, 18902 bp, Homo sapiens
  misc_feature (4483)..(4483): n equals a,t,g, or c
ttttactgaaaacatttattttttatttatttattattattattattttatgagccagagtctcgctctgtcacccaggctggagtgcagtggcgtgatctcggctcactgcaagctctgccttccgggttcacgccattcttctgcatcagcctcccgagtagctgggactacaggcgcccgccaccacgcccggctaattttttgtatttttagtagagacagggtttcaccgtgttggccaggatggtctctatctcctgacctcgtgatccacctgcctcggtctcccaaagtgctgggattacaggcgtgagccacagtgcccggcctgaaaacatttattacaacaaaacgtcagagctatgtgacagtaagttaccacaagctggtagggttgaaccggggcaggagtcgctggtacagggacctcactgcccaccccatgctcagctcctgcctggaggaacctctggctgacccagacacaggatggacagctgtcagaaaatctggacaacagctcggtagggcgattgggcagcctcctcctgtccatgcttctgcccaggctgagcctcggaggaggcctggttcctggtcatcttggggctgacgacaatgctgctgttggtgactcggggcccataccagcctgcccagtactgggtgtccctgcccccatgctggaagaggatgtagcggacaccccgggggtagtctgagaaggtgtaggagacctgttgggaggaagggagaggaagtgaccaccgggacgggggaggggaaggcaggagccaggtcctctaagagagctgcccaggctggaaggcaacagctccaggccagcaggggcaccctgggccctgaggctgccctttgcttcctgccatcctggccctgggaggagtgggtagagagagcaagtgggtgaggcctcacctctgtccatgtggcattgttccactgttggatggtcacaggtgggggctcgaaggaggccaacacgaagtagtcagccgaggccagctgcactttgagttggtaggtgcagccacagtcggctctggcagcaaacctggtggaggggttgagagccctgtgtccaagccaccgagggctggccccaggggtgggggcaggtgggacctatacattggagctcggagcttcatctcccatcagctgacactgctctgcctgcaaggcccagctggcttcagcgctccctatgccccactgtggcccggggataagctgtctgtccatgctggcctctgttaccccatctgagaagagggacccttttgggcatcctactaaagatatgacctcaaaaatcaaaagacccctccagagaggcctggtctgtccaagccatgtcacctgtacttacaatggaccaggctgtggattcagtgggagagtcaagggggtggcctgtgtaatggggctggcacaaagctcaccctctgctcagcccagccacctctcccccctgcagctctgcatacccctccatcctcaccgctttatcctcagagtggcagccctggggcctgcctagaactggggtcctgcttctgccaccggccaagccagagcctggcacagttctgtgcacagagtaggagctccaaaaagagtcatgggatgaatagggaaaggggcaggggaggcaggtaggtcaggggacctgggggttcccacccagtccagagagggctgaggtcctctgttgcccaagtgcctgtcagtgcacagtggctgggcacagtggctcacacctgtaatcccagcactttgggaggccgaggtgggtggatcacttgaggtcaggagtttgaaaccagcctgaccagcatggtaagacgctgtctgtattaaaaatataaaaaaaaatagccgggtgtagtggtgggcacctgtaatcccagctactcaggatgctgaggcaggagaatcgcttgaacatgggaggcggaggttgcagtgagccaagatcacgccactgcactccagcctgggtgacagagcgagactccgtctcaaaaaaaaaaaaagtgcctgtccatgacagtgcacctgggggcctcagcctcctcacctgcacactggggctactgtgtcctgttgactacgtcacagggtggtggggaggccaggaggtgccgcagggtgtgggtgcagagcaggggcggaggccggggctacctggctccagggcactgctgtgcagagtgggcacttgctatgggttgtctcacgtacatgcagcgcagtaagaggagcatgtagagtgtggggacacaggccatggaccctactcaccagtccttaaccacgatgtccggccggaatgtgtctagtagctcctcccagtagccctcggctacaaggtccaccagctgggacttgaggcacattctggggagcagagttgggggcttgcatacctgggtgtgctctgcatggccccccccctcacccaggccttggcagcccctgtgagcccagggaggtggtttggggacctagggtaccccttggccgctgcgggacaggcactggctggggctgactctggcttttcctccagtgcaggagggagtttgacccacttgtgcctgggcggcatttgatcccagtccaaaggcccattgttccagggcacttttgtaaactcaagttcctagcttacggacagatgcctgtagatagccctggcttatcttaactgcccaatggactcctggcctgcttcagtgatccccacccccactgtccattaacacagcactgagtgatttcaggaagcagtgactctgggcaagttttggggccacctccctcgagcttcgcagagaggacttcccttaggaagactttgcctgagacttggcaaaggtgtcctgaccctctgtcccctccacgcaagcctggtaggttcagtttgccttactcgtaggatgtgacaaaatacttcttgactttggggtcaggaaaatctgtcccgtgggctccagggaggctctccaccttccagcggtccccaccattgaaatcaatttgccatgcaaacatatcctctaggaagaacagaagccaaggtgagaccccctgtgtaaatccaaagtccagccctccccacttagtcccaggagggcgggagggagggtggttggcgttagtgaccttcttgggaggcaggacttgctcatgctcaggtctctgcggctgtggacaccaaagggttaaccagcttgttccttctcaagggcattgtgtggccaaggtaccccaccagcccaagtgtaccccaactgcaccttggagcacccctacaaagcacccctccaacacattcccaactgtcctcaccatatcagctctgatctgactctgtccctcccactcagtcccaaactggcctcactcctaacacgcagctggagaaaagaatgcgtgttaccagaaattctaaaccaaccccttcctcacttccatgttgcggtggaactctgggaaatacccaagtatcagttctcaaaaaattacgagaggcctgtgagagtactgtcctcaaagactaatgtgaagccgggcacggtggcttgcgcctgtaatcccagcactttgggaggccaaggcaggtggattgcttgaacccaggagttcaagaccagcctggggaacatagcgacacccccccccccttttttttttaataagtaaaataattttttaaaaaaggctaacgtgttcatcccaacacagactgcttacttgacccagatggcatcccagatgtccaggagggagaggcccttggttaactacataacccaggttggaggccctagaggatgggtttgtgggtttgtcggtgggtcatgggaaccaagattcccatagggctcagatggcctctgcccagggcaagagtgccaagtggaagaacaggtaccctttgggctgggcgctgtggtaacattcatgggtgggcctccattaggtgggcctggtgggtgcaggggagcaatcaccctcttcacactgaacttagaggaccttagaagacaatggcgcttctctactggcgctgcccaggcaatcaccagggcacttttttttttttttttgagacggagtcttgctctgttgcccaggctggagtgcagtggcgcaatcttggctcactgcaagctccgcctcccaggttcacgctattctcctgcctcagcctcccaagtagctgggactacaggtgcctgccaccacgcccagctaatttttttacatttttagtagagatggggtttcaccttgttggccaggatggtctcgatctcctgacctcgtcatccgcccgcctcagcctcccaaagtgttgggattacaggcgtgagccaccgcccccggcggtgtggtggctcacgcctgtaatcccagcactttgggaggccgaggcaggcagatcacngaggtcaggaattcgagaccagcctggccaacatggcaaaacctcatctctactaaaagtacaaaaattagctgggcatggtggtgggcgcctgtaatcccaactacttgtgtgtgtgtgtgtgtgtgtgtgtatgtatatgtatatatgtatacacatatatgtatacatatgtatatatacgtatatatgtgtacatatatacatgtgtatatgtatacacgtgtatatatgtatacatgtgtatatacgtatatgtatacatatgtgtgtgtgtgtatatgtgaaggtgtcactgtggatgctatagtgtggcaaacaaggtccatttggcccctggagcttgaagtttgtagcagaaaaaaataaggaaattctgaaaaaaaaattttttttttttttttgagactaaaagtttcactcttgtcacccaggctggagtgcaatggagccatctcggctcaccgcaacctctgcctcccaggttcaagtgattctcctgcctcagcctcccaagtagctgggaattgtaggcgtgggccagcatgcccaactttgtgtgtttttagtagagacagggctttgccattttgaccaggctggtctctaactcctgagctcaggtgatccgcccatctcggcctcccaaagtgccgggattacaggcgtgagccaccgcgccttgtgaaaagtgttacagggcatgaaatgggggtgctatgctagaggtggagagggctgtttttagattgggagcacagggcaggtctctgaactgagacctgaagaatgagaaggaaccaaggaagtgaggtgggtgtttagggttagagaatattccaggtagtgtgggaattgcaagtgccaaggcccaaggatgagaaggaacgagcctggtggcagcctccaccctgcccccatgccaccttcagcacacgggttgcgcaggaggttcctatgcaggctccgtaggaagtagaagattttccagtcggccacgggctggtcccagtccttggtgatgaagccctctcgcaggcacttgcgtttccagagggtcatgaggtcgatgaggtcccgccagaggctgcagaccaggcggcagttcagcagcagctggcgggcgggcacgtgcgtgaacagctccagcaggatgttctcgggcagctcgttaatgctgtccagggctgctttggagtggggagcatccatggcctgtgggggcaacagcagttatgagcctgaccagggaggtgggccctcaggtccccagggaaccaggccagggactcctctccaaccctgcattagccaggtgtggtggcacatgcctggagtcccaggtacttgggaggctgaggcagaggatcccttgagcctgggaattcaaggctacagtgacctatgatcgcgccactgcacccctgcccgggcaaccaagcaagactctggctaaaaaaaaaaaaaaacccacaaaagagcatttctgaggctgagggtccttccagtaaacagtagcccctcagtggaaagagtagtcatgggacacacattcagaagagtgcaatacaaatagtaaagtctttagagacacattttttaaaaggcccctccccaatttaaaaaaaattgcttaattttaaagccagtgggttgtgtggactgtaagattttgtggaggccacacttgtctgcaaagttctgtgagggttttggtgattgttattttaatgctctggattcactgttagaatataaaatctttttttttttttttttgagacagagtcttgctctgtcacccaggctggagtgcagtggtgcaatctcggctcactgcaacctccgcctcctgggttcaagcgattctcctgcctcagcctcccgagtagttgggactataggcgcatgccaccatacccagctaattttctgtatttttagtagagacggggtttcatcgtgttagccaggatggtctcaatctcctgaccccatgatccgcccacctcggcctcccaaagtgctgggattacaggcgtgagccaccgtacccggccagaatataaaatcagttttacatcccagactcattaatgttcatttagtggtgagctagcgctgagaaaccaccttcctatctccagaagcttactttggcctggaagtcacatgtgataaaacaaccccatgggaatcccccacggcacccggctgagctgtctttggtgtcaggccagaatccacttggagatggccggaaaaaaaaaatcagatggagggtggctgagaagactgcctgggtttgaatcctggtctgcagtgaccagttgggaagctgtgaaaaggagggggtaactgtcccgaccctggaagggccaggaggaccaagtgaagcacagagcttcagtcagcattgctgtcagcacaaaccggctctcaacactgtcctccttgtacctctgcactgcgcacgggttctggaaaacttcaagcagtgccacagccctggcctgaatctgttacctgggggcacctggttagtcctcttaaggggatcccaggtacttgccccaggtaggtgggggttggccggcagccagggctctgcactgtcactcaggtgggcctcatctgcttacacatgaggagagaatgttctccacctacaagcagggaaacagaaccttgctggcctctttttttttttcttcccccccaccccgagacagtttcactcttgttgcccaggctggagtgcaatggcgtgatctcggctcactgcaatctccacctcctgggttcaagcaattctccagcctcagcctctcaagtaactgtgattacaggtgcccgccaccacacccagctaatttttgtatttttagtagagacagggtttcaccatgttggccaggctggttttgaactcctgacctcaggtgatccacccgcctcagcctcctgaagtctgggattacaggtgtgagccactgtacccagccttttgctgtggcctcttctgattttccatagaggcttggccaaagcagcagttcatggtcttctgaaggctcccatctcagaaaacaggagggtgggtgcatgctcacttctgcccagggaggaacactttacatggcagagaaaacaggtgaggtacttgtgcctcgtgaaaaatgctttgcaggccgggtgcggtggctcaagcctgtaaccccagccctttgggaggccgaggggtgcggatcacaaggtcagaagttcgagaccagcctggccaacacagtgaaaccccatctctactaaaaatacaaaaaaattagccaggcgtggtggtgtgcacctgtaatctcagctactcaggaggctgaggcaggagaatcgtgtgaacctgggaggcggaggttgtggtgagccgagattgcaccactgcactccagcctgggtgacagtacaaggcaccgtctcaaaaaaaaaaaaaaagaaaagaaaaaaggctttgcaaccttggcaacacagggaggccccgtctctataaatagtgaaaaaattcgccgggcatagtggcgagtgcctatggtcctagctacttgggaggttatggcgtcaggatcttctgagcccaggaggtcaaggctgcagtagctcacaggtgtgagccaccgaacccagcccctcagatttttctaccttacagtccatgaggcctgccgaggtcacactctagggaaagaaggagcctgctggagcagagtgagccatgattgctccatggcactccagcctgggcaacagagcaaaactgtctcaaaaaaaaaaaaaaaaaaaaagagaaaagaaaaatgctttgatggaaaaaaaaaataacaaaaaaacccaatgtggccaagtcttctaagttctgagaagcaactgtaagcatttgaaaaaaaatgtaaaagttgtcaattaaaaatgcttgtagtctaggcaacatagtgagactctgtctctagaaaaaaagaaattaggtcgggtgcacagactcaggcctgtattcccagcacttcggtaggccgaggcgggcggatcacaagatcaggagttcgagaccagcctggccaatatggcgaaaccccgtctctactaaaaatacaaaaattagctgggcgtggtggcggacgcctgtagtcccagctactcgggagggtgaggcaggagaatcacctgaacccgggaagcggaggttgcagtgagccgagatcgtgccactgcactccagcctgggcaacagagtgagaatctgtctcaaaaaaaaaaaaaaaaaaaaaaaaggccgggcgcggtggctcacgcctgtaatcccagcactttgggaggccgaggtgggcggatcacgaggttaggagatcgagaccgtcctggctaacacagtgaaactccatctctactaaaaatacaaaaaattagccgggcttggttgcaggtgcctgtagtcccagctactcgagaagcaggtgcctgtagtcccagctactcgggaggctgaggcaggaggacggcctgaacccgggaggcggagcttgcagtgagctgagatcgcgccactgcactccagcctgggcgacagagcgacactccgtctcaaaaaaaaaaaaaaaaaaaaaaaaaaagaaattagctaggcctggtggcccgtgcctgtagtcccagctatgcaggaggctgaggcaggaggaacgcttgagcccaggaagtcgaggctgcagtgagccgtgatcatgccactgcactccagcctgggtgacagagcaagactctgccataaataaataaataaataaatgctggcagcttctaaaggcactgtctagactctagacgaaataaaagtcactgggctccaagctagaggcatctaggcaccaatagcttcccaccgtggtgaccgaagtctggtctctggcccagtccgcattttcttgcgccccttcccccccccggccctgggcattttgtggtggggaagtccatgccagccctaggaagccctctcacaccgatcggggtccccaactgcccggcccggcgtctcgtgctcgccttctccgcacccaccctcccagcaagctctagtggcattgttacttcaccggtttctcggaaacagaaactgtggctggggcaaggcaagcgccggatctcgcaggcgtgtgggggcctggaggtcccttgacagttctccgaacccggcgccggcctcgggatgtggccggggtggaggcggccgcagagcctccgcctgggtggccccggggccaggcccccagtcgaagtccgggcccagccgcccgcgccccccacccctggccgcccggaccagcgcccgcaggctccgtgaacgcccaggcgccggagaccccggctccccactcgcccgccgcccgtccccccggggacgcgacctgggcgcagcggcggagctccaggtcggcccgagcctacggcctcggcttcgttgtcgctgggccccgccgccgcgtcacgcgctgcgctcggtccccacccccgccccggaccccgctgccgtccctctcggcccggcccctaaccctcgccgcgggaagacgaacctgggatccccagggcccgggccctcgctgcggcctgcgtgtcctgaagctgtctccccctccaggcggcgggcggctcagcacccacacctgcacccgcctcctacgcagggccgaagctcccgaacgcgcggccgctccccggacctccgcactagttccttccttatgcggcccagggctccacccttgacccgcggtcccctccctagaggcaggacctgacacccagtgggctccttctttccctagggcgtgacctccgcaggcttcatagactcaaaggtaaaaaacctgaggtgctaggaggtggctaacgcctgtgatcccagcactttgggaggccgaggtggggaggatcgcttgaggtcaggagttcgagaccagcctggccaacatggcaaaaaccctgtctctactaaatatacaaaaattagccgggcgtggtggcacaggtctataatcccagctcctccggaggctgaggtgggagaatcgcttgaacctgggaggctgcagtgagtggagactgtaccactgcactgcagcctgggcgacagagccagaccttgtctcaaaaaataaaaaacctctgaggttttttatcaggattaagttcatgaatttcttccatcagtcaacaaatatttagcaagcaccttgttcaggcaaccaccaagggttgtgcaggctgtgtactgcacaaggggactggcccaggacacattaattgcagtcagggctacatgttctccgtggaaggccgtccttttgcagtttgccatgggctggtgggtggtgatcctgccctggccaaagcccttatctagctcacccttgactgagatagctaaatgtgaggagtacttattgagcactggattatagtccatgttcacactgctataaagaaatacccgagactgggtgatttataaaaggaaagaggtttaattgacttatagttccatatggctggggaagcctcaagaaacaatcgctgggcgcggtggctcacgcctgtaatctcagcactttgggaggtcgaggtgggtggatcacgaggtcaggagattgagaccaccctggccaacatggtgaaactccatctctactaaaaatacaaacaaaattagccgggcatggtggtgggcgcctgtagtctcagctactccagaggctgaggcaggtgaatggcgcgaacctgggaggcagagcttgcagtgagctgagattgcgccactgcactccagcctgggcgacagagcgagactccatctcaaaaaaaaaaaaaaaaaaaagaaaagaaaagaaaaaaggaacttacaatcatggtggtggaaggtgaaggggaagcaacgaccttcttcacatggcggcaggagggagccggggaaaccgtcacttgtaaaaccatcagatctcgtgagaactcactcactatcatgagaacagcatgggggaaaaccgctcccataatccaatcacttcccaccaggtctctccctaaacacccaggattaccattcaagatgagatgtgggtggggacacaaagcttaaccatatcacgcaccaactgtgtgccaggcaccattctaaatgcttcggcttcatccaatgtccgtaaagctgttggcaaagagtaacaccaggaggcagagcctgggtggcactgctgatctggcacaaggtggactcaagagctgcccagagatgtccacacaccccaaccccagcctgtggctgggcctccagaggaagccagcagtactggacggctgccaggtgagatacctgcagctcactgaggggtctgcccatgaacctgtttctgtgatggcctggttcctgaaatgccaacccctctgtaccttagacagaagccatgccattgtaccatctgcaggtccaggcaggaccacctaaagtctgcctttccttccagaaaccacagggcacaggttagactgggcacaccttttatttggctgcatgcagtagggcgaagtcaggagaacactgctatctttccagcaggacaagaggcaagttccaagggtggttggctgggagacagaggtcttgggaatggcagttctaggggtggggtgggggcttggaatgctctccaagccagagggggccgggcctggatttgggaggtggacaggggattcttcaaaccccctaccatactcatccagggctcatgtgtccagctgtcagagcaggtcccaatcctgctccccatctaccctgggacatcctgtacaggattccctcagtcctctgggaacctaaccccacctggtacccatctagcttctggggctccactgacagtgaggacagtccacacccgacctggaccccaccccaccctgggtctgtccatctcagtcccggcctgagcctctgggccaaagccacctcttctgagcaggcaggcagagcgagagactgggagcagcagacaggggcagagcacggcccatgagcccaccctccacttcccagattggtcagagttacatggtcacctccctgcacctgcaccatcagggcagctgcaagcttgccagttgtcttgcctgtccctgctccgagggtcaaagaacacaggtagaatggtcccaggaggggaagggagagacagatccaggctggcctccaagctcgactttctgaggggcccaggggaacatgctgcacctcccacatctcaggtgctccgtctctgaaaggggcacacgcaggcttccccggccatcattcaggtcaagacctttcggggagagctggcccgaccccagcatgcgagggctgcccacactgagaggctccacaaagaagaggctgctaggggcaagggttagaggtctggggacacctggcctccacctccccttcccaagcccagcccttttctgacagcagttgtttaccagtcagggttcagcagatgggggctcagggggtgtcagggcagcgggggcccgatggtgatgctgctgttggtgaccctcgggccgtaccagccggcccagtaatgagtgtccacgccgccgtgctgaaaccagatgtagcggacgccgggcgggtagttggagaatgtgtgggagacctggcagggcaggtagaggggggagaaaggtcaagggagctgactcaggctgggtgtggcggctcacaccgggaatcccagtactttgggaggctgaggtgggagggttgtttgagcccaggagtttgcaactagtcttgtcgcaaaccagagagtgagataccatctctacaagaaaaaaaaaattagccaggcatggtggtgtgtgcctgtagttctaggcaggctgaggcaggagtacaggctaaagtaggagttcaagactgcagtgagctgtgatcacgtcactgcgctccagcctgggcaacagagtgagaccgtgtctctaaaaaacaaaagaaataaaagatgagccttaacaaaaagggtgggagcagactctgagtgtggcactgcctgaggggggcaggggaacaaggaaggggctgagttcttggtgccagctagaaatcagtggagttctagtttgaactctgtgatttgggacagaccaattcctttctctgtgcttcagtttcctcatctataaaatggagcaaaatcctgctggtctactccacaggattatcattcagcccaaaggaatggaaagaaactgcaagctgccaaaggatgtccaatatactcatcacggggcacatgtattatttaggttaaaattaagtaaaagtgcccggcgcggtggctcatgcctgtaatcccagaactttgggaggctgaggcgggtggatcacctgaggtcgggagatggagaccagcctgaccaacatggagaaaccccgtctctactaaaaatacaaaattagctggcgtggtggcgcatgcctgtaatcccagctactcaggaggctgaggcaggagaatcgtttgaaccgggaggcagaggttgtggtgagctgagatcgcgtcactgcactccaacctgggtgacagagcgagactccgtctcaaaaaagaaaaaaaaattaagtaaaattagatgaaataaaaaattcaggtactcagttgtactaggaactggctcttactaactgttcagtggtcacatgtagctactggctaccttatggatagcatagacacagaccatttctatcactacagaaagttctattggacagggctggggttggcaaacgatggcctgcaggcccactgcctgtttttataaataaagttttactggaacatagccatgtccattcgtttacatattgtctagagctgttttcacacaacagcagagttggagagttgagtaattgtgacagagacaatgtgacctgcaaagcctaaaatattcgtatccgccattttaagaaaacatttgctagggctgggcacagtggctcatgcctgtagttccagcactttgggaggctgaggcagaaggatgacttgaggccaggagtgcgagaccagcctgggcaacaaagcaaaactccatctctacaaaaaaaaattttttttttaattagtggtggtgcacacctgtactcccagctactcaggatgctgaggcaggaggatgacttgagcctaagagtttgagtctgcagtgagctatgaatgcgccagcctgggtgacagagaccctgtccctaaaaatatgttaagtaaattaaaacaaacaaacaaacaaacaaatatttgctgaccccagtctagaaaacagtagtaatcaatactagtaattagtaacagtcagtcaaccttttggaattttttttcttttcttttctttttttgttgagatggagtttcgctcttgttgcccaggctggagtgcaatggcgcgatctcggctcacggcaacctccgcctcctggattcaagcgattcttctgcctcagcctcccaagtagctggcatgtgccaccacgcctgggtaattttgtatttttagtaaagacggggtttctccctgttggtcaggctggtctcgaactcccaacctcaggtgatctgcctacctgggcctcccaaagtgctgggattacaggtgtgagccactacgccctgccaaccttttggaatattttttggccctggctttgccagcatcatttcactgatttctttcagagctctatgagggaaacactatatacccattttacagaaacagcgagtgaagctcagagcattggaagcacaggtgagaaggtgcagagcttggatctgaacctaggccccgtctgaccacagcctcagccttggacgatctgcctctgcccccgtcccccaggcccacgcacctccctccacttggcatcgctcttctgctggatggtcgccgggtctggctggaaggtccccagaggcgcgtgcgcggacgacaggagctgaacgcacagctggtacttggacccgcaatctggcctggctgcgaacctgcagggagagggagggcccatcagggcctcggagattgggggcagggcgggggtggggcgcctgattggcatgccccaccccagaccctcgccccaggcactcaccagtccttgacctcgatgtccggccgtgtggtatccatcagctcctcccaatacccttcggccttgaggtccaccacctgggacttgaggcaggtgctgggggcaggcagaggggtgggaggggctgggctcaccactagggcagtgaggggctaggactgccccttccagggtgggagagaccccagggtaaattgatttgggctttcccctaccccaagtccccggatcttactaatatgaagtaacgaagtatttcttgacctggtcattggggaattccttcctctggtctcgagagagatcctccaccttccactcatcgcctccattcacatccaggctccagaactcgaacccctctgatggaaaagcagagttcacactgaagggaagcccctcagtggccgccttctcccaaatgccccttcctccccactcctctgcctgcatcttggcggctgccctcaagccctgtgctgtgggacgctgcagatcacagtgcccaccgcgtattaggtgcttcctgtgttgcaggcacagggaggtgacttccctgggggccctgagacacatggtgatggaaatgaccagacctcttctgtgatggagaacgctctgatgtgggccagacagacctgggtctagtcccagctctaccagtactcggttgtctgaccttggaccagttgcttttcctctctgacccttggtcgtctcctctgtaaactggagtaagaataggggctgagaagcatttttggcaaagtgccaaaatgttttaggacttgtggcccacatactatctctattgtatagtttttttgttgttgtttcttttcctataaccccttaaaaacacaaatctttttttttgtttttgttttttgagatagggtttcgctcgtcacccaggctggagtgcaatggctcgatctcagctcactgtaacctctgcctcctgggttccagtgattctcctgcttcagcctcccgagtagctgggattacaggtgcatgccaccacacctggttaatgtttgtatttttttgtagagatggtgtttcgccatgttggccaagctggtctcgatctcctgacctcagatgatccacccaccttggcctcccaaagtgctgggattacaggtgtgagccactgcacccagcccagctgccttctgtgatggacaaagctctgatgtgggccagacagacctgggtctagtcccagctctaccagtactcagctgtgtgacctcaggccagttgcttttcctctctgagcctcagttgtctcctctgtaaactggagttaagaataggggctgggaagcttttttggcaaagtgcgaaaatattgtaggaattgtgggccataaactatctctattgtatagttttttgttgtttcttcttcttctttttataacactttaaaaatgtaaaaacaattattagaacaattattaatgcctcagccagatttggctcatgcacagcttggaggagtggttttattatcattttgctccagaatttggtcatgttgtggaaaatgaggttcccatgccatcccagtgtcaacccaacaacacagcaagcaaggatcagtggaagccttgctttacctgttgttgtaacatactgagaagacgactggatctcccattcttccacaagcaaaacccctttggccttctgggaccatgtcagtaggcccaaccctggagcctagaaactaggccaacaaaatatggctctgacttcctggccttgtgtcttgagcagaattagtctcagttggccaacattccctcgcctaggaaaggtcactggggaaataatcttaagagcagaataagaggccgggcgcggtggctcatgcgtgtaatcccagcactttgggaggccaaggcgggcagatcacctgaggccaggagtttgagaccagcctggccaacatggtgaaactgtgtctctattaaaaatacaaaaaattagctgggcgtggtggcgggcaccggtaatcccagctactcgggaggctgaggcaggagaatcgcttgaacccaggaggtggaggttgcagtgagccgagatcgcaccattgcactccagcttgggcaacagagcgagactccatctaaaaaaaaaaaaaaaattagccaggtgtggtggcacatgcctgtaatcccagctacttgggaggctgaacttgggaggtggaggttacagtgagccaagattgtgtcactgtactccagcctgggtgacagagtgaaactccgtctcaaaaaaaaaaaaaaaaaaaaaagagtatagtaagaataagaaacaccactcttggcctcagtttgcccatctgaaaaatgtgtgcactaacagtagctacctctttgggttactgtgagagaagtaaaggtgttaaaccatccaaagtacccggctcatactaagtgctcaatacatgttcctggtgtcatgactgtgtactggaggcatgccagacccggcctgtaccccaccttcagcgcacgggttgtgcaggaggttcctgtgcaggctccgtaagaagtagaagatcttccagtcggccacgggctggtcccagtcctcagtgatgaagccctctcgcaggcacttgcgtttccagagggtcacgaggtcgatgaggtcccgccagaggctgcagaccaggcggcagttcagcagcagctggcgggcgggcacgtgcgtgaacagctccagcaggatgttctcgggcagctcgttgatgttccccacagccatggcttgtggcttctggacaccctcctgtagctgttgaaaagctatgctgcaggcctcatccctgctctgccatttatctcgggagagcatggtgcctctcccagcctgtttccttctctgtaaatggatgccttacctccaggggtcactggggcggtccaaggagcttgggacacatcaggtactttaataaaaggtgagctctgatttttttctctggcctctcacaatagaggtggaaggcactgcccaaggtcaaaaataagggcagagggggaagaagcccggatcttctttgattccagggccagcctttttcagtaggccagtctttaatggggatataatgcgcagccgggcagagcaccccaggcctccggtgcc

SEQ ID NO: 970 - DNA, 1066 bp, Homo sapiens
tttctggacacgtggcctgtagcagcctggcatctgtggcgcctcgtgtggctgctggcatcggtgaggcatgagctatgagtgtgccagcctcgggcccttggttttgtctgcctctggcatgtttgcattggtggtggagctgacctttgccccttagagagtctcctgtggccttcaacggggaatgggggccagatgatagcgcgggccttgtgctgcgggaaaggctacttcctcagtcagaggtcatctggagggttctcccctgcggttggaagtgttcatgcaaattccagatctgtcctggcccagcttggaggtgggccttcctgactgggccatcccttgcgagcgttctcagcccacactggctccctctgcgcaggcccctacttgtgaaggagctgagccgcactcggtgggctgtcctggggcacccatgttgtgtgttttggttttgtttattttgtatctgcctggtttttccaagtctaatcaggatgtcccctggggtgacattctttgctgagagaagggcacatgcctcggttccctgggctgtagaaagccagtgctcagccttgctttctgccgcagacttggtgcccggagactcgctatcaaagtgcagtggagataatgtccaatgggaggctgaggcaggagaatggcatgaggcagagcttgcagtgagccaagatcgcaccaccgtactccagcctgggcaacagagcgaggctctgtctcaaaaaaaagaaaaaaggaaaaaaatggttatctgcatcctggttaaaatcagtaccaccacgtcccacacgtggtaacatggacttgctggataggacctccttgctccatgggcctggaagcagctgcttcagaaggaaggtggtgcggccggcggcagcggagggcgcgctgtgcagtgacgagatggtgcaggcccgtccacagccctggcccagagaaggagagacctcactgacccctgctgggcctgcctctggccatcttcattttgaaattcggtatcattgtctccagagggaatgagcagctcttt

SEQ ID NO: 971 - DNA, 692 bp, Homo sapiens
ataaaggtgaaagtagctctctagtagcctgtgacagggaggatcatcagacaggtgtttacttccttcctggattacttttccaggagacacccagatgtggcaatagctcttggggttttgggctgacgtacaggagctgaagctgtgatgtcgcgtgtccgtgtccttaggacagtgttaagtggggagctgcccccatcctgcattctcagcagatagcaggcatgtttgccagccggttggttaaacaagctctgaaaacataaacattgatggttttggtggtttcatgtgttgtcgtgtgacgtaagcagatgctaccacagcagagccagaggtgagcaagacgtagggcagagaatcccactcacagtaacacaggaactaaaacagctttttaaaatgtgtttgcaggccaggcatggcggctcaagcttataaccccagcactctgggaggccagggtgggaggatcacttgaggccagaaattcgagaccagcctgggcaacatagggagacctcaaatcaatgtttaatgacctgggtgtgggtggtgcacacctgcagtcctggctactcaagaggctgaggtgggaggatcccttcagcctggaagctcaaggctgcagtgattatgccaccacactccagcccacatgggtaacagagcaagaccctgtctctaaa

SEQ ID NO: 972 - DNA, 643 bp, Homo sapiens
tcacgagagggggcacagtcgtgcagcgggaggagcgagagtcggccactgtttgggtgccatgggtgtcctgggtagagttgagggcctcccccgggaaggataatgctgagccccaataggaaacactgccctgagctatctgatggccagccctctgtccatgggggagccatttcttttccttatctctaagctaatacccctctttcctgaggttctctcttactgcctaagctgtttggctctgggagttactggctagcttgtccccgtcgggatctcatccccatcggtatctctggcagggcttcttgaccagctcccccctggacctgcggctggagacggagttgtgccgctctctccgtcctagtttgccttttgaggcttacccactcctccacctgggctgttttaaaatgattagagcagaacctttcaatcaattctatcaaatgcatctgtagagctaagggggcggtcccttatgtgaaacctaatctttatagctaggccgatgggtgtgctcaccgccgaggcacgtcattacgatgctctttggctagtcattgtcattagaaatgtaaacactgattggggaccttcccgcaggagctgtctgggctgcctgctgtctcca

SEQ ID NO: 973 - DNA, 1118 bp, Homo sapiens
gactgcgaaggagaacgcagcaagcccaggcggcggtggaaaggctggaggacacacctaaacatgtggaatcccaatgccgggcagccagggccaaatccatatccccccaatattgggtgccctggaggttccaatcctgcccacccaccacctattaatccaccctttcccccaggcccctgtcctcctcccccaggagctccccatggcaatccagctttccccccaggtgggccccctcatcctgtgccacagccagggtatccaggatgccaaccgttgggtccctaccctcctccatacccaccgcctgcccctggaatccctcctgtgaatcccttggctcctggcatggttggaccagcagtgatagtggacaagaagatgcagaagaaaatgaagaaagctcataaaaagatgcacaagcaccaaaagcaccacaagtaccacaagcatgacaagcattcctcctcttcctcctcctcttccagcagtgattctgactgaatacaggccctggacccttccctcaagtcccaccagttctgctctcccatcaagcttcagatgccacgttgtactgggggaatgtagcccttgtgctccccaccccctacctccacctgagcctcaccctgctgttgagccctgagtggctaggggaaataggaagaggattgccatggcctggccatcttgttgctgcttggagagatcatatagctaatgaattaggcaggggagctattttttgaagatgatgaactaaatgttgaagacaagtttgagatctgtaaaatgtgattttttacttccacttataatacttgtgattggggaggtttgtggaaattcaattatgatgaaaaacctctatcttttttgtaatgttggcatacttgggggatttagtggcaaatacattccccagcaggccttttgttggttgcactaactgcaaggttgctgggaagtagagtccatttggttgatgagctttgactgcggttttggaaccttacctctcctccttagcccaatatgctgtctcgggtcctattcaaataaagttatttctcctggtctaaaaaaaaaaaaaaaaaaaaaaagaataa

SEQ ID NO: 974 - DNA, 415 bp, Homo sapiens
ttgaggaggaattatttaattattcaggtgcaccgacccagtcagattaacatccaaaggactgagccctgaacaaagagtcaagctaccttttaagcatttcgtggggctgggggagatctgtgcagggggaagcatatcacagaagtgagaaacaaagacagtcattcaattgagacatgcattatatcatttttttttcaaggaacagcatgttttacgacttgagattatctgtctagtgatcttacagctgcacagctagagaaacagagtcttcacaatgcctgggaaagggagagataaggctcactagccatagaaaaacaggcagttaattttaaaggactccagctctttctcttcctcagggggaattgggttttcttacatacaactaagttttgcttacaca

SEQ ID NO: 975 - DNA, 101 bp, Homo sapiens
tagagatgggggtttcaccgtgttagccaggatggtcttgatctcctgaccttgtgatccacccgcctcggcctcccaaagtgctgggattacaggcgtga

SEQ ID NO: 976 - DNA, 13191 bp, Homo sapiens
catttcattatctatctcttctgagcctgttgtatctggagcagagctgggcaggaggtggtaagcagaggctctggggcctcctagaccctttgcagagggaaccggagatgtcttccaagtccccaagtctggcaccacctcgtctcaatctcactttcccctccaggtctagcagacttggcctccatccacagggccttcttagcgcatgccctcttcgcacttactcccacttccctccccatccctcgatcctctgtccagaggtcccaagggcctgttcagaccctgaactctgcccagcagcccctcactctgtcctctaccagggcgccttccctggggctcctgctcatcctgcagtgcccctcccctcccaacccctgtgggggtgtcccatcactttccccagcacccacttcccacaggccttccctcctcccctgcctgctgacccggcagctcccgacagcacggccttgtttcccagggaacaatgcatctgtgtcacggacaacaatgtcctttcatgtcaggcgcactggccccggtgcacgccgggacgtggcacaaagggtgctttgtgcagctcagggatgtgagttcctggctttgccatgttggtgctgccgacccggggcctctgtccttgggtcccagttatgcaacagtcagtcgaggctgtggggctggcccaggggctttatctgtctccctctccaacttttgccaagttacccttctgggcttccgccagccaggagcccacactccctcagccctcccacacgctcctctcacctcctagctgggcttcgctgacttgaacctggccgagtttgcgggctcgggctccacggtgcgctgctgcctgctcgagggatatgacacgaagaacactcgccaggacaactccatccttaaggtaccagggatcctgccacctctgccaccctgaccacgggatggggacaaaccaggctgctcatcagaatcctctggaggagggttgttaaaaatacaggccttacctgaataggtagacatcgggaaggggcgagccctggaatcaggaaaccactatcagagggaggcctggctccgctgttggcctcagtttccccatcaagttcagagagggggccctgacagtctccagggtttggcaagcacctgcagtgggttcacgtcatgctgattgcatgccctctcttctcttgtggtcccctgacagcagccccacgagctgtggtatctttgattagtcccagcttcaaatgggagggagttaaggcacagacgttaagtcatttgcctgaagtcacagacagagctggcacctgaccaccagccagttgacttcttggcccagctcctaactcttccccaagtgacacgtggtagcctggcccccagtggattatcagtgaaaatgatggctgctgagggccccgggggcaggtttccagtggacagggcagccccacccccaggcagctgcctcgttggccttttgggaacagaaatgtctgggtgtccgtcaccagcacacctctcttcctctgtttccacacctttcacctggccgggaaaacaggctgtcctaacagcgcctctgcaaggggacccagggagagcctatggtatctggagcagagctgggcaggaggtggtgagcaggggctctggggcctcctagaccctttgcagagggaaccggagatgccagaaagggtccaggctgattgtcttgggagctggagcctttcagcctcagtcaggctgaaaagcacaggcacagtagccctgtgcacctcaggccagatcaagggagcctgggggccaggtagccttgggttcaagggaagctcccccacatcctgtctgcaaggtcttgggagtcacttcccctctctgagtcttggttccctcatcaacagccttgggctagctaggatgctttcatggccgagtgaataagccatagaaagcctcaacctagtggtcaccctttctttttttttttttttttttttgagacagagtctcgctgtcacccaggctggagtgcagtggcacaatctcagctcactgcaagctccacctcccaggttcatgccattctcttgcctcagcctcccgagtagctgggactacaggtgcccgccaccacgcccggctaatttttgtatttttagtagagatggggtttcaccgtgttagccaggatggtctcgagcccctgacctcgtgatctgcccgccttggcctcccaaagtgctgggattacaggcgtgagccacggcacccggccgaaagcctcaacggagtggtcaccctttcataagtggtgacgtcaggatctgtgctcctcttttccacttgctcatctctgcctgtcactccatctcagcctagattttagggcccaaatcttgccacatttgggctgttgttagtttgcaatggcttcatgctttttcatcagactttcaccaaaccctgcccaccacctgctgtgccaggccccatgagccctcttccctctcctgcctgctgggttgagctctgtggtccttacacagggccggggtgagtgtgtggcttcaccatggagaagctcattgtctaggcctgtagctgatggcagtccgctcactctgccaggcgcagggctgagcccaggcctcaccttgctatgccctcccctctggtctgccaggcaggccttggttccatctctgtcctccacacagggaaactgggctcagagaggttagtggctttgccagagcccccaagccaggagggggcagagagacaggattggaatccaagcccttctgaggccagagccgaaaggctgcagggggccctgcgcctgggcaggctgtgggtggtcagggcatagctgattgctcccctcgccacaggtcaccattggtatgttcctgctctctggagatccctgcttcaagacgtgagtgctggcacaggcctagggagcggatgggagcccagtcccgggcactaggggtggaggaacagggactctgggtgtcctctgttttcatctggtcctgaagcagggcaccctagtcacacctgtctgtcttcccaaggccaccatcgactgccaagtccatctccatcccaggccaggattcctccctgcagctgacgtgtaagggtggtgggaccagcagtgggggcagcagcaccaactccctgactgggtcccggccccccaaggctcggcccactattctcagctcaggtacagttcctcatctgtccgcccctcccctgctagcggcccgaggggtttacctccatgtcatgcccaggtccccagggagacgctgactgaggggagagtgatggtgggagggtgtttgcatgctcctgctgggctgatgagacctgatcaccttgtgcgtgctggctgtggtgctgggccctgagatcacagctgtgccttggactgagactgatgtggcctccccatcctcaaggccctgcagtctagcagaagaaacaggcctcaatcaagccatagataaatgcatgtctacctgcaaacaggataaaagctggggaagacaggcccagaaggtgggatccatctggggccagggaaggcttccctgaggatgtagtatctgagctgcattcagggggtgaggcacagtatacctggcagagggacgtgctgggagctcttgctctcccacatactctatgactttgactggccagtttgcgtctctctgtctcagtgttctttggaaaatgggattggtaatagcaattacatcccaggtcactttggggattaactgtccacatgtgggcacctgcccagcacatggtaagcacttagtgggcactctgttttttgtttatgtttttttagacagagtcttgctctgtcgctaggctggagtgcagtggcgcaatctcacctcactgcaacctctgcctcccaggttcaagcatttctcctgcctcagcctcccgagtagctgggactacaggcgagcgccaccatgcccagatataccttttttttttttttttttttgtatttttagtagagactggatttcaccatatcagccaggatggttgccaggatggtctcagtctcctgacctcgtgatctgtctgccttggcttcccaaagtgctgggattacaggcgtgagccaccgcgcccggctgggcactctgtttttattaaattatcactggtactaatgttatgaaaaatgtgaacgagccccaacccccagaggagatggtgtggcaattaggaggagggggtgttgccaggacaggaggctctggcctgcccccaagtgtttgctgggccccctcaaccctaagcagggcccccagaggtatgagccttggactgcctccaggctgattagtgaacaaggtgtcacgtgacaaccctgatttgtcccacagaatcagttagagcacaggcctcatgtggcccagcagatgcttgccgagtgattctgcctctgggaactgagagcagtgagagaccctctgacctcaagggcccagcttccctccactcccttttccactgcagacccagctagctgaggcccagaacagaaagctgggggcttcccagcacaattactctctccagcccctggatggggttccccagaagagagatgtgtctggggactaggccaccccagcgcaggtggtgccttcgtgtgaagtagaagaggcccctcccccaggcagggtgagacttgagtgcccacttgcctctggagctggcctccccccatatgcagagaacctgttggggacttgaaaagccacatagttatggatgggcacacaggccagcctggggtgtcacaggccagcctggggtgtgttgggcgggaaggcaggtggatactcagagccctgggtaggtcccacctagtcccttttgcctcctgctggggagtgccaggaaagtctgttttgaagttgggcttatgggtgacttgggacaggactgtgggcctgtccctttgggccagaccgctcgccctcaccatgtcccttccactccaactccgctgacccaggccccttccagcctcggggcctctgccgatgctgttctctgtgcctggaaagcccttgccctcttgaggccttagctggctccctccagcaatgtgtcctggaggtctgccattaaggccgtctccttggagaagcctcccctgtccccagactgggccagacccccagtaagcactgctccctgctgtgcacctctcactgcggttgtgggtagtggaggcagtttttgttcagcgttcttcttcctcgctgacctgtggtgggcaccccacccaagtgtgccctctgtggaatgaagggacctgggttcggagggtgacctatggctcaggctggttgctgctcctctgaacctgtttttcagtctgttaaatggcgccctgccatgggaggctctgtgagggcacgttgtgaagggcgacagtgagcagcactgggtgacccctgtcacctcaccccctgccccttcctgccttccagggctgccagaggaacccgaccagaacctgtccagccctgaggaggtgttccactctggccactcccgcaactccagctatgccagccagcagtccaagatctccggtgagtggctgcctggccctgcccccgtggcctcctccttcctcgggatcccccattgtgatgctcccctgcgtcgcccctgacaggctacagcacagagcactcgcgctcctccagcctctcagacctgacgcaccgccgcaacacgtccaccagcagcagcgcctctgggggccttggcatgaccgtggagggccctgagggcagtgagcgggagcaccggcccccggagaagccgccgcggccaccccggcccctgcatctgtccgatcgctctttcaggtgaggcctactgcttggtgccccctggagaacagacctctcccggtggtgccttgaacctccgcttctttacctataacacagggaccgtaaggtccccacctcagagggttgggtggtgacgattccactagctgatggccctgaagggtgcagccatgcccggcgtgcagcaggttctgttcatggctgctcttgcggttttgtggatcagacaagagcacgatctgctaggtggccttaggaagctgacttacctgctcattgcctggcatcctcgtctataaaatcggctcatgatggcagctgcaccctattgtgcatgtgaggtttcagtgaagtacagcacggagcgcacagggacattctgagcgccgctgcggctgactggcattattgtcgtcgttctgtgcttgtacctgttactgccctgaccgttgtgacttgtccccccacgacctgacccaggcggaagaaggactcggtggagagccacccgacctgggtggacgacacgcggatcgatgcggatgccatcgtggagaagatcgtgcagagccaggatttcacagatggcagcaacaccgagggtgagccgtgctgggctggtgggggcgaggccacctgctccaagggctggccctgccgcgctcagcctccatcctctcctgtgtccccacagacagcaacctccggctgttcgtgagccgcgatggctctgccacgctgagcggcatccagcttgccaccaggtagggcaggcttagggaggggtcgtcggggcggctggggcttgggggtgagagcagagtccccacagtccactcacctggccttgaacgccaaatcttgtcgccacagtgtgaccctgggcctgtcatgtctctgaacctccctttccccatctgtcaggctgtgtggacaccaccacctcacctgggagcctggggcagtgagggcacggacaggttcggtggtttcccacagttcacaaggtcacctccagcaatgcctggtgcagggctcagcacatggcaggggcctcacacgcatttatttagaaccctcccttctacttcctcccagctccagggactcgggaagaatggtggtggtgatgcctcatgggtttactgaacaaatctttccctagcaccagctaggcactaggccctaagtgaaggcctggttcaatgcaggctgctgcctacacagcatccacagatggcaggggtagatgggaccaaagttgcgggaacgacagtttatagagtgctgcgtcacagacattcatttggagcatgttgactatgtgcctggctctccatgtgctttggctaaccaaatgaatgagcgagtgagcgaatgagcttcccacaggcgggctgctgagggcaggtggggagcccgcctaacatccacatccccagggaagaggcgtggccaggccgctgcgcagaggctaccctctcaagctgctctgctgactcctgctggccacggcctggaatggcagctatcacctcccagtagcctcctgggctgctctcgggtgggggtgagggggcggtgagcaagaaggaaactgaggggctggcttccttatgggtttgtaaacacacccctccctggccccctctgaaaatgaggaagcatcttggggaaagaaaccaatctggttgggagcgagatcacagcagagctacatgctgagccccgagagtccccgactccagggctgggcctgggctcggcagggaaaggagctgaccaggtttcctgacttcccactgccctcttggtcaccctcacatccctctgagcctcagtttcttcacctgtcaagtggggcaggatgcagtgactccctgccgaggtgaccgtgaggatggggtggcacagccagatgtgcccggaagggctctgcaggccccacagactctgatgcttactatctgtgtcactgtgggcaagggacttaccatcgctggggcacggttttagcccctttgcaacacagggctggttaacagtacctgcttgtgaaacacctccagaggcctggtccagtggagcgctcaggaaatggggtatcgagggggacatgctgacctgtctctcacctgcagggtctcttctggggtctacgagccagttgtgattgaaagccattgaggagcaggtgtccgggctggagaagagtcctgctttctctggagtccagacctgtatcattccatgaggaactttccccttcagatcacctctgcgccacatctcatccatgcctcctccatgcactccagtccacactccccgtagcatcattccattgcccctcccatccatgctgggaccctcctggcccaccaaggcccaggcaccactgtgaatattctcctctgaaccactagagggcaggccaggcaggccaggcgggcccgtgcagcttgtgggcaagaaggagctggcaaggaccggcgctgctggagactgacccagccctctggctgaggacatgcagcggctcctaaatgtagagatgcctgtggctgagggggcctctctacctgtgtccccactcactccaggagcactggctttggtcacgtcttagcagcagggccttgctccgttgttcccttgccctggtggtgggggggccagaccacctccggaatcctgccacctgtgactgtctgactgcttagtgcttcagctgtcccttccttgtgtcctgggggacctgctggcggcctcttcctgggagccatgacctcagaccccacccacactccagatcgagacccctgcctccccccggcaaatgtcctcccgctgccttgcagcctgcactttgcacatgctcacccccagcacagtcccactggcccctcacctccccttccctgagctccttcccaaggactcctggtcactgcctgctgtgcagtcagaggcccagggtccagcagcccggcgggaacgggtgctgcctcttcctccagttagctccagctcaggtctgagacccgtgctgagaaaggtctgagcaccgaccgtgccctctgcccagggctgggtcctgagcagctggttttcctgcaggaaggttggagcaagcaaagtccttctctgccctcagggtcagctgcccagactggggcggatgccagagaggcaggtgggctgtggctggactggtccggagctggcttccttaccagaaaagcctcagccttcctctggaagcatcccccgttctgggcaagggggaagggctcctttaaggggtgtgctttcccagtggggagcagtctggccctgccccctactaaagcctctgctctcagcactttcccccaagtccttgtaacttgcttgaaggtgggttctggctgccagccagtccctggacaaactctcctgccccttttaaatttcactcattttgtataaacccagcaggctggtgtttacttagccctgtagcttttttcattttttctttccgtctttcttcttgagttcacggttcaatattgcctcctcgccctggtgaggggaggtgctgcttttctgccccacctgccggctggttccagcagcgctggggcccagctggggggccgggatgggggcttctctctctgggaggggtgcaggtgccctccccaggctgggagggttccttccctagctccccatctgcccccgctggtgagagttgggcttcttggtcttggaactccctggcattgggaacagagcatttccagcatttgttgttgttttactcacctaacccttagaaaatgaatgttagaaggtgcctgccgaggcgggacagagtgttcgctcgcgctggagaaggctctgctcagccctgagagtcccttcctgccccaccgatactggcactttaaaaaggaagctgaccgcacagtgtccagacgaattggcccccagaagatggggagttctgtcctgcccttctgtgtctgcgtgacctcacccagcctaggagggaggtgcattcagggtagatttgcctctcattcaaagttctggggctttgggtggaaaacagccagctttggcgctgttggggagactcctccagaccaggaaccccagaaggagacagagcctgccacatcctcccacgccaggccctgggccagggtgattggactgagaatttggccacaaccaaattgatgctggctggaaccagaggccagaaagcctggccttgtccccatgtgggagccctgtcctcagccctcttgtccccttgagctcagtgaattcccaccaggtgcccacagctcctggacttcaaattctatatattgagagagttggagagtatatcagagatatttttggaaaggagttggtctatgcaatgtcagtttggaatcttcttgaaagtttaatgtttttattaggagatttaaagaaaataaaggtctacaatatctttaggttttttttttttcctgtttaccgcacaaactgaccacatggcatgtctatcaggatggagggtgtccatgttctcctctgtctttagggaggtgataaggagatgggcggaggggtgtttttttctttgactcccctcctttctaacagaatgttgccaccactgcttgagtgggctgtgtttgttcctctgtcccagcttctgttgtagaaaataacattgttaggggaactcaggctagtgtcagcgtcttggtttggggagaaaaaattaaatgtttcggtttttgtttcttttgctgttttgtttttaccttgttactttatcatattgactttagggtcaaaggcaacatcagaagaagtcagatatgtatagtgacattccaggggtggggaaggtgtagggatccagggttctcccggtcttggccacaggcacaatcatcaccttcatcgttccagattcctggggagaaaactgagaagatcgttacctgccagcctcatacggagcaaaagctctgtcctcagggccaagttctaaccactgctctgtagaccttctctgcaatcaagtggcctctaaggagcatgcctgaggacaaataactgcgcctcagtttcctcacctgcagatggggttatcaaataacacgagtgtgcagcctgacctgtaggaggtgtgagtgtgttcccaaactaaagccccaggctgccatcatttacaggcttggcttgccccgggcccctcacccccgtttctgaccatcccaagtctctctgggacaggcaagtcactctggttctttaataagcttggaggtgttgggaagcttcagtggtactggccaggccaggaggaatcaggccaccagggctccatctctatcctgggatagcattcaccccactcctcctcagggctgaccccgactcatggcccctttaaaccctgaaggccgattctgccccttcctctgttatatgcacaactgaggaaggaggtaaaagtgggctcctaggtgagcccaaagtctcctgagagataagggaaaagaattggactgtaggtttaaaaaagttgctcttggccgggcacagtggctcacgcctataatcccagcactttgggaggctgaggcaggaggcagatcacctgaagtcaccctgaccaacatggagaaaccctatctctactaaaaatagaaaaattagctgggcgtggtggtgagtgcctgtaatcgcagctactcaggaggctgaggtaggagaatcgcttgaacccaggaggtggaggttgcaatgagccaaaatcgcgccattgcactccagcctgagtgacagagcgagactccgtctcaaaaaaaaaaaaaaaaaaaaaagttgctcttgtcagctttgggagggcagactccatagttggagatgggcttccaaccaaccaaggagataaatgccagagggagcgaaccatgccaggctcaaagcacatctctccccaaactccccaggtggggacagcaggccaaaggcctccacataacccctcagggaggcctggagtccagatgctgtactccagtatctaaacaatcactcaatcttaaagctgacaggttcaaagctcttactttgggccgagcgcagtggcttacgcctgtaatccaggcactttcggaggctgaggtgggtggatcacctgaggtcaggagtttgagaccaacctagccaacatggtgaaaacccatctctactaaaaatacaaaaattagctgggcgtgttgacacgtgcctgtaatcccagctactcggtaggctgaggcagaagaatcgcttgaacccaggaggcagaggttgcagtgagctgagatcatgccactgcactccagcctgggtgacagagtgagactcccgtcttgggaaaaaaaaaaaaaaacaaaaaaacctctttctttgggccaagcctccactgagtgccagggatacagcagcaacctcagaccctaccctcggggctgacagggctggatcaacaattgcatcagtgaattaaaaggcacaggaggctgggcaccgtggctcacgcctgtaaacttttggaggccgagttgggaggatcgcttgagcccaggagttcgacaccagcctggataacatagaactccgtctcaaaaacaaacaaacaaacaaaaaaaacgttcccgactggcttccctgaggaacgtggcgtcccagtgagaccggatgggtgaggagcagccggcctgtgagtggtgggggaccgcgttcctatctcggagctgaagaagcgtggaagatgatctggcccaacatctctttgttctcagaggaagggccttccaagaccggggaggggcctgtgcgtgggtcccggtccgaaacgtgtctgggctgctgcgagagacagtcggtgaaggaagggaggggacatccgaagggtggcccgggaggccgggcgatggtgaggagggcgcctcctctccaccaaatcctccccatccatgcgggctagggacagaccctcccccgcccaccctaggctggaaagtgaacgttctctgcacctctcccacctacagactaagtagggcacccggtttccgtgtcggcttcaccactgactcggaatgggatctacctttctctgagcctcacttttcccatctgaaaaatggaacttccgatcccgcac

SEQ ID NO: 977 - DNA, 1316 bp, Homo sapiens
cggaaccggatgtggcttgcggctcgggtggctgagcgcgcggggaaatggtgagattggcaccgtgtgccggagataggggcgtctgggggtggggtcccgggtctgctcaggagctggggcatgggcacttggaacggggattgctctcccgcccccactattgtacggacgacaacgcggaggcctagcattctctcccagcctagaaactgatccctagtcagccctctaccatctgttgaatgggaagcttagaccgtgatcgggccgcgacgccccgcttccattagtgcgccgaaatagagggtcacttcgtcagctgagacctcccttttctccaggccacggggacagaccaggtggtgggactcggcctcgtcgccgttagcctgatcatcttcacctactacaccgcctgggtgattctcttggtatgtcattctccccgtccgctgctcaccttccccgagccctggcaccgccagagcaactactatataggctctaggcacggcgctggcttcattgcctgcctcatctcttgaactctccagaacaactctatgaggaagatgccagtggtaccgcattttatagatgagatagctgaggctaggggagaaggatctggcccaagattgcatccttagccgctacacttataactctgtttccggcttgctttgacttttgggggagttctgttccttctgggttagcctgctgactcttaggcatggcaaacgccagtgatatttgtgaaggcctttaggatatttttttcttgtgggaaaacttgttggttattgcttaagaagtgcagtgtgtctggaagtgcagaacttggtatcctttagagaaaaaatattagtgaagaagccctggaggcccaggttgggagtcagtcgaggattcctcaagtaccatttgctaggctgtgaggtgccttagggcaggtctcttgtgccctgttctcttgtccccaccaccaacctatagcaggcaccaaagcaagtgcccggtaaataccaataagaaattaaggaaagaaacaaaccacgacacccaaatgccgtaatcttaaagaaaagcaaatgcagtcccagtcctctgaatgggtcagccccttagatggaggaggtgggacgtttgggcttgggggctcggcaaggcaagcaagacacaccagagctcttccctcgatgccagccattcatcgacagtcagcatgtcatccacaagtatttcctgccccgagcctatgctgtcgccatcccactggctgcaggcctcctgctgctcctgtttgtggg

SEQ ID NO: 978 - DNA, 309 bp, Homo sapiens
ttcttttcttttctttttttttttttttttgagatggagtctcgctgtcgcccaggctggagtgcagtggcgcgatctcggctcactacaagctccgcctcccgggttcacgccattctcctgcctcagcctcctgagtagctgggactacaggtgcccgccacctcgcccggctaattttttttgtatttttagtagagacggggtttcaccgtgttcgccaggatggtctcgatctcctgacctcgtgatccgcctgccttggcctcccaaagtgctgggattacaggcgtgccaccgcgcccggcc

SEQ ID NO: 979 - DNA, 5959 bp, Homo sapiens
tttaaaagtaaacaaatctacttttattcagaaatgatgctttttaagtaagggtaggaaatcttcattttctttaataactaactctttttccctcttcctaatttaattcaatttttacagaccccctattgataaagatgtaagatctgctattcattgtctttcttatacatagaagtaaaatcacagaaataattattattttatgggaggataaaacatttatttaaatggaaacactaatctttattttcatcatgctgaagtgtgtggttacaatttccaataaaacactatatataataagcaaaataagttagtacattgtaaacttatgcacagtttcatcaattaacagtttaagaacaaacaagccatttaagactttggagctacatttagtaaaaaattgcaaacactcaaatcttatcaaccccaagtaagacagtaaagagctattcaagacttcttcaaaccaattacacaaatacatgtttatttttggttacagtcccctgctatgcacaagaccattggaatgctggaacaattacacattttaaaacggcaaaaagcaaagcaaggagataacatgccagccttagagaagctgtcttgaaagtgcaaactgcgttttctcttcctgaaccactaggataagaacgggtacctcagacgacacggcagggtcatgagcatgctttctataccccactggtgggacatttactggaaccaggtctccatgcctttgaagatacctccggttttaaacagtgaacaggcttcaactaaatatagtgcaaatcaaataccaaggagcaaaacgacagaatagagactgtcacagatgattgacttcctgtttctctacctggcacaacccacatgggacacattggcacacggtaacaacaacttctatttaggttttgatacggaaggcggtgcggcggagcgaatgcagggcaaccacgcaacagcccctgagcaaggccccgatgttatacacaggatccgttccccctctctgagtactgaatgcccacagaaccgtggggaccacgggggcagccacagccaggagatccaccaggaagctgctgctccagtactgcctcacgacgcccccgcgagccagtgggatgacaccatccaacctctcttccacgcaggctgcaaaatccagctctctcatgaggcggtttgcatgaacttctgcatccacattggcgtagggggtctccacgggagacaaaaggatggctgagtttggatttcttggagttaaatcaaccactaaggcagagagggactctgggaagctctccatcgagtctggttcagactcatcaggggacgccaagctcgagggacaggggtcctggagcttctgcagcacactctgaatgagctctgagatggctgggctgtagggcaccacgtcggtctgaacggctcgctccaccaccacactgccctcctcctgacccatgactatgggcagcagctccaggacgttagccccaggggtggaatgcacaagctccaggtcaccagattctgtggtggtggctgtcactatctcatcgaacaaatctgtgctgttggctatgctatctcctaccagtagctccctgtcagccccttcccccgtgacctgctcttccagagataacccatctgccattgtgtcaagaggggggttgagggttaagctcttctctggggaatcacatggaaagtctaggcacagttcgtccctcagagagccactgtgtgccatctccatgctctgaaggagagactccagcttcttgttttggatgtttatgtccacaaaatatttctgaatgcctttatctttatcagccaagctgctccgcatggtttcgatgacctgtttgagctgtttaatctctttcctggcttctttgagtgccaactgggcctctacccggtgacactcctcctcaatccagtcctctcgcatgcgggccagctgggacttaagctccacgatttcactttccctagagtgccaagacaagcatggttaattaaaaaaaaaaaaaaaaaaaaaaaaaactttcaactgggcaacaggcagttcaggcagttctggcacagagccaagagctcatactcttccacttgaaatacagatgtgaaatcagttttcaatgcagggaactcaagagaacacagaaaaacttgagaaaacactccagcctaaactgaaagaagcagtacattttctctttggcggagattagctgtgaactttctctttacttgtaaaatggctaaagtaataatagtaatcagaatcagaatcaaaatagctaccacaattttttttgagtactcattatgggtcggatattgcactgtgttacaagtcttatcttctactcaatccttaatatttgaaactttattattagaacatcttagcatctgttagcctgtttttatctccatatcctaccctttccaaatgtctatagtttgtggaaggccagttcacttttaattacctaagacagaaggtagactgataagttttagccttgctaaattgttcatatggtattccaatgataaacatttttgaaataataaaatgctacacgtggcagggactttacatgatgacaagctgcttattctgtctcctctcaggtaggataatattgaattcatcctacactaaggagaatctatcctatttttcagatccttcacaggacaaccctatttcaagatctttgtatataaattctttcttatatataattttttcatattcagtccttacattctcagtggatatgaagatagggtagtcaggatcctcatatatatgaagagacatcaatattgctcatttaagtttaggctagaatattttcccaagttttgctgcattcccattccttcctcgagtgctccaatcctcccatggactctgcaaatcacagaccaaacacttccagacataaggtctgactcaccccagaggggagtttgggtctcaagtctatttcagacagatgatgagccagattaattcggaagatgaaaaatttcccttcctcgcagtctgcacccttacctgcccacagttttagcaaccaaggtattgagttttctttatatctttgtggcagcagaagaggaggtttgggctgatcaggtagcccagactcttagagaatgcacatgccaccctcaccctgagctcacagctaccctggtcagagctttcctggtctgttccaaaatgttccaggggaaaatgatcaagcagaaaaactggcctgctgcccagatgtcaaaagtcttctccctcagataagatctcttaagcatgggctttttttttttttcagccttaacacttggccaagaacaatgagccccttccttcggcacagaaatagcatgcaggaatcacaatgcacacagatatccattcatgcacggatataaacacggcttaattggtccacggttgtgacccattctgctggaagtatgggattgttcccgcacgtgtttttgccatttaaaaatagtcatgcacacacctgattatttcacatcaaagctgtatacactgcaaaacaacaacaacaaaaaacgacaacaacaacgaaaaacaaaggttcccctctaacctacgggcctccctgaactcctgaaacagccatatcacacagagttatgaaatgactcttttcagaggctgactttaaaaatttgaccaaaattgaatacaatcattttttcttttctatctttctatagtttgggttcatatttcattttatggagaaagaagttgtcctacaccccaccgttcaaggaaggcagattcacctttcatggagtcggcgctcagattccttcagcttggttttgaggtgtctcactgtcacctctttctgctgcagtggagtcaaatactgctctgggtttgggggtctgacaccatgattttcaccgcaagacatgtaccttccagaacgcctgaaacaatccaagtaatgaaatgttactttttgccgtttccttttctataaaaagaagagtaacacagagtgttatcaactgaatgtctgtgtccctccagaattcatatgttgaacttcttaccccaatatgacggtattaggtggtgacgactttgggaattagcccataagggtgaagccttcataaatgggattaatgctcttataaaaggaaccccagagagctttctagctttctttttccaccctgtgaggatacattaagaggtcagcagtctgcagcccagaagacagcccttcccagaaccagaccttgctggcaccctgatctcagacctaaacctacagtatgtagcccatggttctcgaaagatttggaccaacatctagagtactttgttatagccacccacattgacccagacacagctaacagcttgagaaggaatggtagctgtgtgctggggtcttaaacctcaataatgggtgacctcacttcagaaggtgagctgtaatagaattgccgatcttaggactgttaattactttgaagattgaagggggtattggtgtatttatggagagaatagggaccgtggaggaggagaattctctatggcttaggaatgttctcatacaaaataatgcaccattgtccaggtgcctgagctgtcagttcagagtaacatgcagcacagtgggtgagggtcaggggatgggcccgggcagaagagaaggaagccagccagaggacctaactttctgcacagtgtgccactgcctaaagatcctgatggctatttgctgaatgcaagttgttctaaaatcaatccctgctgtgagtatgccagtttggaggaaatggaaagatccttcttctgaagggaagaagtttcttcctctacttaactctccccagtgtgttttgtaagacaggctcaatgttttacaaaacagcccttgctggaatcttggcccctctcaggcctggctgggagctgggaatccctgctgtaagagagctgactgacgagaatagggatgcccagcaggaagaaggccgaaggaggagggcagccagctccttccctgactctggacccagtcccagccactatgctgccagctccctgagcacctgcctgcctccaagatgacctgtgtccatgcccaccatccagtcctcctgtcgtggcctctttggaaatgcagttccttctttctgctccacactccctacaatctcatatgaattaacttgttgcttgctcttcagacctcaattccatttcactttctcagggaggccacccctgatcgctccagactgcgttggacaccctccccacctttcacacacccctgtagcaacaggtgcctacagaatcatcttaagttgtttttgtttgtttgtttgtttgagatggagtcttgctctgttgcccaggctggagttcagtggcgtgatctcggttcactggaacctctgcctcccaggttcaagcaattctcctgcctcagcctcctgctgcctctgtggcattttctctccctattcaggaactgcttagattgctgtgccttgttagaaattgtggcttgcgctctttctgcagcagcccttgaggaatgagccgaatgtgggaaagaaaaatgcagtgtcttgtagaatcaggcaagggatcaagagttgtataacttttttttttcttttttaaagaaaagcttaccaagtaggacaaactaagatgcatgaattaggtgagcaggactcacctcatgatggggctacagtcgcttcctttgtaggagcctgagttgctactgcttggggaagaaggtgcataactgggatggatattgacagggctcagctgattcctgcacagcatggacagaaggtccttttcccgcgg

SEQ ID NO: 980 - DNA, 755 bp, Homo sapiens
accatatacttaacatgtatccctacggtaacctagtgaggtgactctcactatcgccatcttacagataagaccactgaggcactggctccgggcttctcatccagttggcggcacagaggagtccaaggtcaggttgtctagagtccagctcttctcacgaccctagtccgcctccacagaaccagggacgccggacaaggaggacactgccttcaggacccttctgcggaggtccctcatggtgcagaagttgggagtagaggcagaaacagctgtgaaaattctgatttgtttgtttctctgagccaagctaaagtggataatgaagccaagctggcgattaccttcctgtgcgtgataatggtggtagtggtgatgctgactgcagcaggatgacggtgatgtcagcagcgacaccattggtcttattgatggtggcagtgcccagggtggtgtgggggtaatagcatgagtgggtgctgggatgctgttagtgatcctgctagggccaggttagcttggaggggagagtgatgtccatcactgcagtggtggcaatgctgctagagacctcctgagtagttggactcgggctggcattgctgctgggaccttccctcacccccatcaggaagacccctctgctcctccccaccctcagtgaagggggcagggctcagagccttccgtagaactggctttattgcattccctgttctggacagtgtaagcgatggccctgcctctcgaga

SEQ ID NO: 981 - DNA, 555 bp, Homo sapiens
aagggttttggcctgagccactggaaggctttactgagatggggaagactatgggagaggcagttttcacagaagatccagagttcaagtccgaacatgtcaaccagaggcacagcggagaatgtggcggtgcatcccaggcgttgggaggtcagcccactacctggccccgaatgcacgcagctcccaagtctccccagctgggcaaagacactctgacttctcctcccatcctctcctgcccccttccctgttggaagttctccctccactctaactgaaattccctctctccttggaccagccccttctgctccccattgaatggccaagtgcccagatacagctgcatttaggaacagggaaggagaagaaaataaggaacccagaagattcctgcctgggtagagtggaaggcagtggggttgttttcctctcctggcaacttaagaagcttgtaccaaaaaataaatgtggagtgagagtaaccccaatctcacttgggtcagagtaatcaaaatgtaattgggtttgtgaataactaatgtttaccct

SEQ ID NO: 982 - DNA, 1213 bp, Homo sapiens
aaaagattgttttctctttcaaggaaatgggtcctgatgaatatgaagagatggaagaagaggaggaggaggaagaggaggaagacgaggatgatgattcagcagatatggatgaatcagatgaagatgatgaagaggagagacggaggagagtctttgatgttcccattcgcagacgccgctgctcacgccttttttagcaagccttctgctgatggaagcactaggatgattctaggctgttaaatagatttctcaataatgtaaataactaaattgttctctgcatatagcaggaaaactagcatgaaatattgtttcaggccctgggttctatgtgacactacattaggaattggattgtttgggtttgctttgtgtttttgaggtagaggaagaaatgggaatcttttttttctcttccaggagtcagtggaagaatagttctctagctaaggaacggacatacctttgttttaaaatattttatacttacaaaaatctagaaatggagagggaactgttttgaataaggatttaaaatacctgcacaaggatagagagaaactatgtgactcattctgtgaaaagacttcttgcagttgtgagttatttagaaatgatcaaaatttgtaattaggctaatccatttagtgattcctaatattttgtactcacagagaactaattgactaaacaacttgaacgctagtggtttgtccttagacaatctgtctttgaatttaaagtctttatcgctaagaccttgactttaaatttttcatcactacaaccttgaatttaatttcaggtcttcaacatgatgaccttggatttaatttaaagtcttcaacactatgcgctttatcatattattcacagatgcatttttgaaatgtagtatgtaaaagtatgtaacgtgctgtttattaacaaaagattgttcacaacatctcatgtagtttaaatttgtaaatactgcttctgttttgtttctcctttatacacttgactgtctttgtgataagtgacatgaattttatgttaggattaagtatgttttcctgaaacttggattttttttgtaattatataattgagagttaagaatgaaatccttcaagtgttaaaaactcacattttaaaagcaaattttggttccaattctgtattttgtataattgcttattttccataaactaatattagtcag

SEQ ID NO: 983 - DNA, 1213 bp, Homo sapiens
aaaagattgttttctctttcaaggaaatgggtcctgatgaatatgaagagatggaagaagaggaggaggaggaagaggaggaagacgaggatgatgattcagcagatatggatgaatcagatgaagatgatgaagaggagagacggaggagagtctttgatgttcccattcgcagacgccgctgctcacgccttttttagcaagccttctgctgatggaagcactaggatgattctaggctgttaaatagatttctcaataatgtaaataactaaattgttctctgcatatagcaggaaaactagcatgaaatattgtttcaggccctgggttctatgtgacactacattaggaattggattgtttgggtttgctttgtgtttttgaggtagaggaagaaatgggaatcttttttttctcttccaggagtcagtggaagaatagttctctagctaaggaatggacatacctttgttttaaaatattttatacttacaaaaatctagaaatggagagggaactgttttgaataaggatttaaaatacctgcacaaggatagagagaaactatgtgactcattctgtgaaaagacttcttgcagttgtgagttatttagaaatgatcaaaatttgtaattaggctaatccatttagtgattcctaatattttgtactcacagagaactaattgactaaacaacttgaacgctagtggtttgtccttagacaatctgtctttgaatttaaagtctttatcgctaagaccttgactttaaatttttcatcactacaaccttgaatttaatttcaggtcttcaacatgatgaccttggatttaatttaaagtcttcaacactatgcgctttatcatattattcacagatgcatttttgaaatgtagtatgtaaaagtatgtaacgtgctgtttattaacaaaagattgttcacaacatctcatgtagtttaaatttgtaaatactgcttctgttttgtttctcctttatacacttgactgtctttgtgataagtgacatgaattttatgttaggattaagtatgttttcctgaaacttggattttttttgtaattatataattgagagttaagaatgaaatccttcaagtgttaaaaactcacattttaaaagcaaattttggttccaattctgtattttgtataattgcttattttccataaactaatattagtcag

SEQ ID NO: 984 - DNA, 807 bp, Homo sapiens
agggttctgtctttctctcctgggacatgtgtctttgacaccctgagccaccatgtaagaagtccagctaccatgaagccgtcatgcagaagagaccatgtagagacatcacacagagatagagggaggcacccaggagccccagctgtttcagactccagatatttggatcatcctgcgcgggtaccagacatgtgaatgaagaagctcgtgagatgactgcagttccagctaccatcggactgcaacatcacgggacaccccaacccagaaccaccccactgaatacttcccaaacaccaacccacatgaaccatgagagataataatgactgttgctgtttcaagccactaaaaaaataaaaatatttttttaaaaagtagaggctactgatggttgaattgaaatgatgtgtctttatggtaggagctcaataaaaatcttagatctcttgttgacagtgcataaaagttaccagtagaggtcatacttgattaatattttcatatcctcttttctgtaagtatatagcttaataattattattcagtatatgaatataagctcagtaaaactgtatcttggattgttacaagtggtctgtttgctaccttctgtgaattaccaactactgtgtaaaaaataagtactggcttagtgaaatatttaccattaaaaccatactgagctgggctgggtcgcatgcacctgtagtcccagctactcggaaggatgaggtgggagaactgcttgagcccaggagtttgaggctagcctaggcaacacagcaagaactcgtctctaag

SEQ ID NO: 985 - DNA, 807 bp, Homo sapiens
agggttctgtctttctctcctgggacatgtgtctttgacaccctgagccaccatgtaagaagtccagctaccatgaagccgtcatgcagaagagaccatgtagagacatcacacagagatagagggaggcacccaggagccccagctgtttcagactccagatatttggatcatcctgcgcgggtaccagacatgtgaatgaagaagctcgtgagatgactgcagttccagctaccatcggactgcaacatcacgggacaccccaacccagaaccaccccactgaatacttcccaaacaccaacccacatgaaccatgagagataataatgactgttgctgtttcaagccactaaaaaaataaaaatatttttttaaaaagtagaggctactgatggttgaattgaaatgatgtgtctttatggtaggagctcaataaaaatcttagatctcttgttgacagtgcataaaagttaccagtagaggtcatacttgattaatattttcatatcctcttttctgtaagtatatagcttaataattattattcagtatatgaatataagctcagtaaaactgtatcttggattgttacaagtggtctgtttgctaccttctgtgaattaccaactactgtgtaaaaaataagtactggcttagtgaaatatttaccattaaaaccatactgagctgggctgggtcgcatgcacctgtagtcccagctactcgggaggatgaggtgggagaactgcttgagcccaggagtttgaggctagcctaggcaacacagcaagaactcgtctctaag

SEQ ID NO: 986 - DNA, 129 bp, Homo sapiens
tttttgtatttttagtagagacagggtttcaccatgttagccaggatggtctcgatctcctgacctcatgatctgcccaccttggcctcccaaagtgctgggattacaggcgtgagccaccgcccccgg

SEQ ID NO: 987 - DNA, 11003 bp, Homo sapiens
gctaggagacctgttctgatgatgtgtgtggtcctcaccacactgccctgcctcaccttttccatagcagtgactgaggtatggaatttttgatttcttctgctacaagattatgagattttataatttcttgttattggaatttgatagagcagcgtgctcaacaaatttcttgacatctatgtaatccaatcttcttccaggttgcaatatatgttatttaaagtactgagatcattgttacctctgtgattgtgaaggaaagtctagtagccaatttttaaaaattaattttgtgtttgtgtgtgagacagtaatgatatttgaacgtttaaaaagtgaaaaatgtgaaagttgatctatatttgtttcttctaccaacctgatgtttttcatgattgtcctcaattgtaaatgaatacaacaagatctaagggaaggaccacttacattttaatacctttgataagatgtccattgataataatttgcatgtgttatttatttgaaaataatactgagtttatgttttgactaaatatagcttcaaaagatcttggatagaaaccagcagggcaggaatatcttaggcagaactttcaggcttgtaagtacttcattatccaagaaggtcagagaagaatgccccactaatcttattgatttgcaaggtgctgtggaagataacttttattttcccaaagcatacttaatttactaaattacttaatttaccttgtgatatttcacttgtatgtgaagcaaatattcattaagtatatattacaggccaggcactgttaggtacagggcataggggacccaggaaatatggccgagtctctcatataattttctgacattagagagaaaaataaacaggcaattagaacaagtatcacaagtgttgtgagacagggcagtaccgagtaatgtatgacattagaaattacatggttgttagaatgcattgtaggtgctgctagaatacatcatagatgctaaattaggacaatgtatgaaggcatagaataattttgggaggttactcacatgtgctttgcttccagtgaactgcaacagggaatatttcaatctagatctgtcttttcccctctcaaagaccttgtaaatcatttggaaggttctcaaaagctgtaaaaatttagtttacaaccttttaagaaacatcactgcggtaaactgatggcatatctggagctcgatagccctttttggctcttttttatgatgtctcttccattgttacatctttttctttcctttcctttttttcttacttaattttcaccgaagtataacacataaacagaaaagtgcacgaaacatacaagtacagtaacaatggaataccacaaagcaaccccctgggtaagcatcgctcaagtcaaggtcaagaaggaaactttggccggctccatgcccacactcctttatttttatttattattttattttatttttgtatcagaaacccattgcttgctcactctttttttatgctcctttcaatgactccctttccctcctttccagaagtcacttctaacttgacttctgatactgcaggctagtttgtctgtttttgaaatttttccaaggagaaatcaaatgatgtctggcttcttttatttaaaatatggttgtgagggtcattcctgtttctgtaaatacctgaagctcattcgttttcagctgtagagtattacattttatgaaaagatcataatttacttatctgttctactcttggtcgccatcttggttgtttccagttttggcaattacagagaatgcggcagtgaacatctgtgaatatgtcttttggtgtgcatgagcaagcatttctgttggttatgtatgcaggagcagaactgatggatcatgagatattgaaatgttaaattgtgagagataaggtcaaacagcttttcaaacagattgtactgatttctatagcatctctatagaactcaccagcagagaaggagcattcaccagcgcttgcgttgtttcttatttttttggagacagagtctttctctgttgcccaggctggagtgcagtggtgcgtgtgatcttggctcactgcaagctccgcctcccaggttcaggcgattctcctgcctcaggctccccatcagctgggattacaggtgcccaccaccactatgggctaatttttgtatttttagtacagacggggtttcactgtgttggccaggctggtctcgaactcctgacctcaggtgatccacccgcctcggcctcccaaaatgctgagattacaggtgtgaggcacccctccaggcatcattgtgtctttttatttcagctcttctggtgggtacgatcctgaatctcactgtacttttaaattacatttctccagtaattaacaatgttgagcatcttttcatcttgcccattttttattgtgttgcttatcttttaaaaacgtatttggaagacttattttcatattcagattatacaagccttttttgattatatgtattgcaaatatctttatgtaacttgtcttcacacttttatatctttttgatgaaaagaagttcttaacttaaaaatagtccagtttattgctttcctttatggatagtgcttgggtcactcacttgtagaagattttgtcattgtgaatctgaatttcaaagtcttaaaatctttcatatatatatatttttgtttgtttgtttgtttgtttgtttgtttttgagatgaagtgttgccctattgcccaggctggactgcagtggtgcaatctctattcactgcaacctccaccttctgggttcaagtgattctcacctctcagcctcctaagtagctgggacgacaggcatgtgccaccacacccggctaatgtttgtatttttaatagagatggggtttcaacatgttggccaggctggtcttgaactcctgacctcaagtgatttacctgccttggacccctgaagtgctgggatttcaggtgtgagtcactgtgcccagcctcctaattatattttgaaagctatattgtttcttcattcttttttagattcacaatacatctggaactgatttttgtatatgttgtacagcagtgagttaatttttttccccacataacattcaatggaccgagcaccattttactaaaaaatccatccttcccacatttctctgctgtgccacctttgttataaatcaagtgtagatatacataattcctatgccaactctacactgtcttagttcttgcagctttatactagttctttatatccagaagagtaaatcttcctagcttattctttttcttccagaatttcctgcctttttaattttcatataaattttattgtcagcctgtccttttccacaaaaagttgcaacagtggttgaagttgcattgaatagtatcatttttccttccttcctccctccctccttccctacctcctttctctctctctctctctctctctctttctctcactctgttgcccaggccagtgcaatggcatgatctcagctcactgcgacctctgcctcctgggttcaagcaattctcctgcctcagtgtcctgagtagctgggaccactggcatgtgccaccatgcctggctaattttttttgtatttttagtaaagatggggtttcaccaagttggccaggctgatctcgaactcctgacctcaggtgatccacctgcctcgtcttcccaaagtgttgggattacaggtgtgaaccactgcaaccagcctacactgtttatttcattctctggcgcattaccctggctaagacctccaggacaatgttgaacagaagtggccatggtggcatctttgtcttattcctgatttcagagggaaaactttcaatatttcatcattaatacaatgctttccatagttttttgttattgtggtttgtttttgtttctgttttttgtggggcagggtcttgctctgtcacccaagctagagtgcagtgtcacagtcactagtcactgcagcctcgacctcctgggctcaagtgatcctcccatctcagcctctcgagtagctcgaaccaaagatgtgtgccaccacacccagctaatttttaaatttttcatagacttgggttctggccttgttgctcaggttggtctcgagctccaggctcaagcaatcctcccacctcagccccgcaaagtgctgggattataggtgtgagccaccacacctggccttgccgtagctttttgtaaacattttaagcagacgaaggaagtgtcccaaagtctagccagaattatctgagttctgtcttcttggaagactctaaatgttcatatttgttcttctagctctttgaggctggattcttagaagctctgctcagcagtagagttggaaggagttaccccttcaatattacagggagcccactactgttttttgcatgtatttaccaaggtctgtctttaactgaaaatatgcttccattgatatgagtccttatgacagctttagaaatgattcaaaaccttgtggcatttaaaacctgatgagttaaaaaccaaccttctagttttttagtaaatgtaattataattaatttagtgctgcattcagactattgaaagcattttgagcaaagaaagcacaataatttaatgcttgtaaatggttttctctaaacaggttcaaaagagcattaatgggtccgctgatgtcttacctgatatgttacctgacctgcccgtatctctggttctgttatccctgatcatggttgatattattgaaaaactcaggatatatcctcttagagggagtcaaaagagtaagtgttcttttaaatgtgaatattttttaaagtttgatatatttttcacatttctgccactgtgttatctgacaacatgtttaatgataccttttcttagggctaacattactgatagaagattgcaaatgaagatatctaaacataattatttttaaacctaccttgatagctagatagctgcttttgtttgctattcgcattttagtagtactgataaattaaaaattatcaaatagttaataccaaaaaccttaatgtttattccagcaagaaattatccaagtaaattattatagatgtatatttttctaggaagtctcttaaagcttatgtttaaatggattaataaaaagcttagtttggagacttttactacaggaattaatatgactgtggtagttgtgtcctagataatcatgtgtttttaattgtgaattataaaaatgccaaagatcacactaataaaaccaagatatggctgggtgcagtggctcacacctgtaatcccagcatttttggaggccaggatgggaagatggcatgagctcaggagtttgagaccagcctgagcaacatagcaagacaccatccctataaaaaaataaaatttaaagaaaactcaacaagatgtgtcacatctcctccaaagtgatgagttgaaactaaatacagattggcccttacaaaaagatattttgttaatggaatattttatttatttagtcgtaaattactccagctttcattaaatttcttgcggtagtatctgtgtttaattggcaatatttgtatgctagttactgtgtggctaagattttgtcatgttgtgcatttgaaatgggtaaggtttgtcaggttgttttctgatggggtgaatggagtcaactgagtgagcctcaggagacagcttcagagtgacggggtcaccactggggctcgtcagtcatttatgggtcagatatcagtaccttccagtcactcttgctgctcagatggaaagcaaaactgaggtggaggccactaggaagttggagaatctgagcctgtcactttgtacttcatcctcgggtgggagatgacggtctgttatggctaacataacacaggtgacatgtaggtggataagatggcagccggggccatctgttgagtggaaagcacacccaagtcacatctgccctccagagtcaagcgtatttgtcttaaactcaggagagttgggaatctccaaatcctttgctacatctctagattccttaaaaatgcaaatctatttttaaatataatttttttttcaatttgagctggggtcttgctatgttgcctaggctgacctagagttcttgagctcaggagatcctcctgcatcagcctcctgagtagctgggattctagctgtgcacggctgcacccagcgttaaattggatggtttctgatgactctgtattttccatattaatataaatttcctgtccaagttaaaaggtctttttaaaaaagaaagacacgtgtatctttttgggaataagttaataacattttatttttgttagtgatgagttgtttttttgttttgttttgttttgtttttgagacggagtcttgctctggaatgcagcggcatgacctctgctcgctgcaacctctgcctcctgggtttaagcaattctcctgcctcagcctcccgagtagctgggattgcaggcatgtgccaccatgcgtggctaatttttgtatttttagtagagacagggtttcatcatgttggccaggctggtctcgaactcctgacctcaggtgatccacccacctgggcctcccaaagtgctgggattacaggtgtgagccaccgtggctggccattagttgggtttttaaaggggaatttccttgcatccataacttcaataatgacactgagaattgaaataagacatctaaagaagaagtagatctgggggagaagactctagcacaatttgtacaactgcttctcacttgaagagcctccttcttgagctgttctccgtccaaatttaggaagattagtgtctggtttgatagttccaccgtttaataaattcacacttaaaaaaactagcagtcacttgaaatgcctttgtaaatatgaatcatacatgcttttaatttgtatgcaaagaccttgaacccaaattgtctcctacactcattttaacatgaaattaatgatataaattatgtaaattttgaatccatgaggttttctcatttattacttggaacatgaattaatatatgaatacattaacatgtaaatcttaaatacataaatctgaacctaagcaaatataccataaatatggtttcactacaggtgatacttgcaagtaaaaaaaattgactagaggcgggggatgaacaagatctagaataatttggctccctttaggaaatgtgggaaaagtgaatatgttctttgctctttccagatagtctgaaatgcatacatgtctgtcagctagcagcagtttggactttatgctagatgaaaccaacataatctacaacgttttgatttatggacactctcacagcatcctaaccatcttcattccaagctacaaaacttttatctttgtgtagcttttctttttccaaaattttaaataagttattctgctgacaaaatatgcttatgcttaaagcagtcttcaccggaccaaggaatcctttctactaacttcgtattaccagtggaaatctctcagtatcaagtaattatcatgcaacagcttctaagtgcatcgtttcatggaggtagagcagtgcatgggagcatttttctgacgcgtggatctctgtagcacggcagtctcacagatgtacgtggtacctaggaatgccaatccccagtcccgtgcagaaataacaagaatacaaaggatagcctgtgggtacaaatgagcgcaccttaatgcttccatttgaattttgctaactgaatcccatgtattaacgctcatttagcattgcaaccatacctgtttctaggacattaccatttttacggagagatagataggttgccagctctcactccaggcccagctccctggcaatcatgaccttgaaccacctagaagcaaagtgagcccccatctaaggtcttgtgattgctgctgctgctctgggcaatttcagctttgtaggcagagtgacccatcttggtggggtacacactggtttgaggctcaacagtaaagaagaggactttcatctcctcttcttcactgtcttttttctgctcccatttaattaattagttaattaattaattttttgagacagagtcttgatcctcctgcctcagcctcccaagtagctgggaatacaggagggcaccaccatgcctggctaatttttgtatttttagtagagatggggtttcaccctgttggccaggctggtcttgaactcctgacctcaagtgatctgcttgccacagcttcccaaagcactgggtttataggcatgagccaccgtgtccacctgctgctgctgttttaaaccagacccacagtgggtctcctgtgcccttatttgttggtccagacccctgactaccttgctgcatctgctttgcactcagcttttcactctcacgtgcaaacccctcagcatgctattttctaccactcctgctcggctctgctctaaatgctgttggtgctgctgttgcttgtgtctgggatattggtggatgttttgctggtgctttagactgacttcctttcttctgctagtgggaatattggcttcctgccaccgagttctagttttctaaagaggtttcaggcagagcactataataactgtttttttcttggaaacaacagccttttagcccttagagtgtatatgtaccaacaaattggctgggcttcagtgatttcaggtagtggccattctactcccctggaaaccaccatttcccctcccacttatagaactcgtggctgaatgtggcagagccagactcctttgaggcagcttttctccatgggggtctcatagatcctcaaatcaggcttagctatattgcctgaacctcaatccttgccatcgttagagtcctctccttgtcactacctagattccttaacccccatcaaaaccagtgggtgcaaacagacctatgaaagtgtccatgattagagagagagttttcagtcctaccttcaagactcatttgaataggacttgcagcccaggccagacatgctgttacaaagtgctacaatagattttaatagctaaagtactatggtgccacagatgaaggaaaacttcattttatctaaggtgatgaaggtaagagaagactaaagggaagatcttgggtttgcaggagtttgtaggtagacatggtaaagaaagctttctacatagaagaaaggttgggcctccaagaactaaggcgtgtatgtagcaaatggccatgtttgggaagtgaaaatgaagcagtgttgttgtctggggtagatacccaaggttcgtcatcttgtgccaagaagattaaggacatggacacacacaaggagtgagtttaggagcggaggtttaatagacaaaagaaagaaaggagagcagctctctctctttcgagacagaggggctcctaaatgggaattccagccatgacagagtgcaccgggttttatagacaggctttaggaggtggtgtctgatttacatagggctcagagattggttggactgggtgtgatgtttacatagcacccagaaaaggctggtcaccccaccgtaatcttattatgcaaatggactttccacttggctggtgccatgttgcctgctcctcactgtacatgcagctggcaaagagaagggaagatggagccaccattttgaccatgcctagtcccaggtggccttttcctattggcacagctgccagcattcacctgtacacgcttccagcttgcttgtctgtgtctgcagctcgattttacaggctgctgtttgttagaaaatgatttgggagtgcttttcattaaaaggaaaaccttaccaaggactcccgtaccctcatatctgcctaaataatttcttcttaactcctatatcaaaattaagcttggttggatttcacaccttgaatcaacaaacctggtgctgggaggcaagtttccttcttaaaactgactactgttcatcaaattgtcatttcagaaacctacaatgttacttcaagagtgactaaaaatttgcatgcagcccggcgtggtggctcacgcctgtaatcccagcactttgtggggctgaggttgggggtgggggggatcacctgaggtcaggagtttgagaccagcctggccaacatggtgaaaccccgtttctactaaaaatataaaaattggttggccgtggtggcatgcgcctgtaataccagctactggggaggctgaggcagaagaatcgcttgaacccaggaggcggagattgcagtgagctgagatggtaccactgcactccagcctgggtgatagaacatacctctgtctcaaaaaaaaaaaaaaaaaaaaaggaaagaaaatttgcatgcgtgtgtgtgttgtatgtgtgtgtttgggagaagggagagcttcatcatgatcaacaatatttttgtgtgtttaagagttgatgttttatgtgagatttcatttgggggaaaaaaaagcttcctctgctaaatgtttaaaaatcattaacctagggcttcattcagcattgtaaccgcacctgtttctaggacactaccatttctatgaagagatagataggttgccaactctctctccaggcccagctccctggcaatcatgactgcaccacctagaggcaaagtgagcccccatctaaggtcttgtgactactgctgctgctctgggcagtttcagctttgtaggcagagtgacccgtcttggtggggtacaaactggcttgaggctcaacacctttgaaaaacagataaaccttttaacatgccatgttgaattttttctttccaatgttgcatttttccaaaagaacacatactcattttaaaaagttataaaatagagataaacaaaaaagaaaagg

SEQ ID NO: 988 - DNA, 279 bp, Homo sapiens
gagacagagtctcgctctgtcgcccaggctggagtgcagtggcacagtcttggctcactgcaagctctgcctcccgggttcacgccgttctcctgcctcagcctcctgagtagctgggactacaggtgctcgccaccacgcccggctaatattttgtatttttagtagagacagggtttcaccatgttagccaggatggtctcgatctcctgacctcgtgatccacctgccttggcctcccaaaatgctgggattacaggcgtgagccaccgtgcccgg

SEQ ID NO: 989 - DNA, 7482 bp, Homo sapiens
  misc_feature (4768)..(4768): n equals a,t,g, or c
ggctgcccttgagatggagttgctgcctctttggctctgcctgggttttcacttcctgaccgtgggctggaggaacagaagcggaacagccacagcagcctcccaaggagtctgcaagttggtgagtttcccttgaaccctgatctgtcggctgctcctgtcctgacaaggcttggtccatttggaaagctgacagattgtccatcaggaagggcagagaatgaaggagcctgcatcactctgtgcctgcctagcacaggggcatgtgcagctgccctttaaccacaggattttaagatgcttcctgggaagagccaggcagtccctgccccgccgttctcacgcctgctgaggataggaggcatccgagaccagcctagggcatcctcccggaacaagaacaacttgttaaaaatctggatgattcaggccgggtgcagtggctcaggcctgtaatcccagcactttaggaggccgaggcaggcagatcacttgagcccaggagttggagactagcctgggcaacatgatgaaaccacatctctacaaaatacaagaatcagtcaggtgcggtggcacacacctatagtcccagctacttgggaggctgagatgtgagggtggcttgagcccaggaagtggaggttgcagtgagctgagatcatgcccctgcactccaacctaggtgatggggccagaccttgtctttaaaaaaaaaaaaaaaaaagccaggcgcggtggctcacgcctgtcatcccagtacttagggaggccaagtccggcggatcacctgaggtcaggagttcgagactagcctggccaacatggtgaaaccccgtctctactaaaaatacaaaaattagctgggcgtggtggtgcatgcctgtaattccagctacttgggaagctgaaggaggagaatcgcttgaacccgggagacggaggttgcagtgagccgagatcacacccctgcactccatcctgggcgacagagtgagactctctcaaaaaaagaaaaaaacaaaacaaaacaaaaaactggatgactgagctgcaccgatggtatgagaatctccgggtgaggtgcttgagagctggagaagcctgcctcggagtttgtggacgagttgaccgctaaggcttacacagctgcggggaggacttgctgccatgccactctgcagagcggcagcccggaccacgctcaggctaagaagacccggagcgtggatacccaagcctcctctagggctttcagcctagatgtgaaaatagacttgggtccaaactgagaaatttccagtaattttccccttcatctatataacaatgatatcaaaagtctgctcaagaaacacatatttaggccaggtgcatggctcacgcctgtcatcccagcactttgggaggccgaggcgggcagatcacaaggtcaagaggtcgagaccagcctggccaacatagtaaaaacccgtctctactaaaaatacaaaaattacccaggcatggtggcacatgcttgtagtcccagctactcgggaggctgaggaagattgcttgaacctgggaggcagaggttgcagtgagctgacatcgtgccactgcactccagcctgggtgacagagtgatactccatctcaaaaaagaaaaaaaaaatgaaacacatatttaataaacatttcttgagccatattatatactaggcgttgggaagacaaattggatgtcagggctaacacttacattcaagtatgtattcttaaagcatagctgtcatggtttttaacctcttttagtaggaacctataaccactgtgctagagtctattccaatatgacatagaggttacaagctagactggcctggtttaaacccagccccacccttagctggtgacattggggtcactctaggtcatagtttctccatctgtagaatatatacgtaataataatatctaccaataacatcatgctgtgttgactgatgattaaatgggttaatacatgtaaagcactcaggacagtgcctggtaggtagtcagtgctacgcgttttatccgttatcactcatattattattaatctctgctatgtttgacctccagcattctcttacagaggcaataaaggattaactacacagtagttattcaggggttaccaggcacaggaagaggagagataaatgaacagcctttcagagttcaggcaaggccctctgcttgacactttctggcccagtgggcaggagtagagaattggctgccaggaagcccaaagagtgggtttcctgtggctcttccgagttgaggactgagaattggagagtctgggtgccctccactggccctcatcacattatccatttgaccttattagaaagtggacgttggccaggtgcggtggctcccgcctgtaatctcagcactttgggaggccgaagcaggcagatcacctgaggtcaggagtttgagaccagcctgaccaacatggtgaaagcccgtctctactaaaaatacaaaaattagccaggcatggtgacgggcacctgtgatctcagctactcaggaggctgaggcaggcgaatcgcttgaaccagggaggccgaggttgcagtgagctgagatcgcgccactgcactccagcctgggcgacagagcaagactccgtatcaaaaaaaaaaaaaagaaaaagaaagtggacatggtaagcttttctgggatggccatatggtccttctacatcacttcagcggggccacagggaattgcagaggtgtgacccacgactgcagcagctgtggtggaacagcaccccatagcgtgaagaaagcccctgaccacaacattctccagtgagtccacacgcagggaggagcgcaacacccactcacataaagacacacacctggccgggcgcggtggctcacacctgtaatcccagcacttggggaggccaaggcaggtggatcacccgaggtcagggtggccaacatggcaaaactctgcctctactaaaaatacaaaattagcccggtgtggtggtgtgagtctgtaatcccagctacgtgggaggctaaggcagcagaatcgcttgaacccggcaggcagaggttgcagcaagcagagatggcgccattgcactccagcctggacgacaagagtgagactctgtctcaaaaaaaaaaaaaaaagataaaaattctcttccagagtactttgtaattataatgcaatcccaatcaaaataccaaagagggaagggggatgtggaaagaacttggcaaatcctttctaacgttcgtctggaaattagagaaacccaaatgctcaacaataggagatgattaattagatcatcctaataattatagctcacatttattaagcacagtaaatgtgtttcacctcaacagtcacacttgatcctgaaaaaaaacgctatgcgaaaatgacgagtataatttcggttttacaggcagggtaatggaggtctctttcggttccgtaaccatccaaaggtcacccatttgatcaaaagcagagccacgaagcattggccctggaactcttgctctcagccactgtgctattcatgagatgaatgcatatgcttcctaaaaagattatgatcacatttatttgtactgccaaggcaataagtccgtcatactttattgacagggggagaaaaataggttactgaacagtttgcacagtatggtcttatttttgttttttagacaaaggtaggtaatatcttacgaaagatccagaaagacatggaacagaaggtgactggtgtttctctgagagagaggcggaggtgacagaagagttgaggtttccatatgtcaatacagtatcaatgtttaattattggaaggttttattttaattatcagataaagaacccgaggggccaagaaattccactgctagtggtggtagagccgagattcagattgagtctgtcctccaaacctgtgcttcttctaacctctctctcgggattttcctcttctgttgccgtgctgcacttgccctctgggattgaacccacaattgtaggcaaccactgcccttgtattactgataaacttgtgcaaacgaatgccattgctcctctatcttatcacttaaaacttctttctggccgggcacggtggctcacgcctgtaatcccagcacttttgggaggccgaggcaggcagatcacctgaagtcaggagttcgagaccagcctggtcaacatggtgaaaccccgtctctactaaaaatacaaaaaaagttagctgggcgtggtggcatgtgcctgtaatcccagctactcgggaggctgaaacaggagaattgctcgaacccaggaggcagagattgcagtgagctgagatcacaccattgcactccagcctgggtgacagggtaagacttcatctcaaaaaaacaaaaaacaaaaaaaccatttttgtcctagacacctaaataacatcctatggctgatggttgtttttgccaattttgcaaagcgtggggtgaattaaagtatcctgcacgtgtgctttctgcagtgcgaccagggtggcctcgtccctcccgcctccttattatgcatgatcagagtagagccctgtttaggaaaagcactgaactgggcattcagagccctgggctccagtcccggcacagccactggctcttcacttctcccctccagacccactttacttccctgtacaattcaggatggtgaaagctctcaagnccttttttttttttttttttttttgagacggagtcttgctctgtcgcccaggctggagtgcagtggtgcagtggtgcagtctcggctcactgcaatctctgcctcctgggttcaagcaattctctgcctcagcctccggagtagctgggattacaggtgtccaccaccacacccggctagttttttgtatttcctgtagagacaggacctcaccatgttggccaggctggttttgaactcctgacctcaagtgatccacctgcctcggcctcccaaagtgctgggattacaggcatgaaccaccgtgcccggccttgtctatcctatttttaaaatgaacatctctagagccatccccggcggttgcagggacagtctgataagtgaactaagtttctatgcataaatgcttgcctctgggcctcctcgctgctgaccggtgtggttttggccgcaggtgggtggagccgctgactgccgagggcagagcctcgcttcggtgcccagcagcctcccgccccacgcccggatgctcaccctggatgccaaccctctcaagaccctgtggaatcactccctccagccttaccctctcctggagagcctcagcctgcacagctgccacctggagcgcatcagccgcggcgccttccaggagcaaggtcacctgcgcagcctggtcctgggggacaactgcctctcagagaactacgaagagacggcagccgccctccacgccctgccgggcctgcggaggctggacttgtcaggaaacgccctgacggaggacatggcagccctcatgctccagaacctctcctcgctgcggtccgtgtccctggcggggaacaccatcatgcggctggacgactccgtcttcgagggcctggagcgtctccgggagctggatctgcagaggaactacatcttcgagatcgagggcggcgctttcgacggcctggctgagctgaggcacctcaacctggccttcaacaacctcccctgcatcgtggacttcgggctcacgcggctgcgggtcctcaacgtcagctacaacgtcctggagtggttcctcgcgaccgggggagaggctgccttcgagctggagacgctggacctgtctcacaaccagctgctgttcttcccgctgctgccccagtacagcaagttgcggaccctcctgctgcgcgacaacaacatgggcttctaccgggacctgtacaacacctcgtcgccgagggagatggtggcccagttcctcctcgtggacggcaacgtgaccaacatcaccaccgtcagcctctgggaagaattctcctccagcgacctcgcagatctccgcttcctggacatgagccagaaccagttccagtacctgccagacggcttcctgaggaaaatgccttccctctcccacctgaacctccaccagaattgcctgatgacgcttcacattcgggagcacgagccccccggagcgctcaccgagctggacctgagccacaaccagctgtcggagctgcacctggctccggggctggccagctgcctgggcagcctgcgcttgttcaacctgagctccaaccagctcctgggcgtcccccctggcctcttcgccaatgctaggaacatcactacacttgacatgagccacaatcagatctcactttgtcccctgccagctgcctcggaccgggtgggcccccctagctgtgtggatttcaggaatatggcatctttaaggagcctgtctctggagggctgtggcctgggggcattgccagactgcccattccaagggacctccctgacctacttagacctctcaagcaactggggggttctgaatgggagcctcgccccactccaggatgttgcccccatgttacaggtcctgtctctcaggaacatgggcctccactccagctttatggcgttggacttctctgggtttgggaatctcagggacttagatctgtcggggaattgcttgaccaccttcccaaggtttgggggcagcctggccctggagaccctggatctccgtagaaactcgctcacagcccttccccagaaggctgtgtctgagcagctctcgagaggtctgcggaccatctacctcagtcagaatccatatgactgctgtggggtggatggctggggggccctgcagcatgggcagacggtggccgactgggccatggtcacctgcaacctctcctccaagatcatccgcgtgacggagctgcccggaggtgtgcctcgggactgcaagtgggagcggctggacctgggcctgctctacctcgtgctcatcctccccagctgcctcaccctgctggtggcctgcactgtcatcgtcctcacttttaagaagcctctgcttcaggtcatcaagagccgctgccactggtcctccgtttactgacctggctgtgtgccaagactcgaaattcggtccgcacacaacaggacactttctctgccagctttcaagatgtgatgcagaggccaagtctgacgaattgaagtttcaattaaaatttaatatgtttccattcctcatcgcccaccccacccccgcccccaccaccgcccaagttctttttccatcattataattcatcctcattatcttggtaaaatatttattaagtgactttttcagaaataaaaggcaacgtgtctcataaatattttttaaattaaatgca

SEQ ID NO: 990 - DNA, 463 bp, Homo sapiens
tgtagtaaggggagttggcctggcctgaagtgaaagctggcttacccggtttcattgagctcttcaattagtctgtttgcactggtgagcattcaaatctgatcaagaaggtaaaatgagctttcaagatccctaaatgcatttgaagaaaggaaagaggaggcccctgagtggctggagcgagcaggtggggtgagctggtgccgctggcccaggagaagatgggagggcagacactgggcctccggtaggtgtcaaggaatgggcagatggaatgctggggccagctcttgcctctgggtctgcagaatgcagagctgggggcatgcactgggcgtcaggtccccagcagggcagcagtgagtgcagcctcgctgctgggagaaactgccctgctcactcatcggagctcggggagcgaggcggggctgctcttagccctgccactaagttcatccacaac

SEQ ID NO: 991 - DNA, 1880 bp, Homo sapiens
aaaaaaaggcggtgggggaaattatctccacaaaacaaaaagtccggcaataagcaataagctgtccagggctgatacagggcatgatgaggtcatcacagatccaggttctttctgttttttgctctgcattcgtagcctgtggctttgtcattccctcatctggaaatggcggctgcagccccaggcacaatggcccgttgaggaagaagggggacgatgtgcagtgtcaggttattttatcaggaaagttcaaagcttctcagaaatcttctgttggaattctacctgggtgtcataggccagaacacaacccaaataaccaggaaaaatgtgaaagtgagaaaatagatcgtccacccctaacaatggaggcagcaagtgagaggggattgggaatgtgtgttgatttcctcaacagtgtttgacataaccactttctagctttataatcttaggcaagtaactcaacttcccagttcctcttctgtaaaatggggataacacctgaaaaggttgttacaagattcactgaaatagtttctatgctcagtcagtaatcagcattcaatcaatatgagctctaacatgatgcttgacagttatgcaacgaacagttcatgaagagctttgtaagccatattgataattttgtctttatccttagcacagtgagaaggtattaaaggattttatgcagggaagtgacatgatcatatttgtgttttcaaaagagccctcaggctgggtgtggtaacttgcgcctgtaatcccagcactctgggaggccatggcaggcggtgggcggatcgcttgagcccaggagttccggaccagcatgggcaacttggggaaaccccacctctaaaaaaaaaatgccaaaaaaattttagctgggtgtggtggcactcgcctgtagtcccagctgctcgggaggctgaggtgagagaatcacctgagcctgggagaggctgtagtcagctgtgattgcgccatgcactccagcctgggtgacacagtgagaccctgtctcaaaaaataaataaaaaataaaaaaaggagccctcaatttatcctctgcctctgacaaatatattccattttgttacattgcaaaaatttcagcacattgctttgcttacccatctttgctctggaacgacttttaattcttcttttggcaatcttggttgttttgagatgtgtgaaattagaatcatatgcaggtgtttgagttcttttgattttgctttttaaaagagttttttttttgttttgttttgttttgtttttagaatggggcaatgtaaagccagaatatcaacgtccttttgtcaagattttcaaacctatttggctgatagtgcacttacaagaataggtaaaaaagatcccaaagattttacttcacttacttgaactactagccctactattaagagccacatcaagctttacatgttcataaaaaaaaaaaaaaagagctgcaacattcctttcgcactcccactcgcccatgaggttcttccacttccttcctatggctttttttagaagcgagtgtgtttttctcacgtccggcaacaaaggatgttttgtgctactactgaggtttgtgtgtgtgacttactttagaactctttctagaaaatgcgattactatttgcataggtctggtagaactttgtattgagtgaaagtctccgatgactgtttttgtttttgtgtagatttgccactgcttaacatcaaatcactttcccctgtgtgttttaaaatacctctaataggacctgtcaaaattctcccagaagtctcacaaattcttacctttaaagaaagtgtaagtgataccttcagtgtattgtatttattcttat

SEQ ID NO: 992 - DNA, 1470 bp, Homo sapiens
aaaaaaaggcggtggggggaaattatctccacaaaacaaaaagtccgacaataagcaataagctgtccagggctgatacagggcatgatgaggtcatcacagatccaggttctttctgtcttctgctctgcattcgtagcctgtggctttgtcattccctcatctggaaatggcggctgcagccccaggcacaatggcccgttgaggaagaagggggacgatgtgcagtgtcaggttattttatcaggaaagttcaaagcttctcagaaatcttctgttggaattctacctgggtgtcataggccagaacacaacccaaataaccaggaaaaatgtgaaagtgagaaaatagatcgtccacccctaacaatggaggcagcaagtgagaggggattgggaatgtgtgttgatttcctcaacagtgtttgacataaccactttctagctttataatcttaggcaagtaactcaacttcccagttcctcttctgtaaaatggggataacacctgaaaaggttgttacaagattcactgaaatagtttctatgctcagtcagtaatcagcattcaatcaatatgagctctaacatgatgcttgacagttatgcaacgaacagttcatgaagagctttgtaagccatattgataattttgtctttatccttagcacagtgagaaggtattaaaggattttatgcagggaagtgacatgatcatatttgtgttttcaaaagagccctcaggctgggtgtggtaacttgcgcctgtaatcccagcactctgggaggccatggcaggcggtgggcggatcgcttgagcccaggagttccggaccagcatgggcaacttggggaaaccccacctctaaaaaaaaaatgccaaaaaaattttagctgggtgtggtggcactcgcctgtagtcccagctgctcgggaggctgaggtgagagaatcacctgagcctgggagaggctgtagtcagctgtgattgcgccatgcactccagcctgggtgacacagtgagaccctgtctcaaaaaataaattaaaaataaaaaaaggagccctccatttatcctctgcctctgacaaatatattccattttgttacattgcaaaaatttcagcacattgctttgcttacccatctttgctctggaacgacttttaattcttcttttggcaatcttggttgttttgagatgtgtgaaattagaatcatatgcaggtgtttgagttcttttgattttgctttttaaaagagttttttttttgtttggtttggtttgttttaagaatggggcaatgtaaagccagaatatcaacgtcctttggtcaagattttcaaacctattgggctgatagtacacttacaagaataggtaaaaaagatcccaaagattttacttcacttacttgaactactagccctactattaagagccacagcaagcttacatgttcaaaaaaa

SEQ ID NO: 993 - DNA, 3332 bp, Homo sapiens
aaaaaaaggcggtggggggaaattatctccacaaaacaaaaagtccgacaataagcaataagctgtccagggctgatacagggcatgatgaggtcatcacagatccaggttctttctgtcttctgctctgcattcgtagcctgtggctttgtcattccctcatctggaaatggcggctgcagccccaggcacaatggcccgttgaggaagaagggggacgatgtgcagtgtcaggttattttatcaggaaagttcaaagcttctcagaaatcttctgttggaattctacctgggtgtcataggccagaacacaacccaaataaccaggaaaaatgtgaaagtgagaaaatagatcgtccacccctaacaatggaggcagcaagtgagaggggattgggaatgtgtgttgatttcctcaacagtgtttgacataaccactttctagctttataatcttaggcaagtaactcaacttcccagttcctcttctgtaaaatggggataacacctgaaaaggttgttacaagattcactgaaatagtttctatgctcagtcagtaatcagcattcaatcaatatgagctctaacatgatgcttgacagttatgcaacgaacagttcatgaagagctttgtaagccatattgataattttgtctttatccttagcacagtgagaaggtattaaaggattttatgcagggaagtgacatgatcatatttgtgttttcaaaagagccctcaggctgggtgtggtaacttgcgcctgtaatcccagcactctgggaggccatggcaggcggtgggcggatcgcttgagcccaggagttccggaccagcatgggcaacttggggaaaccccacctctaaaaaaaaaatgccaaaaaaattttagctgggtgtggtggcactcgcctgtagtcccagctgctcgggaggctgaggtgagagaatcacctgagcctgggagaggctgtagtcagctgtgattgcgccatgcactccagcctgggtgacacagtgagaccctgtctcaaaaaataaataaaaaataaaaaaaggagccctcaatttatcctctgcctctgacaaatatattccattttgttacattgcaaaaatttcagcacattgctttgcttacccatctttgctctggaacgacttttaattcttcttttggcaatcttggttgttttgagatgtgtgaaattagaatcatatgcaggtgtttgagttcttttgattttgctttttaaaagagttttttttttgttttgttttgttttgtttttagaatggggcaatgtaagccagatatcaacgtcctttggtcagattttcaaacctattgggctgatagtacacttacaagaataggtaaaaaagatcccaaagattttacttcacttacttgaactactagccctactattaagagccacagcaagcttacatgttcaaaaaaaaaaaaaaaagagctgcaacattcctttcgcactcccactcgcccctgaggttcttccacttccttcctatggctttttttagaagcgagtgtgtttttctcacgtccggcaacaaaggatgttttgtgctactactgaggtttgtgtgtgtgacttactttagaactctttctagaaaatgcgattactatttgcataggtctggtagaactttgtattgagtgaaagtctccgatgactgtttttgtttttgtgtagatttgccactgcttaacatcaaatcactttcccctgtgtgttttaaaatacctctaataggacctgtcaaaattctcccagaagtctcacaaattcttacctttaaagaaagtgtaagtgataccttcagtgtattgtatttattcttatatacctttgcaaagacttctcatcacttccttaaatatgtctgatagtgccataatgagaaggggacatggtaattaaccatcaactttggttttcatggagaaaatctatctggagcagtcacagtatcctatgctggagctatcagatgccttgacattagatgtttccatctaattgtaattctctgagcaaggagacaaggtgggataaacagaattctcagatggctgagaattataccctaaatcctgggagagaatttacctttccattgtcagataatatgaatcatttaaaacatgtgctggaacagctttgccttttcttgaggaaaatggggtttctctctcaaagagaaagataaatgcgcctcagaagattttagtggtcgatctctgtcagtgtactaccagcaaaaatcccagcaatcaatattacaaagaggcagcactcacttgagtacagaagtaacaacattagctgcttcgtaaacaagatggcatgggagatattctgttttgagtaaatgacaagtcctacagtctagataggaagatttctcctccatatggattttgtgatttcgtcttgtgttgagtaaggaaggggagcttggattccaagatcaatttaatgtctatattccttggcattgtcatgttagagcagcacatctcagatggctttcaatagttattttagcattgattttcctctactagagtaaatcaaaagatgatttagaaaatcaaagtcagttttccttggagttttctcagaataaagggaagctgtggtgttgaagggtttttttggctcctatttacatatgatgcaaaatcaatctgtgtgaatctctttcctctgttgagctctactataggctctactatatgcagagccttgggtatttctgtgcgagggggattatgcaaaagaattttaaggcatgccacttgactttgtgaaaccaagtatttgtttaaagagacacgatattatagtgggaggctgttttgtgagaacccacactttcatgtcagcaccctgagatgggatcccattacgccctttaaccaggcaagggactttatgcagttcttcgtcaggaaaatggagacaattaaactgcttttctcataggttgttgtgtaaaaggcagcaagatgtggctgtgtaagaacatgactgaagccagactgcttatgcttaaaacctaggtgagctgtttacacctgatatgaccttggacaagtctcatctaacttctcttgcctcaggtgcctcatctgaagatagcagtgatgttagtgtctgcctcctgcctcataagcctgtcatgttgagaccatcctggccaacatggtgaaaccccgtctctactaaacatacaaaaattagccaggcatggtgacacgcgcctgtagtcccagctacttgggaggctgaggca

SEQ ID NO: 994 - DNA, 3482 bp, Homo sapiens
gcgccaccaccgccgagaccgcgtccgccccgcgagcacagagcctcgcctttgccgatccgccgcccgtccacacccgccgccaggtaagcccggccagccgaccggggcaggcggctcacggcccggccgcaggcggccgcggccccttcgcccgtgcagagccgccgtctgggccgcagcggggggcgcatggggggggaaccggaccgccgtggggggcgcgggagaagcccctgggcctccggagatgggggacaccccacgccagttcggaggcgcgaggccgcgctcgggaggcgcgctccgggggtgccgctctcggggcgggggcaaccggcggggtctttgtctgagccgggctcttgccaatggggatcgcagggtgggcgcggcggagcccccgccaggcccggtgggggctggggcgccattgcgcgtgcgcgctggtcctttgggcgctaactgcgtgcgcgctgggaattggcgctaattgcgcgtgcgcgctgggactcaaggcgctaactgcgcgtgcgttctggggcccggggtgccgcggcctgggctggggcgaaggcgggctcggccggaaggggtggggtcgccgcggctcccgggcgcttgcgcgcacttcctgcccgagccgctggccgcccgagggtgtggccgctgcgtgcgcgcgcgccgacccggcgctgtttgaaccgggcggaggcggggctggcgcccggttgggagggggttggggcctggcttcctgccgcgcgccgcggggacgcctccgaccagtgtttgccttttatggtaataacgcggccggcccggcttcctttgtccccaatctgggcgcgcgccggcgccccctggcggcctaaggactcggcgcgccggaagtggccagggcgggggcgacctcggctcacagcgcgcccggctattctcgcagctcaccatggatgatgatatcgccgcgctcgtcgtcgacaacggctccggcatgtgcaaggccggcttcgcgggcgacgatgccccccgggccgtcttcccctccatcgtggggcgccccaggcaccaggtaggggagctggctgggtggggcagccccgggagcgggcgggaggcaagggcgctttctctgcacaggagcctcccggtttccggggtgggggctgcgcccgtgctcagggcttcttgtcctttccttcccagggcgtgatggtgggcatgggtcagaaggattcctatgtgggcgacgaggcccagagcaagagaggcatcctcaccctgaagtaccccatcgagcacggcatcgtcaccaactgggacgacatggagaaaatctggcaccacaccttctacaatgagctgcgtgtggctcccgaggagcaccccgtgctgctgaccgaggcccccctgaaccccaaggccaaccgcgagaagatgacccaggtgagtggcccgctacctcttctggtggccgcctccctccttcctggcctcccggagctgcgccctttctcactggttctctcttctgccgttttccgtaggactctcttctctgacctgagtctcctttggaactctgcaggttctatttgctttttcccagatgagctctttttctggtgtttgtctctctgactaggtgtctaagacagtgttgtgggtgtaggtactaacactggctcgtgtgacaaggccatgaggctggtgtaaagcggccttggagtgtgtattaagtaggtgcacagtaggtctgaacagactccccatcccaagaccccagcacacttagccgtgttctttgcactttctgcatgtcccccgtctggcctggctgtccccagtggcttccccagtgtgacatggtgtatctctgccttacagatcatgtttgagaccttcaacaccccagccatgtacgttgctatccaggctgtgctatccctgtacgcctctggccgtaccactggcatcgtgatggactccggtgacggggtcacccacactgtgcccatctacgaggggtatgccctcccccatgccatcctgcgtctggacctggctggccgggacctgactgactacctcatgaagatcctcaccgagcgcggctacagcttcaccaccacggccgagcgggaaatcgtgcgtgacattaaggagaagctgtgctacgtcgccctggacttcgagcaagagatggccacggctgcttccagctcctccctggagaagagctacgagctgcctgacggccaggtcatcaccattggcaatgagcggttccgctgccctgaggcactcttccagccttccttcctgggtgagtggagactgtctcccggctctgcctgacatgagggttacccctcggggctgtgctgtggaagctaagtcctgccctcatttccctctcaggcatggagtcctgtggcatccacgaaactaccttcaactccatcatgaagtgtgacgtggacatccgcaaagacctgtacgccaacacagtgctgtctggcggcaccaccatgtaccctggcattgccgacaggatgcagaaggagatcactgccctggcacccagcacaatgaagatcaaggtgggtgtctttcctgcctgagctgacctgggcaggtcggctgtggggtcctgtggtgtgtggggagctgtcacatccagggtcctcactgcctgtccccttccctcctcagatcattgctcctcctgagcgcaagtactccgtgtggatcggcggctccatcctggcctcgctgtccaccttccagcagatgtggatcagcaagcaggagtatgacgagtccggcccctccatcgtccaccgcaaatgcttctaggcggactatgacttagttgcgttacaccctttcttgacaaaacctaacttgcgcagaaaacaagatgagattggcatggctttatttgttttttttgttttgttttggttttttttttttttttggcttgactcaggatttaaaaactggaacggtgaaggtgacagcagtcggttggagcgagcatcccccaaagttcacaatgtggccgaggactttgattgcacattgttgtttttttaatagtcattccaaatatgagatgcgttgttacaggaagtcccttgccatcctaaaagccaccccacttctctctaaggagaatggcccagtcctctcccaagtccacacaggggaggtgatagcattgctttcgtgtaaattatgtaatgcaaaatttttttaatcttcgccttaatacttttttattttgttttattttgaatgatgagccttcgtgcccccccttcccccttttttgtcccccaacttgagatgtatgaaggcttttggtctccctgggagtgggtggaggcagccagggcttacctgtacactgacttgagaccagttgaataaaagtgcacaccttaaaaatgaggccaagtgtgactttgtgg

SEQ ID NO: 995 - DNA, 1820 bp, Homo sapiens
gccgagactgcatccgccttgcgagcacagagcctcgccttcgctgctccactgccagtccacacctgccaccagctcaccatggatgatgatatcaccgcgctcgtcattgacaacggctccggcatgtgcaaggccagcttcacgggcgacaatgccgcccgggcagtcttcccctccatcgttgggcaccccaggcaccagggcgtgatggtgggcatgggtcagaaggattcctatgtgggcgacgaggcccagagcaagagaggcatcctcaccctgaagtaccccattgagcacggcattgtcaccaactgggacgacatggagaagatctggcaccacaccttctacaatgagctgcgcgtggctcccgaggagcaacccatgctgctgtttgaggcccccctgaaccccagggccaactgcaagaagatgacccagatcatatttgagaccttcaacaccccagccatgtacttggccatccagactatgctgtccctgtacgcctctggccgtaccactggcatcgtgttggactccagtgatggggtcacccacactgtgcccatctacgaggggtatgccctccccaacgccatcctgcttctggacctggctggccgggacctgactacctcatgaagatcctcaccgagcgccgctacagcttcatcaccacgcggagcgggaaatcatgcgtaacatcaaggagaagctgtgctacctcgtcctggacttcgagcaggagatggctaccgcggcttccagctcctccctggagaagagctaccagctgcccaacagccaggtcatcaccattggcaacgagtggttctgctgccccgaggcgctcttccagccttccttcctgggcatggagtcctgtggcatccacgaaactaccttcaactccatcatgaagtgtgacttggacatccgcaaagacctgtacaccagcacagtgctgtctggtggcaccactatgtaccctggcattgctgacaggatgcagaaggagattaccgccctggcgcccagcaggacgaagatcaagatcattgctcctcctgagcgcaagtactctgtgtggattggaggctccatcctggcctcgctgtccaccttccagcagatgtggatcagcaagcaggagtatgaggagtctggccctccatcgttcaccgcaaatgcttctaggcggactgtgacttagttgtgttacaccttttcttgacaaaacctaacttgtgcaggaaacaagataagattggcatggctttatttgtttttttgttttgttttgtttttttggttttttttggcttgactcaggatttaaaaactggaacagtgaaggtgacagcagtcggttggagcgagcatcccccaaagttctacagtgtggccgaggactttgattgtacattgttcttttttttaatagtcattccaaatatcatgggatgcattgttacaggaagtcccttgccatcctaaaagccaccccacttctgtctaaggagaatggcccagtcgtctaccgagtccacacaggggaggtgatagcattgctttcgtgtaaattatggaatgcaaaatttttttaatcttcgccttaatactttcttattttttttattttgaatgatgagccttcgtgcccccccccccttttttgtcccccagcttgagatgtatgaaggcttttggtgtccctgggagtgggtgaaggcagccagggcttacctgtgcactgacttgagaccagttgaataaaagtgcacacacacacacataaaaagatctacattcca

SEQ ID NO: 996 - DNA, 1820 bp, Homo sapiens; identical to SEQ ID NO: 995

SEQ ID NO: 997 - DNA, 1823 bp, Homo sapiens
accgccgagactgcatccgccttgcgagcacagagcctcgccttcgctgctccactgccagtccacacctgccaccagctcaccatggatgatgatatcaccgcgctcgtcatcgacaacggctccggcatgtacaaggccggcttcacgggcgacaatgccacccgggcagtcttcccctccatcgttgggcaccccaggcaccagggcgtgatggtgggcatgggtcagaaggattcctatgtgggcgacgaggcccagagcaagagaggcatcctcaccctgaagtaccccattgagcacggcattgtcaccaactgggacgacatggagaagatctggcaccacaccttctacaatgagctgcgcgtggctcccgaggagcaacccatgctgctgtttgaggcccccctgaaccccagggccaactgcaagaagatgacccagatcatatttgagaccttcaacaccccagccatgtacttggccatccagactatgctgtccctgtacgcctctggccgtaccactggcatcgtgttggactccagtgatggggtcacccacactgtgcccatctacgaggggtatgacctccccaacgccatcctgcgtctggacctggctggccgggacctgactacctcatgaagatcctcaccgagcgccgctacagcttcatcaccacgcggagcgggaaatcatgcgtaacatcaaggagaagctgtgctacctcgtcctggacttcgagcaggagatggctaccgcggcttccagctcctccctggagaagagctaccagctgcccaacagccaggtcatcaccattggcaacgagtggttctgctgccccgaggagctcttccagccttccttcctgggcatggagtcctgtggcatccacgaaactaccttcaactccatcatgaagtgtgacttggacatccgcaaagacctgtacaccagcacagtgctgtctggcggcaccactatgtaccctggcattgctgacaggatgcagaaggagattaccgccctggcgcccagcaggatgaagatcaagatcattgctcctcctgagcgcaagtactctgtgtggattggaggctccatcctggcctcgctgtccaccttccagcagatgtggatcagcaagcaggagtatgaggagtctggccctccatcgttcaccgcaaatgcttctaggtggactgtgacttagttgtgttacaccttttcttgacaaaacctaacttgtgcaggaaacaagataagattggcatggcttaatttgtttttttgttttgttttgtttttttggttttttttggcttgactcaggatttaaaaactggaacagtgaaggtgacagcagtcggttggagcgagcatcccccaaagttctacagtgtggccgaggactttgattgtacattgttcttttttttaatagtcattccaaatatcatgggatgcattgttacaggaagtcccttgccatcctaaaagccaccccacttctgtctaaggagaatggcccagtcgtctaccgagtccacacaggggaggtgatagcattgctttcgtgtaaattatggaatgcaaaatttttttaatcttcgccttaatactttcttattttttttattttgaatgatgagccttcgtgcccccccccccttttttgtcccccagcttgagatgtatgaaggcttttggtgtccctgggagtgggtgaaggcagccagggcttacctgtgcactgacttgagaccagttgaataaaagtgcacacacacacacataaaaagatctacattcca

SEQ ID NO: 998 - DNA, 2558 bp, Homo sapiens
  misc_feature (1424)..(1424): n equals a,t,g, or c
agcgcgcccgactattctcgcagatcaccatggatgatgatatcgccgcgctcgtcgtcgacaacggctccggcatgtacaagagccggttcgcgggcgacgatcgtccccggaccgtattcccatccatcgtggggcgccccaggcaccagctagaggagctggctggttggtacatccccgggagcgggcgggaggcaagggcgctttctctgcacaggagccttccgggtttccgggggtgcggtgcgcccgtgctcagggcttcttgtcctttccttcccagggcgtgatggtgggcatgggtcagaaggattcctatgtgggcgacgaggcccagagcaagagaggcatcctcaccctgaagtaccccatcgagcacggcatcgtcaccaactgggacgacatggagaaaatctggcaccacaccttctacaatgagctgcgtgtggctcccgaggacaccccgtgctgctgaccgaggcccccctgaaccccaaggccaaccgcgagaagatgacccaggtgagtggcccgctacctcttctggtggccgcctccctccttcctggcctcccggagctgcgccctttctcactggttctctcttctgccgttttccgtaggactctcttctctgacctgagtctcctttggaactctgcaggttctatttgctttttcccagatgagctctttttctggtgtttgtctctctgactaggtgtctaagacagtgttgtgggtgtaggtactaacactggctcgtgtgacaaggccatgaggctggtgtaaagcggccttggagtgtgtattaagtaggcgcacagtaggtctgaacagactccccatcccaagaccccagcacacttagccgtgttctttgcactttctgcatgtcccccgtctggcctggctgtccccagtggcttccccagtgtgacatggtgcatctctgccttacagatcatgtttgagaccttcaacaccccagccatgtacgttgctatccaggctgtgctatccctgtacgcctctggccgtaccactggcatcgtgatggactccggtgacggggtcacccacactgtgcccatctacgaggggtatgccctcccccatgccatcctgcgtctggacctggctggccgggacctgactgactacctcatgaagatcctcaccgagcgcggctacagcttcaccaccacggccgagcgggaaatcgtgcgtgacattaaggagaagctgtgctacgtcgccctggacttcgagcaagagatggccacggctgcttccagctcctccctggagaagagctacgagctgcctgacggccaggtcatcaccattggcaatgagcggttccgctgccctgaggcactcttccagccttccttcctgggtgagtggagactgtctcntcgctctgcctgacatgagggttacccctcggggctgtgctgtggaagctaagtcctgccctcatttccctctcaggcatggagtcctgtggcatccacgaaactaccttcaactccatcatgaagtgtgacgtggacatccgcaaagacctgtacgccaacacagtgctgtctggcggcaccaccatgtaccctggcattgccgacaggatgcagaaggagatcactgccctggcacccagcacaatgaagatcaaggtgggtgtctttcctgcctgagctgacctgggcaggtcagctgtggggtcctgtggtgtgtggggagctgtcacatccagggtcctcactgcctgtccccttccctcctcagatcattgctcctcctgagcgcaagtactccgtgtggatcggcggctccatcctggcctcgctgtccaccttccagcagatgtggatcagcaagcaggagtatgacgagtccggcccctccatcgtccaccgcaaatgcttctaggcggactatgacttagttgcgttacaccctttcttgacaaaacctaacttgcgcagaaaacaagatgagattggcatggctttatttgttttttttgttttgttttggttttttttttttttttggcttgactcaggatttaaaaactggaacggtgaaggtgacagcagtcggttggagcgagcatcccccaaagttcacaatgtggccgaggactttgattgcacattgttgtttttttaatagtcattccaaatatgagatgcattgttacaggaagtcccttgccatcctaaaagccaccccacttctctctaaggagaatggcccagtcctctcccaagtccacacaggggaggtgatagcattgctttcgtgtaaattatgtaatgcaaaatttttttaatcttcgccttaatacttttttattttgttttattttgaatgatgagccttcgtgcccccccttcccccttttttgtcccccaacttgagatgtatgaaggcttttggtctccctgggagtgggtggaggcagccagggcttacctgtacactgacttgagaccagttgaataaaagtgcacaccttaaaaatgaggccaagtgtgactttgtgg

SEQ ID NO: 999 - DNA, 216 bp, Homo sapiens
gggggccacggcgcgcgcccccagcccccgggcccagcaccccaaggcggccaacgccaaaactctccctcctcctcttcctcaatctcgctctcgctctttttttttttcgcaaaaggaggggagagggggtaaaaaaatgctgcactgtgcggcgaagccggtgagtgagcggcgcggggccaatcagcgtgcgccgttccgaaagttgccttt

SEQ ID NO: 1000 - DNA, 231 bp, Homo sapiens
ggtctctgttcctgcttattggggagttcctggcctggcccttctatgtctccccaggtaccccagtttttctgggttcacccagagtgcagatgcttgaggaggtgggaagggactatttgggggtgtctggctcaggtgccatgcctcactggggctggttggcacctgcatttcctgggagtggggctgtctcagggtagctgggcacggtgttcccttgagtggggg

SEQ ID NO: 1001 - DNA, 231 bp, Homo sapiens; identical to SEQ ID NO: 1000

SEQ ID NO: 1002 - DNA, 4481 bp, Homo sapiens
gcagatgcgaaccagaacaatgggacctcctctcaggacacagcggtgactgactccaagcgcacagcggacccgaagaatgcctggcaggatgcccacccagctgacccagggagccgcccccacttgatccgcctcttttcccgagatgccccggggagggaggacaacaccttcaaagacaggccctctgagtccgacgagctccagaccatccaagaagacagtgcagccacctccgagagcctggatgtgatggcgtcacagaagagaccctcccagaggcacggatccaagtacctggccacagcaagtaccatggaccatgccaggcatggcttcctcccaaggcacagagacacgggcatccttgactccatcgggcgcttctttggcggtgacaggggtgcgcccaagcggggctctggcaaggtgagctctgaggagtagaggagttttagtttaaatggaaaaagcaaaggagaaatcagtaggtgaactcagccattagaggaagaactggcacgtagcctcttgctgtctaaggtctcgttccgtgctggagaatgcatatgagcccaagagtgtgggcctgagtggctgcttaggacgttttcgtttaactcaccccctcttttcctcacaagggatggtggccggggtgtggctcaggaatgtaaggacatgctgaattctggatctctaagggtgcctggacatgggcgttgcagaaagagagccacattctcagggtctctggtggtgtgtgcttgcggacttgatgactgatgttgcctctgcagcccacacgctggggttcaacactgggttatgctcgttttttcctggagtcagtgctgctagcttcatgttgctctgcgacaatcataggattgaggtcgaggaagacttttgaacaaactcctcaatttaaatccgccttgagcaaacgttctctgtggtctgagaagtggaaggggggagggataaatgagtgtctatgaatcaaagctttattatcttgtgattccattaatttgcatacagagtcttagaagtttctttattcaaaagcaaatgtggataaaaatgtattacaaaaaaaaaaaactctgctatggggtccagagtctaggagtggtttctgcagttgattgtcagtggagaacctgtggctgctggttcatcaaagcgctggtccctgagtgccattcagattgcagatgcagtattttacgtgatgtttagagtgtttggtggttgtgtaattttggagagaaagaagtttttcccaaaaaagtccctagtttattgggtgttctcacacaacctgtaagatgaagctgtttttctgcctgtgtgcagggctgattctggaattccagaaggccttgtgggagcgtaaaaggcttttgaataaagtgtggaacagagcgcctcattctgataacatgcaatcataaaaaccatagggcaacttggagttaaggagtttctagaatttgctttagtctccaactgcaattctttattgatcatgaaattgttgaagagaaacacaaatgtcagttttacctttcctgtgggcgtgaaagcacatcgaagtttcaggcaactgttaacatctctaccatctgtctgagttgagatttcaggttgtgacacttgccgtgacttatttgtaaatgacattttgtgtgtcttagatactaatggaattcatattctggctagttctttcagtgcatttgtagacatgttcttttcctttgtagcagtcctccctcaccctgaaatgttggtgttctaaccgatttctaatgctaatttcaactggaagcactttttcaagcccagctatcaaaccacaccagacatgtatggattcgggttgcccaataaagcgttgctattatgtaagcatccctcacgcatacagcatcaccagttttgaaagcttgaactattctgcttacttcaaggtacagaaaaaaaaaatgtacttaaactgtgcagaaaagatgaaatcactggataatatgtattataaaataagcttcatgtgagtgacactggtttaagttgaaataaaatggtgaaagcattgatatcaatcattgtgactttatctcaaaacaatattgacacacatagatgtttttcttcctttatggtaagattacagcctttattgtcttaaatctcttatactcttcaatattttcaaagaaaacattctagtctcagaaatagtccatctctttgcaaaacagggctggccaattatcaaggacccataaaaatcaaaacactttcaaaaattttaaaaataaaaataattttcacatgattgctttaggaattttgaagtatccattcttttcactatggagtgttgaatatagaagattttttaatgaacaggcttgccctttgatgccaaaggcaaaaaataataataataacatttgcacgtgtgatcacagagcagctgtgaggcatcccgggggagcgcacgcagtggggatgtgattgctccactcaactattttatcacaaagtgttgtaaacatgggagatgaaagcttaactctctctacacccagctacagacccgcaatggccctaaaaatctggggtattcattgggtgggctgccatggaggaatttttggttttgtttttatttttatttgttgttctgtttacaaatcaggagagcccctgtttttatatgctaggaaggtccttgggataggccgaagaggtgtgcaaacgagcagtggaaggcccgggccctgtctctcaggaccacggcggcctgccccacacacagttctgcttctccctatctagaacgaggttttcctggcagattcctgccagactctgagtggagcccccccatgaccctataaaaggggctgtttgtcctcctcccaccctcctgtgctcttcctccctccccttgagggcacatggccgctggtaccacatgttggagcggccgcccccgagcccgggaatgccctaacaacacccatgcttgtgttgctgggagctgacattcaagaaaagtgcattaaaaattccttgagaaggcatattcttttgagagccgtaaatgaaaagtgcattcacggagaacatgctcctttgttgtgagaggaaagaaaggactgttgttgcctttaaggaacaggtttcccagttccccggaatgtcagggtcacatgaggaatgggtgagcacttagggccaagattgtcgtgtgcttggcccggcagcttctctctaagtgacctctccagcatcactctgtgccagtgctcatatctgaggccacttgagtgtcacgaggcagagcctggaaacattagctttggaaaccgttccttcctttttatgtggaggaagtaaggtttcacaagacacctaagctggacatggtgatgtgccacttggatagttcccaaagcagaaagcagccaggacatcccagtaccccacttctccgtgccgtgtacttttagggaggttttcgaaagctagcttcttaccgatgattttgtctatttttctgttttatgtgaaaaccttcatttataacctgctcttctcagtgttcttctattcagcattcagtatgacttctatgcctctaattgcgactgtatggagaagaactgtttgtcattcagtgccgtgggatataatcagtcctgtaaattcatcagaatgttctgttgcctgattttttttccattgcattttaatttcattaaacatattttagttctacagtaacctaattcctcattgttaccatgagatcctaattctgtagctgtgttctgtaatcccatggggcgtgtaccatttggagacacatgaaggatacagtagacagcacggaaggcagcagcaacacacaggggtgtcctccctccccagagcccagtgtgcacacagaaccaaattcaatctcattcatcgtgagcttgcatggtaactgatccagccactcagtacctccattggataagagatttggccacagattcttctagagaaaatccaaatgtggagggtgcatttgtttctgcacccaaacaaataccttttgagatttcttataggcattcctctcaaagtctcattactctgatcagttattgatcggaggctaccctggctcagtcaccagctgctcactgtgtccttctgtggtctcaggagctgcagttgttgctgttgtatgaatagacgatagttaattagactggatgtgtctgtactggcagtgattttgcaacttcctctgtataagcgatacatttgtaaatcatgggaatgtatttgatggtaattgcctgtggtggttgtatcatgatttaattttattatgagcttttggctttatatatttttctgcctttttatgcattcattaaacagtttaacagaccaaggacagtgta

SEQ ID NO: 1003 - DNA, 4481 bp, Homo sapiens
gcagatgcgaaccagaacaatgggacctcctctcaggacacagcggtgactgactccaagcgcacagcggacccgaagaatgcctggcaggatgcccacccagctgacccagggagccgcccccacttgatccgcctcttttcccgagatgccccggggagggaggacaacaccttcaaagacaggccctctgagtccgacgagctccagaccatccaagaagacagtgcagccacctccgagagcctggatgtgatggcgtcacagaagagaccctcccagaggcacggatccaagtacctggccacagcaagtaccatggaccatgccaggcatggcttcctcccaaggcacagagacacgggcatccttgactccatcgggcgcttctttggcggtgacaggggtgcgcccaagcggggctctggcaaggtgagctctgaggagtagaggagttttagtttaaatggaaaaagcaaaggagaaatcagtaggtgaactcagccattagaggaagaactggcacgtagcctcttgctgtctaaggtctcgttccgtgctggagaatgcatatgagcccaagagtgtgggcctgagtggctgcttaggacgttttcgtttaactcaccccctcttttcctcacaagggatggtggccggggtgtggctcaggaatgtaaggacatgctgaattctggatctctaagggtgcctggacatgggcgttgcagaaagagagccacattctcagggtctctggtggtgtgtgcttgcggacttgatgactgatgttgcctctgcagcccacacgctggggttcaacactgggttatgctcgttttttcctggagtcagtgctgctagcttcatgttgctctgcgacaatcataggattgaggtcgaggaagacttttgaacaaactcctcaatttaaatccgccttgagcaaacgttctctgtggtctgagaagtggaaggggggagggataaatgagtgtctatgaatcaaagctttattatcttgtgattccattaatttgcatacagagtcttagaagtttctttattcaaaagcaaatgtggataaaaatgtattacaaaaaaaaaaaactctgctatggggtccagagtctaggagtggtttctgcagttgattgtcagtggagaacctgtggctgctggttcatcaaagcgctggtccctgagtgccattcagattgcagatgcagtattttacgtgatgtttagagtgtttggtggttgtgtaattttggagagaaagaagtttttcccaaaaaagtccctagtttattgggtgttctcacacaacctgtaagatgaagctgtttttctgcctgtgtgcagggctgattctggaattccagaaggccttgtgggagcgtaaaaggcttttgaataaagtgtggaacagagcgcctcattctgataacatgcaatcataaaaaccatagggcaacttggagttaaggagtttctagaatttgctttagtctccaactgcaattctttattgatcatgaaattgttgaagagaaacacaaatgtcagttttacctttcctgtgggcgtgaaagcacatcgaagtttcaggcaactgttaacatctctaccatctgtctgagttgagatttcaggttgtgacacttgccgtgacttatttgtaaatgacattttgtgtgtcttagatactaatggaattcatattctggctagttctttcagtgcatttgtagacatgttcttttcctttgtagcagtcctccctcaccctgaaatgttggtgttctaaccgatttctaatgctaatttcaactggaagcactttttcaagcccagctatcaaaccacaccagacatgtatggattcgggttgcccaataaagcgttgctattatgtaagcatccctcacgcatacagcatcaccagttttgaaagcttgaactattctgcttacttcaaggtacagaaaaaaaaaatgtacttaaactgtgcagaaaagatgaaatcactggataatatgtattataaaataagcttcatgtgagtgacactggtttaagttgaaataaaatggtgaaagcattgatatcaatcattgtgactttatctcaaaacaatattgacacacatagatgtttttcttcctttatggtaagattacagcctttattgtcttaaatctcttatactcttcaatattttcaaagaaaacattctagtctcagaaatagtccatctctttgcaaaacagggctggccaattatcaaggacccataaaaatcaaaacactttcaaaaattttaaaaataaaaataattttcacatgattgctttaggaattttgaagtatccattcttttcactatggagtgttgaatatagaagattttttaatgaacaggcttgccctttgatgccaaaggcaaaaaataataataataacatttgcacgtgtgatcacagagcagctgtgaggcatcccgggggagcgcacgcagtggggatgtgattgctccactcaactattttatcacaaagtgttgtaaacatgggagatgaaagcttaactctctctacacccagctacagacccgcaatggccctaaaaatctggggtattcattgggtgggctgccatggaggaatttttggttttgtttttatttttatttgttgttctgtttacaaatcaggagagcccctgtttttatatgctaggaaggtccttgggataggccgaagaggtgtgcaaacgagcagtggaaggcccgggccctgtctctcaggaccacggcggcctgccccacacacagttctgcttctccctatctagaacgaggttttcctggcagattcctgccagactctgagtggagcccccccatgaccctataaaaggggctgtttgtcctcctcccaccctcctgtgctcttcctccctccccttgagggcacatggccgctggtaccacatgttggagcggccgcccccgagcccgggaatgccctaacaacacccatgcttgtgttgctgggagctgacattcaagaaaagtgcattaaaaattccttgagaaggcatattcttttgagagccgtaaatgaaaagtgcattcacggagaacatgctcctttgttgtgagaggaaagaaaggactgttgttgcctttaaggaacaggtttcccagttccccggaatgtcagggtcacatgaggaatgggtgagcacttagggccaagattgtcgtgtgcttggcccggcagcttctctctaagtgacctctccagcatcactctgtgccagtgctcatatctgaggccacttgagtgtcacgaggcagagcctggaaacattagctttggaaaccgttccttcctttttatgtggaggaagtaaggtttcacaagacacctaagctggacatggtgatgtgccacttggatagttcccaaagcagaaagcagccaggacatcccagtaccccacttctccgtgccgtgtacttttagggaggttttcgaaagctagcttcttaccgatgattttgtctatttttctgttttatgtgaaaaccttcatttataacctgctcttctcagtgttcttctattcagcattcagtatgacttctatgcctctaattgcgactgtatggagaagaactgtttgtcattcagtgccgtgggatataatcagtcctgtaaattcatcagaatgttctgttgcctgattttttttccattgcattttaatttcattaaacatattttagttctacagtaacctaattcctcattgttaccatgagatcctaattctgtagctgtgttctgtaatcccatggggcatgtaccatttggagacacatgaaggatacagtagacagcacggaaggcagcagcaacacacaggggtgtcctccctccccagagcccagtgtgcacacagaaccaaattcaatctcattcatcgtgagcttgcatggtaactgatccagccactcagtacctccattggataagagatttggccacagattcttctagagaaaatccaaatgtggagggtgcatttgtttctgcacccaaacaaataccttttgagatttcttataggcattcctctcgaagtctcattactctgatcagttattgatcggaggctaccctggctcagtcaccagctgctcactgtgtccttctgtggtctcaggagctgcagttgttgctgttgtatgaatagacgatagttaattagactggatgtgtctgtactggcagtgattttgcaacttcctctgtataagcgatacatttgtaaatcatgggaatgtatttgatggtaattgcctgtggtggttgtatcatgatttaattttattatgagcttttggctttatatatttttctgcctttttatgcattcattaaacagtttaacagaccaaggacagtgta

SEQ ID NO: 1004 - DNA, 4481 bp, Homo sapiens; identical to SEQ ID NO: 1003

SEQ ID NO: 1005 - DNA, 363 bp, Homo sapiens
gtcccatcaaggtgcctgcacatctgggctctccgggagcagccatggcagcacccgggaagaaacgctgatgtggctgctctgcatgctcagatgacttcatcgggaagcctgggtgcattttacgctgggtgccaaatctcgagtaactgaggaattcccagagccttctgaaacacagagctgcaataaggctgctccatccaggttagctccatcctaggccaagggctttatgaggactgcacatattctgtgggttttataggagacagctaggtcaagacccctcagagaaagctgctttgtccggtgctcagctttgcacaggcccgtattcatatctcattgttgtttgcagga

SEQ ID NO: 1006 - DNA, 363 bp, Homo sapiens; identical to SEQ ID NO: 1005

SEQ ID NO: 1007 - DNA, 363 bp, Homo sapiens; identical to SEQ ID NO: 1005

SEQ ID NO: 1008 - DNA, 9507 bp, Homo sapiens
ggcggtcccaggcaggcccagaagctgggcagcctctgccgggttccgggaaaaggagctcctgctgccactgctcttccggagcctgcagcatggggcccctgccgcgcaccgtggagctcttctatgacgtgctgtccccctactcctggctgggcttcgaggtgacgctgggaggggtcgcctcggcagtgtctggggagtgagggcggagggaagagtgagcgcagggctccgggacagaggtctcgtgtaactcctggcgccgcccaaggggttaaggcaagcagggagagctccggggctgaaggtcactttgtgcttttaaacggaatagagtcgctggctccaacccgagcctttatatcccgactgcagtttcccacggtggtggaaagaggggcggctccaaacattcagggagaaatgcagaacacggccacctcttagcccaacgatggcagttttggggaaaactggccacaggagcgaagatcctggaatagatttctagtagtgaggagagttttgccaatttcaaaccaaacaatgtagggtgtccgcataacccctgctctgcacttagcgcctcccttccctttccctcggctctttcacttttccatcttgcacactggcaatcgttcttgacctctgcccgcagatcctgtgccggtatcagaatatctggaacatcaacctgcagttgcggcccagcctcataacagggatcatgaaagacagtggtaggaagggagggtcggggcaggggtgatctcagtggcccaagagagccgaccccagcgggtccttatattggcactggcagccagaaagctgccctctgccccgtctctactaaaaatacaaaattagccgggcgtggtagtgcatgcctgtataccacagctactcgggaggctgaggcgggagaatcgcttgaacccaggaggcggaggttgcggtgagctgagatcgcaccattgcactccagcctgggcaacaagagcgaaacaacaagagaaaaaaaaggaagctgccctctgcccaaaacccacgtcgaggtccccaaacctgggacccttaggtcttttctcacttagcgtgcccaaccttctcctggcaggaaacaagcctccaggtctgcttccccgcaaaggactatacatggcaaatgacttaaagctcctgagacaccatctccagattcccatccacttccccaaggatttcttgtctgtgatgcttgaaaaaggtgaagagagtgggatgtagacagggtatccagtgaaaaacacagaagtcggagattgagggattgataggatggaggggctgcgggagactaaagcaagtgaagcctgccttgggaaacctcaggatcagccttgagcgagctgaaggttgccgggcatgaaagggaagaagagcaggcaaataggtcatgggaaccttgggtgagaggctgagggcggaggagctctgggggatgtcagaagcaaggaagagctagtcctccaccaggaaagcagcaagaggagccctgcctctgggtgcctctgccccacaggaagtttgtctgccatgcgtttcctcaccgccgtgaacttggagcatccagagatgctggagaaagcgtcccgggagctgtggatgcgcgtctggtcaagggtgagtgtggggctctgggaatcctctgggaggaccttggatgactttctgaccttccccaggcacgttttcagggtcatgatcctgcccccgcccgggacttctactgtcctcccagtcacacccctctccccgcaccgccttcctgctgtcttctcttcttcccagaatgaagacatcaccgagccgcagagcatcctggcggtgagtgtcctggctccaccccaactgcactcatagagaatctgagaacagttggcgtttgggggtaaagaagacaataggtctcttattgcatggaaaaggttataattactggggaagaaaggatgtctgtgattcagggcacaaactactgaaaagttggaactaaggatcctcaaaaggatatctcaaggttgaaaggggaagtgcaaaagggacaatatatgggaagaatttatttgctgaaagatgtcagtgagagaaagatgctcagtgttggaacccctggatggggagggatatagtattcacaagtctccacaaactccaacacaaacctcaccaacacatccagagtggaaggcaggagacttgttccaagaggctttaaaaagacgaaaagagataactaatgccagggttatataggagcctgagtgagaacaaatggaaatagctcaaaacattgaccagtgagccatggatgggggtataaaagtaagtttgtcttcaggattaaattaggaaattcaaaacagtattattcctctggtttacaaaaaaaaatagttgagacctattcaaatttaatatataaagtggcaaatcacacaaaagttaaacgtataaggaatggcaaatatatcttctacagtctatactcctgcaaagtacatgtgtaatttttagcttgcttttttacttcatatttaatcattttccatgctttttttttttttttttttttttttgagacacggtctggctctgtcgcccaggctggagtgcagtggtgtgacctcgacccactgtaccctttgcctcctggactcaagcaatcttcccacctcagtctcctgagtagctgggactacaggcacacactaccatgtctggctaacttttttattttttgtagagaaggggtttcactgtgttgcccaggctggtctcaaactcctgtgctcaagagatctgtctgcctccacctcccaaagtgctgtgtttacaggaatgagccactgtgcccagcctccatggaattcttaactctgaaagtatagttctttgtttctatagaggttccactgagtggacttatttttgttttgcttaaccatttttctgtggttaaacattttgtgtaggacataattctctaatttaaccaagtcaaagatagtgtctcattaggacaggctacatgaattcctgggtcccacttctgatctaggaagtcaagttgcagtggttgtcaatcttggctgtgaattaaaatcacctggagcaccttggcgctaaccctttcccctggaattgtgatgtaattgttcttgttcttttttttccttccttcctttttttttttttttttttttttttgagacagtgtcttgctttgtcacccaggctggggtgcagtggcatgatcatggctcactgcagactcaacctcttgggctcaagtgatctcgcatctcagccttacgagtagctgggacttcaagcatgtgccaccatgcctaattttttaaaaattttttgtagagatgggggtttcactttgctgcccaggctggtctcgaactcctgggctgaagcaatctcctgcctcagtctcccaaagtgctagaattacaggcatgagccacagtgcttggatctagttctaagggatgacctcacgtggagattttttaaagctcctcaggagtttcagatgggcagccaaagttaagaaccatctatcccaaactataccaacaaaccacaaactgaagcctttatctttgtcttgaagccaggtaggtggctgcagccatgtgccttgttacaaagttctcaggaagttccactggaattacagcctagctcttgattcaaaaaaagcatgagatacttaggaactgtgagaggtaggaaggaaagagccctggacttgaattctagagacctggattctagtgttggctctgctaccaacatgctctgtaactctgagcaagtaatgtatcacctctggattcaggctcttcatttgtgaaataaagaggtctatctagctgctctctaagatgtccgctggtgttaatttctgtgattgactctgtgccatctaccttttctccttttccacccatctcaagatttgggataaaggaaatagttcctcttggcaaggacagatctccacttgtgggtgggtaagggcattgccagcaaaacttgggggcagaaaataaaaagaccagagttttcctctgagatccccatccaatatcatgcagacacagttgtattccctactatattcccttaggctgcagagaaggctggtatgtctgcagaacaagcccagggacttctggaaaagatcgcaacgccaaaggtgaagaaccagctcaaggagaccactgaggcagcctgcagatacggagtgagcagctctttatgtgtgttcccagcacccatcctgaagatggagacttgagaatctctaagtttgagtccttatgctcctgtacaaaagccccctttccaagtgttctcctcagtgctcttaaacaaccctcatcttcttccttcttttccttgggctcagggaaaggaagggaaggagatgcacagtgagagaaaagagagcatcttagaaacaggaaggcacctggggccacagagcctcttagacctctttgcttctgtgaactcagaaaagtactgactcaaaggtttcaacccctgcctaatacctgctcctttgccttcctccttgcattgtaactgctttctccaggcctttgggctgcccatcaccgtggcccatgtggatggccaaacccacatgttatttggctctgaccggatggagctgctggcgcacctgctgggtaagtaagttaaagaatcaaccctgagccaggtgcagtggctcacgcctgtaatcccagcactttggtaggctgaggcgagcagagcacgagttcaggagattaagaccatcctggccaacatggtgaaaccccgtctctactaaaaatataaaaattagctgggactacagctgcctcagtgggaggctgaggcaggagaatcacttgaacctgggaggcggaggttgcagtgagccgagatcgcgccactgcactccagcctgggtgacaaagcaagactccgtctcaaaaaataaaaagattcaaccctgagctgcctttgaccccagctccacacccactatatcagttgaccagaaggaggggctcagagcaaaaaaatattcttggcacttccagtaacaaagcgttatgcagtcagtgctgttcaaggttgagtgggcaggggctgtcttcaaccccataaaagaaaaggaagccttctataccttgaagccaagcaaaagtctttctagaaaacccctgggaccttgtgggaccaactcctgctgccagaacacctgagaacagtgtgcagagtctgttgttttcttcatccaggagagaagtggatgggccctatacctccagccgtgaatgccagactttaagattgcccggaggaagcaaactcttcgtataaaaaaagcaggccatctgcttaacccttggctccaccataaggcactgggactcggatttctctatctgatagaggtattttctgtggccctgggagctgtctgtctttcccctacccccaaggatgccaggaagacgtccaccattagccatgtggcaacctttacttctatgcctcacaagtgcctttcagagagccccaattctgctttcccacaaaataaacctaatgccatcaggcaaaacatttctgtgtctgtatctgccctggtatattctcattcctggggtcacatcctgcctactctaggggtaggtgaaggagagctgtttcagtatttccagccagaccagccatgcagcccaccttgagcagcttgtgcggtggaagaagtgagaatagtcccccgttctctcacacagaaactcccctggtctctctatcagcaacagaaaaccaagccagatggactttgcaactaatcaagtttgggatttactgtcttctgaccaaccacagtgactgagatggggctgggaccagaagcccagtgggagtgaacagccgagggaaccagagtctggctgagcttgtggccagatatttaaactgggtccagccacacctgcaaaaccagggcaaggcagtaccgggaaactggctggagttgctgcggtttggggaagttgcacaccctttcatagatacctcccttaaccctcagtgcagattctgagaaaactccaaggcttctctgcctaacctagtataacccctgttccctactacatacatataacttttccattcccccagtaattgacccaaagtccctgcctctagctgtgcccattgtgcaatgatcagaatcccttgtttcaatagtattttgacttctttaagaatactctgtatttggaagctgaaacctcacttggatccattgttgggaaccaagtacggagccttacatagcccggaggagtttcaggagcaatgccactttcccttccatccctccctctgggtctggctcttcccatagtccattttccccttttatctcccattaatttctgtcttcctctctcaccttttccatgtctctagcatcctccaggatttaaaatcatctttacccaacttatctgtgaagtaatggcaaaagaacatctccaaattaagtactccttttcttcaaaggagtttcatgggatgtacagctagtataaaataaaaatatgggaagatgtccaatcttaaaaaccataagggcaaattaagacaaaactaagctgcccagagcagggtgagtggaaccagttttatgaataaagatgcttgtctcagcactatatgtggatatcaaaaattgtgaacaacttgaacacctatcaggaggagaatactttaatcaattatggcacattcaggagataatgttttacagtcatcaaaaattgtatatgagggccagcacggtggctcacacctgtaatcccagcactttgggaggccaaggcaggcggatcacctgaggtcaggagttcgagaccagactggctaacatggtaaaaccctgtttctactaaaaatacaaaaaagtaaccgggtgtggtggcacgtgcctgtaatcccagctactcgggaggctgaggcaggagaatcgcttgaacccgggaggcagaggttgtggtgagctgagattgcactattgcactccagcttgggcaacaagagcgaaactctgtctcaaaaaaaaattgtatttctgaagaattgttaagaacattggaaattcttgagatataatattgattggaaaaagatgaaactatatggtatgatctcaatatgtcctgatgaataaaaacataatacagaggacattattctgagataaaatacatcaaaatctttccattttatttgtatacttttacaatttttgattttttaaaatgtattctgatacacaaaataataaaaatgaaaaataaaaaatttggccgggcgcagtggctcatgcctgtaatcccagcactttgggagactgaggcaggtggatcacttgaggtcagcagtttgagaccagcctgaccatcatggtgaaaccccatctctactaaaaatacaaaaattaagctgtgtgtgatggtgcacacctgcaatcccaggtactcaggaggcttatgcgggagaatcgcttgaacctgggaggcggaggttgcagtgagccgagatcgggtcactgcactccagcctgggcgacagagtgagattccatctcaaaaaaaaaaaattgtagattcacattgcagtacaactgtgcatcttgcccattgatttctaaatgtattaactacttaaattaatcctgaatcttttcccaggcttaagtgggataatgttttattgtagatgcatatttcctggctctacccagtctttctttgaagactttatcatcctattttctgaatccagtggctgactttaatcttctctggaggaactagataatttctagactaatgcttacactcatgatccagattgtaatttctgaactccttcttccaaatagaatcaaaacaagaaaggggaaagcctctcaaagcaactgtgcgttaataatgaaacactctttttttctaatccaaggagggtttcatactttttcttagtttcttgccctcttcccttctgatcaataattgtaataggaaatttgcaattgtgccaatactcagattcaatactgaactactttcttgcattgtaattcaaattccaaggttaacaactagctgtatgtttccaaaacaatcttattgtatatgtattttcttaggtgaagtttccagaaatgattttttttttttgcagagccaaacacacatggtaatttaaaaaaataatgcacgtatgtggtaaaaacagtaaaagcaaggtatcaagtaaaaagtgaagagtcctccctttctcattcccattcctactctctaattttttatatatccattttgtaagctataatacagagattccatatactcttcacatactttccccagtggtaacctcttgcataactataggacaataacacactataggacaaaaatcaagaaattgacattgatacaatccatcaaccttattcagagttcaccagtttaacacatgcttattgtgtgtctgtatttagttctatataattttatcacatgtatgctgatgaccaccaccacagccaagatacaaaacattttcagtgtaaagatttctcatgctacccttttatagccacagctacctccctccctccctgtacttccctaacccttggcagtcactaatctgatctttatgtcttgtcatttcaaaaatgctacataaatggaatcagatttgattgttttcattcagcacaatccctttgagatctatccaaggttttgacatgtatcgagagtttattcctttttattgctgaatagtattaatattctatagtatggatgtaacatagtgtgtttaaacattcgcctgttgaaggacacttgggttgtttccagtttcaggttcttacaaataaagctactctgtgtgttcatgtacaggtttttattttcatttctctgggtaaatgcttaggaacacaaccactgggtcccatggtaagtccatgcttagttttagaagaaactgtcaaggctgggtgcatgatggctcccatctgtaatcccagcactttgggagaacaaggcagaaggatgacttgagcccaggaattcaagaccagccagggcaacatggcgaaaccccatctccaaaaaaagaaaaaagaaaaagccagacatggtgatgtgtgcctgcagtcccagctaattgggaggctacagtgggaggatcccttgagcctgtgaggcggaggttgaagtcagctatgatcacgccactgcactccagcttgggcaacagagccagaccctgtctcaaaaaaacaaaaacaaacaaaaaaaaggaaagaagaaggaaggaagggaaaggaaa

SEQ ID NO: 1009 - DNA, 434 bp, Homo sapiens
gaaactgccatactgttttccagagtagctggtttcacttttccaccagcaacgcatgagtgatccagtttgtccacagcctcaccagcatttagtgttactactgtttcttactttaatcattctgataggtgggtagtgatagctcactgtgatttttaatttgcatctccccaatgactaatgaacatcttttcatgtgctacttgccatctgtacatggtcgtcagtaaaatgtctgttcatgtcttttgcctactttctaactagactcctttgaaaatttctcatattgtttttaacaatagattttaaaagaatttacagagtaagaatacatttttgagacaatggggaaaatgatacggagtgaaaggtgatattaaagaattaatgttaatttcattatgtgataatagctgagtggctgtgca

SEQ ID NO: 1010 - DNA, 9303 bp, Homo sapiens
atttgagccttttcttggtgtttctactcctctatgttctgctgcctaaagaataagtgtgtagattcagaagtagtaatgaccaaacctcttgataacagccatagggctcatttattaagcacctgctgcataccaggctccgtgcttgccttcatcctccctcaccttaccagggtgggttttttatccacttttggccctttgctagctggggtcccctcagaccctggtcctataagggactcacacgaggaccccctcaaggcaataaagggaggattaaagagctgagaggtacagagggagcagccagcatcaggctcccaagaagccctcaataaatggcaactggttacagcctctcagccctctagggatgcccaatgctgctggtgtcttgatgacttgacttcttcaagtgacacccttcttactgtgcccataaaatgtttgcatgtggtagggagcaagttaatatttacaaatgcaagtatgcctaatatgtgtttcctgatgactgctataggaggtgcagggtaataattagcaatttggagacacgtttaggactcatctacagggagaaactaccctcatttttctgattctccagtttgtgtgctttcaggacccaggatagatttctgcctgttggggtggcctagatctttgtctcttgtaatgaattaacgatgaagaaatcacccacctttggctttcttagtactcagtgatcattgtttttggacccaacctggcccaactgaagacctagattccaagaaaccttccctcttttcaaatttgggacttggcacagattagacctgctaactaaaaaaaataatgattgataggaaggccaaaggaaatagcatttatctgggaaataaagagttgcaatttgggaaccctgagtcatggtagtcctgaacagtgtcccatagggcaatgcaggaaaagttttgtactggggactttcacaaaatgttgtttttgaaaacagttcattgcctggcagaaatgctaaactgcaaactcgtatgaattggttacttaattaggacactccaggatgagagaaatcaaaatcccatgtaccttgacttcagtccattgttatccaggtctacagcaacatcctgtggcttgacctttagcaggtgtgagtgcaatgctcttacaaacgcttgactccatgttaaagctttagccttaactacttcattttctttcaaaaactgtactggaatatttgtgaaaagaatgaaaaatatggaataaattcataaatacacaaagagagagagctctaggtatatgtcaagtctggattaaagacagatctgtgtttatttttatgaagcatcttctgactttgatccaaagcaaaacttcttccatggccccatttaatccttgttgcacccctgggaagggaaaatgctgctgtcccactttgcagatgaggggctgcatgttccaggccacccctctcatgggctgagcagcctggttgcaggtctcatggtggcgccactttgccattgttccctactttggcttctgtaaacaccctctctgaggttggtgagctctcctggggaaacaggctagcaccagttaatacacagagggagaacaatcagtaactttgttcctgtgcccagattggtggaagtcaccctatgtggagaggaggactttgaactcagacctggacttccctctgggacctttccctacactgtctgacctggggctggtcgtcacctcttccaacctttgcatcctgctctgtaaaatgagaataagaacaccatcctctccacattattagaaggattaaaattaatgtatctgaaggttcttaacagtgtcacacactcatcgttagtgattgtcatctcagtcatgtctcctgtttatcgatgccccttttgtagccaaaccctctgcccccgtggtattgggccctgcggcgaggaccacacctgagcatacagtgagtttcacctgtgagtcccatggcttctctcccagagacatcaccctgaaatggttcaaaaatgggaatgagctctcagacttccagaccaacgtggaccccacaggacagagtgtggcctacagcatccgcagcacagccagggtggtactggacccctgggacgttcgctctcaggtcatctgcgaggtggcccatgtcaccttgcagggggaccctcttcgtgggactgccaacttgtctgaggccatccgaggtagaggaccctcacacccagcccaagcccacacctggctgtcaagcccactcccctctccccaggctgttgctccagaggttgaatggcctgtaatctaatccctgactatactgcccgcccgccatgcacctaggtgtgctggtcacttactatcattttattggcagcggtcaggggaccagcaatcacgtgccaagctctgcgctagagagtttcatttatctcaccaagaacaactactattagtgagtacctactatgagccaagtccctatgtgctcggcgatttcactgattttgctacagttcttacattccaactgcatgccaggggttgtgcttgtagatttcactcattcttagcctagtaggagctaccagtccttgagcacctactgtgcaccaggcactgtgcttggtaatttcattcatatgcaaagagcgccctcaatgtcttagcatctgctgcctgcctagcactgtcctggtgatgccctcaccgtggtagtgggagttaagttatggagccctccctgtgatctgtctgtgccagaagatcagagcttctaccctgtgctgtttcagttccacccaccttggaggttactcaacagcccatgagggtggggaaccaggtaaacgtcacctgccaggtgaggaagttctacccccagagcctacagctgacctggtcggagaatggaaacgtgtgccagagagaaacagcctcgacccttacagagaacaaggatggtacctacaactggacaagctggttcctggtgaacatatctgaccaaagggatgatgtggtcctcacctgccaggtgaagcatgatgggcagctggcggtcagcaaacgccttgccctagaggtcacagtccaccagaaggaccagagctcagatgctacccctggtgaggttactcaaaatttttaaattttgtctttttctctcattttaaaagtaatatccacacttgctgtaaaataagctagaagtctataaatacaaagtaaaattttaatgtcagctccatccccccaaatcccacatgcgaagagtcatgactagtaagaatttgatgcacaagttaatagaacttttgacataaatatatgtttaattttttttttttttgagacggagtctggctctgtcgcccagactggagtgcagtggcgcgatctctgctcaccgcaagctccgcctcccgggttcacgccattctcctgtctcagcctcccgagtagctgggactacaggcgcccgccaccacgcccgactaattttttgtatttttagtagagatggggtttcaccgtgttagccaggatggtctcgatctcctgacctcgtgatccgcccgcctcagcctcccaaagtgctgggattacaggcgtgagccaccgcgcctggcgtacataaatatatatttaaggagcaaagaggcaggcagggggaaccatcttctcatagagtcctttgccttcccttattccttgagagttgttgtgcccgtttctcatcagcccacccttgtgctccctactttttctaacctctgctttgtttctgtttcatccaaacttttccatcctcatttatgacctcatcccagtacaccctgacatctgctgtgtatgtttcagaaagacaaatgtagtttaaaactgtaccaggcctggcggctcacgcctgtaatcccagcactttgggaggccgaggcgggcggatcacgaggtcaggagatcgagaccatcctggttaacacggtgaaaccccatctctactaaaaatacaaaaaaatgagccgggcgtggtggcgggcgcctgtagtcccagctactcgggaggctgaggcaggagaatggtgtgaacccaggaggcggagcttgcagtgagccgagatcatgccactgcactccagcctgggcgacagagcgagactctgtcaaaaaaaaaaaaaaaaactgtaccaggcctgcaggtgaccatgaatggtcacagaacggacctcttctgtgtcctgattgtgatatttgagcaacaataatcacaaacccctctgcaaatttactaagtgcaaatttccattcatccatgatctctgtttttgcttcaaccacccagtaagtctggagttttaaagaaggggaaactaggacttgggaagtcatgggggatgttgttgaagacctcttgcctttagatcgggttattggttcaaactaattaaagtaaatctgggtccctgaggacaaggtcagtatcagcctaaaatgcaaatttgtgctagttagagaaacagtcctcttctgctgggcattgtcccatggacctgaagttggcctgtgttccactccgtatgaccaaaatatgtcttacttccctcttgtgtaataccaggaggagtctcaactccaggagacttttcaaaggcccaggttcctcccacataccttatggtggttagtcttatctgctgggtcagtgctaggtcacggatttttccatgtccctgtctgctggaagagtaaatataggaaatggagggcaaaaaatatcttctataatcagagatgtatggaaggcgtgtgatcatgtccacagctaactcagtcatgcatgtacacgcagttccaaatggaatccatagttgggtgatcttatgactaaagacagcataacaaaaccagtatcattattacagttaatacaatttcaaatttttaatcactaaatttcataaaattattaaaacaattcccttatatcatctaaaatggagtatacattcaaattttcctcaaatttcttttatgactatctttctgtgcactaaatttggttttaattcatatttaaatgctttgcagtatttttctttgaaacacttgggcctcaagaatttttgggggtgttttaaaagtataaattcaatttcctcagtagtttagggttactcatattattcatttcatattgggtgagttccggtaactcgtgccttttgaagaattttgtgtccattttatctaagttgtcatatttttgtgtgtagagttgttcataatatctccttattatctttttggtgtctgaagggttatggcgatatcccctgtttcaacctcatatctaaaatatgccatttctgttttcttcttcatcagccttgctatagtttttttccattttattggtcttttcaaaggaccactttgtttccgtgagtttttaaattgtttttgtgtttccagtttattcattttttgcactcttctttttattaattcctgtctcctgcttgctttgagtttattttgctctactttttctagtttcttgaagtggtgatttaattgacttgaggcttttgctcttttctatgtcattcctttgcctccgtttatggctggggctggtgttgggggatgggtcccaggtgcctggctgcagggctgtccctcagtcctgaggcccctagtcagtctcccttcttcctctcccaccttggaatttctcctattcctgatccttgtgatgtttctagggttcatagttttacttctcagggaggtaaaactgcaccatcaagactggattgcatttgcttttcagttattcatccacccactggcttggaccaggaccagggctggcatttttgggtgctttcggtttgccagatgtagcatctttgctcaggtactaaggctggaaatgcattttaagttgtctaggctggcaggtaaaatgcaagatgccttgtggttacataagtgctgcaccagtggcgtgggagccgggtaagagactgtgcactagggttaggtgagtgttctgttttgactcacggtcattttgcagtttggctttctctcttcaagtaatactgagagccagggttgtgcagaacttactttgttttcattttttatttgatttggggaggatattttatacagataagtagctatgctgctgcaattgtacccagcaactcttaagtcaaccgaagatctttgagtgctttgacccaaatgtccactcccacatctcagggtcccacaacttccccatcagggccctaccccagcatagcaaccgttgaagctgagattcatcctcctctgtgattctgctactcttttaatgatgtccagggcccaaccctctattctttctgccctctagccacaagagataagaaagtgcagtgctgccaagaagtcctcttgctttcacgctgaaccttaactcataatcaatcactcgtagcttctcagcatatttccccaaaaaaaatatgcccagtgatagccatggaacaagttagtccttataactaccatttcccaatttgtttcaaaagcctgatgccaaggaatttcctgcctgtggttacgccatcccagcttactgccagtgaaagttttatcaattgcatcccagccatggtgcccagccccactcactgccagccctgaggtcctcattgcgagctgatgagtattcaggcttcaaatttatattttagagtaagctttacagacaacttaccaaggtcagtttctctgtaaggcagactagagatggatacaggaatgcaggaagcatcctgaagagctgtagggtcagcatgcctcaggaaatggggaggcaggactgtaggaggagcgaggtgctgagctacagtgcaggtagaacaaagacccagctgctcctgcggaggatcccaagggctgagagcgtcatgtagtgttttttaattgaggagagaagcgtggccttcctattttcaattcagccaatctttcttgtgggctgtcccctagaaggaggagtgaacttggaattgggcagtgcagctttcctcaagggagaagaagtcccagagagccacccagctgagaactgccggcctccaacaccccagcagccacagatgctgagttctccatttcttccttaaggacccaccagcaccattttatttatttaaaatatactgtaatatctttaatggcccaaactgctcgcgttaaaaatgttgattttaaaagcctgaactgctcatgttaaaaatgcagcgtccaaacatgtgcttccccgtaactgagtgtgcccaactaacagaaagatttcagatgacacctgcactggggtggaggtggcctaggtgacatctgaggccctcccaagcatgagacccatttccgtgactcaccaggatgttttctagccggaaggtttcattatgtccagtgttccatggctcctccaagttctgagaacacggagtcctccccttacttctggggctaagcagggaacctgcaactctcattgtgaagccatcctcaagccacctgcctacccttttatagtcattaaaatgtccctaggaatttggacttgttttgttccaaaggacatggtctcagggatcaacctaaggaacactagtgatgagcttctttaggtttgaatgcaagtaaccttgtgaccctccctaaaatccatgggcctcagtttccctagcagaatggaatgacaatccctgctcccataggcttgtgagggtcaagtgaggaaccccgttgccacatgtatgaatacctgagtacacaccccctccacctcttccctccaggagaataagctggcaacctgggacaggatgagtgagaatggggagcctctttctgtggcttctgccttgtgctggagtgaagatagcctgggcaggatgcaggttcaaaggtggggcatagatgggcccaggcagcctcagatggggtaagtggaggcccctacaatggcctcccaagtggtctctctcatagcccctcgtcttccctgatttccaggcccggcatcatcccttactgcgctgctcctcatagctgtcctcctgggccccatctacgtcccctggaagcagaagacctgactgtaagtacaaggaagggaggacagaccaagggctgtctcagaagggcaaggccaacaggaaggcccagcccacatgccatgcagcaccagggtccgtggagttaagctccctccgcaccctcggaagtcttggggaaccctttaaaaggctcccaacccacagaaattatgtgggtggtgtacaatgtgggatgcttgaaatgtgttcaaagatgtccacagtgccctaggagtttcatggaggcagtgatgagtgggtggtcccttgcaggctatctgtagattatttgaatgctgggactccatggggtcagagaaatccacattgtaaactaatgttgagaaacccaaatgggaagccctgaaggctgtttgtgctctgaccctctgtgtgtctgagtggaaggaatattggaaagggcatcaggacttggcaggatggctgagcaggcagagttctatcaggactgcctgtccaccagtgacaggtatcccaggagaccagccccgagaacataacagactctcaggaaacatgtcttgaaagatgagcagatgactaagtgtggatgtgttttcctacagctccttccttcctcccctgccacgtgggaccctcatctctgctgcctccttcctttcctgagaggctcagcttgagagaatgagccagtgagaagcttctctagacttggctccaaacatctcccctcccaagacatctgcctgcccacaggctcctgttgctccttcacacagacctggatgccccagagcaaggtcttcattcatggtcctgagcaggtgccatgggattgggctctgggcactgacttaacggcacctccctagaaggcgagaaacatgccaaatctaaacacaccaggactcccatccatcgccttgagactgaccgtaaaccacagacgctctccaggttctcaagagttatcctgccttccagattcctgcctatcccaactccccagccttgttgaggttctctattgcctcttgaatacaaatgcactcccaaagtggttttaagaaaataaaaagattatccttcc

SEQ ID NO: 1011 - DNA, 391 bp, Homo sapiens
ctgcatggctcccttcatccctccttcaagcctctgctcaatgtcactttattaaaggcacctttggcaaaccaccctgtacataatatcaattctcctgtctaccctggcattctaatttctcttatcttgattaatttttatttagcatttattaccataagcattataacgaatacaggcagccctcgcttttcacagcagtgcaagattgcaagaatgactgtgcagccggaaacccaggaaagcaatctccacatccaatcagaaaaacaatgatcatattgtgacctttacaattttttgtcaaaatataggaaactctcatagtgtcagttacaaatgtagaaggcaataaaaaataataaatgaatatttattagtaccctgt

SEQ ID NO: 1012 - DNA, 1093 bp, Homo sapiens
ctacgcaaataaactagaaaatctagaagaaatggataaattcctgtacacatacaccctcccaagactaaaccaaaaagaaatcgagcccctgaatagaccaataacaagttctgaaattgaggcagtaattaatagcctaccaaccaaaaaaagcccaggaccagatggattcacagccaaattctaccagaggtacaacgaggagctggaaccattccttctgaaactattccaaatactagaaaaagtgggacacctccctgactcattttatgaagccagcatcatcctgatgccaaagcctggcagagacagaacaaaaaaagaaaacatcaggccagtatccctgataaacatcaaagtgaaaatcctcaataaaatactggcaaactgaatcccgcagcacatcaaaaagtttatccaccacaatcaaattggcttcatccctggcatgcaaggcttgttcaacatacgcaaatcaagaaatgtaatccatcacataaacagaaccaatgacaaaagccacatgattatctcaatagatgcagaaaaggccttcaatacaattcaacaccgcttcatgctaaaaattctcaataaattaggtattaacggaacatatctcaaaataaaaagaactatttatgacaaccccacagccagtatcataatgaatgtgcaaaagctggaaacattccccttgaaaaccagcacaagacaaggacgccctctctaaccatttctattcaacatagtattagaagttctgtccagagcaatcaggcaagagaaggaaataaggggtattcaaataagaagagaggaagtcaaattgtctttgtttgcagatgacatgattctatatttagaaagccccatcatctcagctcaaaaactccttaagctgataagaaacttcagcaaagtctcaggatagaaaatcaatgtgcaaaaatcacaagcattcctatacaccaacaatagacaagcagagagccaaatcatgaatgaactcccattcacaattggtacaaagagaataaaatgcctaggaatacaacttacaagggatttgaaggacctcttcaag

SEQ ID NO: 1013 - DNA, 51961 bp, Homo sapiens
tttttgttttctgtttttttattttttgtatatatagagtgaacttagcccacccatgttgatagaacaccctcttagatgtcttgttctgtgtgcccaagtacatgccggaatgtggagaagaaatgggttctctctagtaaaccaggtaagtgttttctaattctatgaagagttttcattccattcttggcttctgtgaaggttgtaattttcagtggacttagtcagtgaaagctgagtatctatattaaaattgtttgaaaagattaatgataaaacaaaaagtttcttaaaacttttattcatagtttgtcaagaaataatggaaaaagtagaaatgaacaacagtggtcatgacttttacttgaaataattttttgggacaaagttggatattaaaaaataaaaacccagattttatctatttaaatcaaattgaattaaaagataaaaggccttttaatatagctgtaaaattgaggttttactttttatagacctcacataggcttggaatgaatttttttttttccaagatcagacaagatctggcacatttggggtggtatagccataaacagattttgtttttctcctgtgtttggtagctcctaaccttcctgagaccacaaccttttactttattcagaaacccagcaagttagctgcaaaatgtgaaccatatcatgaccactgtaatgtgaaaatctgtaattaattaatctttactaagataatgttaattgttagagaaaccacatcacacacatgcacacattcttgtacaaacttgtgcttttggggaaggattagagagagcctgagccaataaaaactatttactcaatataattacttttttttttagatttattactaccataatgtgaaatgcagacgtgagatgtttgacaaggatgtagtaatgcttcaggtaatgaattaaaagcattgaacttaaaggttgtggggaatctttgcttcttgttatttccatagaattcagtcacttgtgatcactcccaaatctacaactccagcctagccctgtctcctcagctccaaactcatatggctaacagcctttagatcatttccatctatatttcctagacacacttcatattaaacgtattcagaataactcctcatgtttcctccataccttcttcctgtcttcacttccctaccttggtgaattgttccacagtctacctagttgctaaagtcatatacctgaaagccatcctttcttcattgtcctctggttctttaactaatgtactaatgttaaacctcttagtttaaaccccttaaactaattttcaggactgcgatacttaactgcattgaagttccctgaatttgccatattctcatacatcttaaactctgcgtatttatttcttttgctccctaagttacccaccccttctttttccatttacgtagctaacttattttcctgcttgtctttgtgtttactttagcattacttcctccaggaagccttccctgacacactaaaacttggctacgtgtcccttttgtgaggaccctagcatggtatttaaccctgccgtagcactcacaaccctggactgtgattactgtttactcttcagcaccctacccccaccccaccaaaccatggcagttatatcttgtttctttttttgtcccttttgccttgcatagtgcttgtcacatagtagttgttctctgatactgctgaatggatttagtcattatagaaaaataaagctggctaggcacagaggctcacacctgtaatcccagccttttgggaggctgaggcgtgtggatcacctgacgtcaggagtttgagtccagcctggccaacatggtgaaaccctgtctctactaaagttacaaaaattagcctggcatggtgtcatgcgcctgtagtcccagctacttgggaggccaagacaggagaatcacttaaacttgggaggcggaggttgcaatgagctgagatcactccactggactccaacctgggcgacagagtgagactccgtctcaaaaaataaataaataaaaataaagtcaagaaatgtatatttcaaaaaaatattagttcagaataaaatctaggtttatttataatttatacaaatggaattaaaagagaattgaaactaatatttaaaagctgtcacttcagtcagtataatgcttgccagaaaaaaataggttaggagatcttgataatagtttaatatgatctgtatttttaaaatactagaaggttacttaatataccacatttccaagtccaaacggtgatcagagaaccccaaaataaaattttggcactgaattcataggaatacaattattttaaagcattagaaggaaagagaactcatagtctgtgttactgtgctgggtgggcttaggtttggggcttgtttgtattttgttttaccaatttagattcctttccacacttgcctgctaccacaagtaaggattgaggttaaatgggttttcatcttttattgggattggtgaaccttttaggattggtaaactgctttctcttgggcaagccaaactatctctcactaattgtttcaatagtggcccctttgaccttcctcttttcctttatctcaaacattaaaaaaaaaaaaaagacaggtgtctccatgatggatccaaatcatttcctgatgatcatgctcagccgctttgaactttatcagattttcagtactccagactatggaaaaagatttagttctgagattacccataaggtaagaacgtgttttatgaaaccacaacacattgctaaagaagcatctttccttctttttggatatgttaatcctctgagattatgcaatatgcatattcttatctctgaactttatcttccctcacttgttataggatgttgttcagcagaacaatactctaatagaagaaatgctatacctcattataatgcttgttggtaagtttaaattgtttgaggcatttaataaattacactgacgtttatagtagcaaatagtttggaatttctggcctgtgtttcctttgttttgagaggatgctcagtcttaggggaagagaattggaatatttctctttttctcccctctggttactgtaatattgagagtaatagcaccgtggtgctttggaagaaggagaaaatacaactactgaagcagaataaactggaagactgtattttgcgaggtggtggtagggggagcgggggacaggagaatttagcaatcaaggaataggatatttaagatctatttactcttgatttatatcttaactatgtttctctccatgggtttgtggtacaaaagtatcttcttgacttcagatacaataattccaagctaaaggagacctgtggctaatagatgtggatttcttcccttattacctatattttcagtcctttactactgttttagaccccctgcagtccatagagcagagaatcctggctactgtcaggagatgataccaatgaagaaagtctccgaagttgatattttatttgccactagatagtaggggaaaggaaggctctctctccttgctgccacaaggagaatggggtaaatgcagtttccttgaccacatttaatcccttcccacatttctgatcccattctttcaaaacagcagaaagagctctctccactacctaaagcctgccctcacgttttgggtctgagacacagaagcatggtcaggagctgctctctccctggcttattgcagaacagtcattactttcccattgctcagacagacttagagaaatataacatgctgcatgaattataagtatatatcacgaaagtattgtgattatgttaaatgtatgtatatgtacttttccatttttgacaggagagagatttagtcctggagttggacaggtaaatgctacagatgaaatcaagcgagagattatccatcagttgagtatcaagcctatggctcatagtgaattggtaaagtctttacctgaagatgtaagtacctacatttctaaaaagaaaaccatagaaacttttccctgcctatcagtctagtatctatagatttacttctgtatacctttctcacaattgtaaaatctattgtcatgggatgtgtataattccggtcactcttattatgaataattagaaaaagagaataggagtagaaaacagaatagtaatagaatcttttacaataaagccttgaggaagataaggacactaaacaaaaagtagcccaaacctcagaactaaggtttgtaccccacagaaagaggtcattatagggtctttagtacaaagttgctatgggtgtggataatgctttgtaacctagtatattgaggaagggagtcagaagtgcctactcacctatactgagtagaataaataatgttttcctaagctttttccttcttggcctccagagagtcttcttaatgacgagcccttgtttcattttagtgaatgcaaaataatagtgaaaaggacattcataggttaaattgcaactgtttttccttccaggggtgataagttccccagcaacctatatttcagccatggggtttttcagaaactcaacccttataattgagaagagactttattttcattgaggcttttcaaaatgtttgccctaatttgaaacatagatcaaaaccttcaaccttaattaacatttatttttctgagatttcaacctatcttatctttgttgcatagtaatacttttaaactttgtattataaatatttcaaacatctatagagattaaaaaatgtagtataacaaacccatcaccagcttcaacagaggccagtctggtttcatctatacccaaccactaacctctgtgccccactgtattatttcctagagaatactatatttaccatttcatctataaataggactatatgtatctaaaacagtgattctcaactgaggacaattttgccccccaggggacatctgtgaatgttactactcagggcaggatgtggaatgctactggtatctagtgggtagaggccagggatactgctaaacatcctacaatacccaggacaaccccctacaacatatctgatctgaatgtcagtagtgctgaggttgaaaaactctgatctagaaaatgaggactcttaaaaaccctatctttatgttatcacacttttaaaaacaataatttatatatatatgtttatatatatatatagagagagagagagagagagagatagagtctggcttggtcacccaggctggagtacaatggcatggtcttggcttactataacctctgcctcccgagttcaagcaattctcatgcctcagcctcccaagtagctgggattacaggcgcacgccaccatgcccggctaatttttgtgtttttagtagagatgggggttctctatgttgtccaggctggtctcgaactcctggcctcaagtgatctgcccacctcagcctcccaaagtgctgggattacaggcataagccaccacacctggccgaatgatgaataattccttaatgtcactaaatatctagtcaagataaaaattacttgtactgctttaatgcaggaagtgaatcccaagttgttcaattaggaagcagttataatttagcctaagctttaaggaacaataaaatttcaaaaagcattttttaagtggtttaagattgtcggccgggcacagtggctcacgcctgtaatcccaacactttgggagaccaaggtgggcggatcaggaagtcaggagtttaagaccagcctggccaacacagttaaaccccatcgctactaaaaaaaaaaaaaaaaaaaaaaaaaaaaattagccaggtgtggtggcaggcgcctgtaatcccagctacttggtaggctgaggcaggagaattgcttggacctggaaggtggaggttgcagtgagccaagatcatgccattgcactccagcctgggtaacaatgtgagactctgtctcaaaaaaataaaaaataaagtgattgtaactgtatttcccaaacattttaaagaattatttattcacagaattcctattaatatcttatcgtgaatgagatatgattggggaagtgctgttgtactgaaaatagacaagaaattagtgcaactattttataaaataccagacgtattttacataaacttttttaaatgttttatatactttgtgttttcatttaattcctttagaaagctcttaccttgattctatatggcagtgactttttaaaaatcataaagttttatctattttatgtatttaaaaataatacatcaatttgaataaacatcagcttgccgagtaagtatgtctagttttgtattaatcattgtatttgctatggaatcctcatctgtaaaaatggagataaggtgtatctaccttaggttgttatgagggtcaatgagataaaacacaatgctaagagtgctagtagttattattaacatgaaacacacttgtgtcctgtacctttaggagaacaaggagactggcatggagagtgtaatcgaagcagttgcccatttcaagtgagtttacttcctattatttcacattcttttttacttttccagtacattcatttttcttagagtgttttctttgatgcaactgagaatgaagttgcagctttcagagattgacagacattttcaaattatagctctgaattagatttctcactgacatttcacttttctgatctcaccctgtactcagcaacgtaaagtgacattgtgagggttttcgtcacattcagaataggtgttcatagctgatggtttcaaatagtaaaaattaacctcagcagtgatctaagtaaatgcattgtaatttcttaaaactgttttgtttccatttgaatgtgctgcctaaattgtgggatagcctctcaatgccaccttctccagtgtccacagtcttcccccagtcaataaactggtttatacccttaaagatattaaagcagtttcttaagcctgttttttctttgcttcctaccccaatgacaatgtattcattttttttaacccactataaatttttgaagatagtgtctttattttttgttggttataaagacaatacttgcttttaggaaaaatacaaagaaaaaatattacctgtaatccaaccactcagatgatttctattatgtttagatgtatatctttctaaattttttttctatacttggaacacatatttataacaaaaaatgggttcatttcgtatttactattctataacctttttaaaaattaaataatggaatgtttccatgtatttgtgtctttgggggggcgggttgttggttttattgggtttttttagtttttacataatatactttgtcagtacatataggcatacttcatcctttttcacttcagcctgggtaacaaagcgagactcaagtgcagtggcacggtcttggctcactgcaacctccgcctcctaggtccaagcaattctcctgcctcagcctcccaagtagctgggattacaggcgcccgccaccacacctggctaatttttgtatttttagtagacatggggtttcaccatgttgaccaggctggtctcaaactcctaacttcagatgatccagcccgcctcggcctctcaaagtgctgagattactggcatgagctatggtgccaggccctttttcacttccttgtagtcatgtactgtaatgtatctaacctcttccctataatacatagcttccagattttctcttataaacaaatattgaaaatccttgtacatacagcattaacaaatgtatctttgactgtgaaagtgtttctttgaggattagctagatcaaaatgaaagcttgtattacattttggtacatacctcctaattgccttcccaaaaaagtcctcgatttacactctgactagaagtgtataaagagtgccctgcaactttgtcaacactttaatatgagcagtctttcagtaccttattttaatttgcgttactctaagtgaagttgagcttcttttcatgtgtttattggccgtttattttttcatactttaatgcatttttctttatggttgtttgtccctatcttattgttccgaaagtattatatattagaaatgtcaattcttatttaatacatcacagtactttcttccagtctcccttgttttttaactttctgtttttaaaactctgtctcaattggcttctgggttttataacttgcttaggaaagttctctaaaccccaatagtgtacctgcttttttctgcttaatagaacaacacggaagtctttacatgtgaaaatagagaaattatcactgttaatggtgttcagttgtttggagatgttgtaatttgttatttcacgttattagactttttaattgttgccactgcagtgtccatcacgttcacttgtctagttaggataaattccaagtgggcatgctaaataaaacagatgcatgtagaactcggatttagactgccaaatcaacccactgaaaatagttgtagcttaacacccaccagcagtatatgagagctctgctttcttgttctaatatccaagactatctctcataaattagtgtatggctttggtaataatattctaaggtcctttctttcacaggaaacctggattaacaggacgaggcatgtatgaactgaaaccagaatgtgccaaagagttcaacttgtatttctatcacttttcaagggcagaacagtccaaggtaattgggaaaattaaaaatgtagcagggaaggattgcattgtttttcttaagagatgaggtttcaccatgttgcccaggctagagtttggtggctattcacaatgccattatagagcattgcaacctcaaactcctgggctcaagcaattctcccacctcagcctcttgagtagatgagattacaggcatgcaccactgtatctggcttgaatttttttttcctaaacaacttttttactgcttttgcagattgaaaaatgatacatttttattgtaggggatttggaaaatataaaatataaagaagaaagtagaaattacttaaaataccctcacctaacattttggagttaccccctagcgttttgtacatatgtatatacgatctatataatacatacctttacgtatatgggtatagttttttaaaacaaattttcaacctgtattataatcagttaatccattttatgcacatttcagaattggtattatttaacactttttcatagagattcatggagcttttctaatcattcctaggtaattaaattttgcctttttggtggggcatgtaatcccagcactttgggaggctgaggcgggcagatcgcttgagctcaggagttcgagatcagcctggccaacatgttgaaatcccatgtctactaaaaatacaaaaattagccaggcatggtgtcatgcacttctcgtcccagctactcaggaggctgagataggaggatcacttgagcccaggaggtcaagactgcagtgagctatgattgcaccactgcattccagcttggatgatgggagtgagaccgtatctcaaaaaaaaaaaaaaaatctgccttttagcagtctcctcttaaaatggtttttcaataaacagcattaaataaaacttaaacataaagcttttatttagtttttgatgaagtcatagagttcaaacttaaataagtttgtacttatttaagtacatgtttcccttctaatttaaagtaatagagaactcgtttggagattcttttagttaaaaaaaaaaattaaccttgatgtatccgtttgggggaggactagaacttaaagatagatatcttttttattttttattttttttgagatagggtctcactctgttacccaggctggagtgcagacctcggctcactagagcccctgcctcccaggttcaagcaattatcctgccccagccttctgagtagctaggattacaggtgtgtgccaccacgcccagccaatttttgtatttttagtagagatggggattctccgcgttggccaggctgctctcgaactcctgacctcaggtgatccacctgtcttggcctcccaaagtgctgggattacaggtgtgagctgccacgccccggcctctgttgtgttattttctgattttagatgttcatccttggccagacacattggctcatgcctgtaatcccagcactttgggaggttgaggtgggcagatcacaaggtcaggagttcaagaccagcctggccaacatagtgaaaccccacctctactaaaaatataaaaattaaccaggtgtggtggtgggcattactaattcccggtccaaataactttattttttattaggcagaagaagcgcaacggaaattgaaaagacaaaatagagaagatacaggtatttttaatctttctgaaaatgtcttgcccatcttttttgcttgttaaacattgttttctgttaactatgatgattgtccttggtggaatgaatatttaaatgtaagctttcctagtgaataacctcctattcagaggaataataaatatgttaacacagaaatagtttgtgctaagtcctctgggttgatgttatctcagatcttaagacctttctaggggaaaagatagactttcttctgtactgctgctactttcgtggctctttttatgcatttgaccttgagaatgtaaaataatagctttaaggtgtgtgttaatgaatattctttgagttaaaactatcaaaagtaacaaagagatagtttctaaagcatgttctgtaaaagaaaccaataataacaactgtattttcagcactcccacctccggtgttgcctccattctgccctctgtttgcaagcctggttaacattttgcagtcagatgtcatgttgtgcatcatgggaacaattctgcaatgggctgtggaacataatggatatgcctggtcagagtccatgctgcaaagggtaggtttgaagacatttattatttatattttagtattttatagtacaagcaaaatattcttgtctgtatctatacacaggaaaactaggccgaaatgtattgtgttttcctaacttgaatatattgttactgcttttgtgtctgacagtaaaaacaagtgccagacagatttttttataccacatggttgttattacctcagtcccactgggcagttgttctctcctagattggtccttgtctttatatatgtagtattctgatattgatataatgtgttatcttttatatatgtttctaatctaattattttccaaaacaaaaattttttttgaatcatccatatccttattttgtagttgaagaaactgacactcatagacttacggtcctatagctagttaagtggcaagtctggaaccttgtttgtgttatttttgtttttgtgtttttgagacaggatctagctttgtcacccaggaagctggagtgcagtggtgcaatcttggctcactgcaacctctgcctcctgggttcaagtgatcccgccacctcagtatcccaagtacctgggattacaggcatgcatcacaacatctgcgtaatttctgtatttttggtagaaacagttttgccatgttccccaggctggtctcaaactcccagactcaagcaatcctcccccctcggcctccccaagtattgggattacatgcgtgagccactatgcccagccccttgtttgtattttactttatagttttaatgtaagccgttcgtacactatctcattgaattcacacaacaccccatgaatagatacaacttttttctcattgttagatgaggaagccaagtttcaatgaggttccattaacttcccatattaatctactaagtgatataacaattattcattaaatagaatgcctactttatgccttattccatgctaagcccttttttttttttttttttttttttttttgagacagttttgctcttgtcacccaggctggagtacaatggtgtgatcttggctcactgcaacttctgcctcccgggttcaagcaattctcctgcctcagcctcccaagtagttgggagtacaggtgcctgtcacgaagcccagctaattttttgtatttttagtagagacagggtttcaccacgttggccaggctagtctcgaactcccagcgtcaggtgatccactcaccttggcctcccaaagtgctaggattacaaggcgtgagccaccgtgcctggccatgctaagcactctgcatacagtatttgtaatcctcagaactctagagggaagctttgtttttccaaggctaaagatgatgacttgggctcagaggcgttcccttagggtatatattaatagcttgaaagcagtaaaaccaggattcagattcaaattttggagccctcctcgggaggctgagtagctatcattctttctttttgtctcactggctaagatgtgtgtattcttataatgccctcctatttatctataagcatatttaaagtgtaaaagcatggagctgtggtgtactagctcactactagtacagctgtactagctgtcgtgtactgtcagcattacatgaacaaaagatttgtgggaaataatggagagaagaggtgtgaacaatatttaccttacatgtacacttgctttatgtcacctagttcttccaagtctctgacaaccacagtcatcccatgtgaagggaaagatacagagacatcacacacatatctccttcaaaatctggggtgtgggcccggcacagtggctcacccctgtaatcctaacactttgggaggccaaggcgggtagatcacttggggtcgggagttcaagaccagcctgtacaacatggtaaaaccccatctctactaaaaataaaaaaattagccaatcgtcatggcacatgcttataatcccagctactcaggagggctcaggagaatcactggaaactgggaggcagaggttgcagtgagccaatattgtgccactgcactctagcctgggcaacagagggagactccgtctcaaaaaacaaaaaaacttgggcatgggataagagcagtaaaaaaacaaataggttgatacagtctctagaagtctggtcaggaatattttgtgagatacactgaagaactataaagtttataaatgataaggcattagagataaaagtttgtctttctcagatgatgaagatttagtccttagagaaattaggtagtgtcatagactggataattacatgggggatacgtttagctttataattacttgaccactaattcttggaaggtttttttaagtctgtagtataggtatagaataaaacttacatattatgtgaattgctggtcacagctggtgtaattttagcttaccctgaggatttgcaattgaaatttcttcctcattgaagtagaaaattttgtttttcttgacaataattgtttgttagaaaataaacctcagtcttttcatttaataaaaattagtacttcaaggccgggcatggtggctcacgcctttaatcccagcactttgggaggccaaggtgggcggatcacttgaggtcaggagttcaagaccagcctggccaacatggtgaaaccccatctctactaaaagtacaaaaattagccgggtgtggtggcacgcgcctgtagtcccagctactcgggaggctgaggcaggagaatcacttgaacctgggaggcagaggttgcagtgagcctgggtgacagggcaaaactccatctcaaaaaaaaaaaaaagaaaaaaaaattagtacttcaaattgtttttaattgcatttagtatttcatagtttgatttatctttttcaataattcttttttcctatttcttattaaaatatgtacttgattttttaaatttttactaaaagttacaaaacatttattcaaggtgttacatttaattggcatggcactacaagaagaaaaacaacatttagagaatgtcacggaagagcatgtagtaacatttaccttcactcagaagatatcaagtatgtatatatctttttactaaactaactcaagatataaatgattttaagaaatcacttaataacctcttttatttgatcatatagattctaaaagggtaatatttaatccaaacatttgaggctatatgtactcatctgtgtagtaaaggtactgtattaaaccctgatacatttttataaaaatatctagggctaagttcaaagttacagtcagctgtggttgacgtaagattctacagtattgaaaataaaaaaaaattataggggattagattgtcatttcatataaagaaatgtgactttttaaaagaaggccagggagtttttctagctttttattttaaaaatttcatacatatagacaagttgaaagaattgtccagtaaacattcatatacctgctccctagattcagtagtttgctatatttgcttttatatttacatactttcttgaaccatttgttgtagacataatatttcatgtctcaaagaaaagcttctcatttactaattttcagaaccagccattggtctgatagttacctgcaattgtggcaattttgaatgttttttgtttagagtttttttaaatattattcatggatttttattcagtgttttatagtcacttataatgggtattccttttgatgctcaaattatgcccattttggtcagtgggagtttatttagtcagcttctgtgtccttttcacccagccccatttgtatttgagtaccacctcgctttccagcccaaaagatgcccaagctcatcttgtactttccctgccacagacctgtagtcagccatttgctgaagtgtttttaaatgaattgatggtgctatgataggagtttataaatgctttgattgaaaaggattatttctgtaactgtgttcagtgccatttcttcctaaacgataactgtgagaattatactaccaggggacaaggaggaagtaattttgtttgctgctagatctctagttttcctttttgccctcatccaagtaaatgagagaaagaggagaaaccaccttttcccactgaagactttattcttggatgccagtttttacctattctttttctctgccatattttctttggattaatactgttgtttttgctttctttgtttctggtgtgtttattttagaataaccacacagaatactccctaatttcattcactcatcactataaaatattaggttcttggccaggcatggtggctcactcctgtaatcccaccactttgggagatcaaggtggatgaatcacctgaggtcaagagttcgagaccaacctggccaacatgacgaaaccctgtctctaccaaaaatacaaaaattaaccgggcatggtggcgggcgcctataatcccagctgctcgggaggctgaggcaggaaaatcgcttgaacccaggaggtggaggttgcagtgatccgagattacaccactgcactccagcctgggcgacagagtgagactctgtctcaaaaaaaaaaaaaaaaaaaattaggttctctcttactttctctttccttattaaacaatcatcattttccctcaacattactcttaacttgtctttagacattctacataattaagacacacgatttatttccaaagaaacctctcccttatctagagtcacatctctaatgcatgccacagttttagatgtgatagaatattaaagatcacacaggtcaatctcttcccctcttaggaaaaagggacatttttccagaatggcagcaccaaaatcaagaaaatcaatagttgaactttctggctacagactaatagaaaatatggacttgactcttatattcaaataaacaaactatgaattcctaggagaagaaattcattttattctgaatctagtttttattaaagtcaatggtcagagcaaataaacatatttgtgcatatatgcacctcttaatgctaatttatttttagacctgtaaaatctgagacaccacttatttttagctgaatttgtatgtaattttgctaaagggatgttaaaataatcatttgctataaaaagtcacttttgaatccttaaagaattctagttgttggcaacttgtttgtaaaagacaaatatgtcacattctcaagaagtattgaaaatctctattttggtagagccataatcaaattatgggcaataggtgttataagcaactgcatttatgttcctgtgcgtaggaataagtactatgaagtattagctattgttattgtgccttttatttttctgccgtagaacctggtgaagcgccaaaaaattctcctagcatactagctatgctggaaacactacaaaatgctccctacctagaagtccacaaagacatgattcggtggatattgaaggtaaaatttccacattcctctgctttttgtgagaaatattgaatatttgttatgtgtacattgtgatcatatttcatacaggatactgatacttttttttttgtagacttttaatgctgttaaaaagatgagggagagttcacctaccagtcccgtggcagagacagaaggaaccataatggaagaggtataaacagtaaaaagtgtgataatactaaaaaattacagcaagttcagtatgaacaaaataaatttatctacattaagttgccagttactcacaacatttaaattccaagaaatatgccactatttatctctatttgttgtagcaattttttgtctgctttttttctttaaaacaagtcagtttaagagtcttttctcttatttaaataagtgagattatagaatagttttttaattggtatttacagtgaagatatttctgctttggaaaaaaatgtgcgttttagcatctaattgtctaattgaatggagcataatttcagagttcaagggacaaagacaaagctgagaggaagagaaaagcagagattgccagactgcgcagagaaaagatcatggctcagatgtctgaaatgcagcggcattttattgatgaaaacaaagaactctttcagcagacattagaactggatgcctcaacctctgctgttcttgatcataggtaaaaaaaaaaaaaaaaaaaattaatgtcttgacgagtttttcccaactaggggcagtgttgcgttttctccttgtaagtatacttttaatcctaaagtaatttagtagaattcataggtaaattttgtgacctccatttagaagatttaatcttagaagtctctgaatgtaggtatggtaagtcctgtgtacacctggtagggtattttctgcagaagaccttggacattcatgaaagaatgagtacactacactcagttacctagagcgtatgacatctgtgttgaagattagattactgtgaggattaaaggagatggttttgatacataccaaagacttgacaatccaagttatcaaaaccatgtgttaaatatatacattcctggctgtgcgtggtggctcacgcctgtaatcccagcacttcgggaggccaaggcgggcggatcacaaggtgaggagttcgagaccagcctgaccaacatggtgaaaccccatctctactaaaaatacaaaaaaaaaaaattagccgggtgtggtggtgcatgcctataatcccagctactcaggaggctgagtcaggagaattgcttgaacctgcgaggcggaggttgcagtgagccaagattgtgccactcaccccagcctgggtgacagagcaagactctgtctcaaaaaataaataaatatatatacacacacacacacacacacacacacacacacacacacacactacacacacacacacatacctgtagtctgctattttgtgattatatagaaagttttgggatcattaattatattcataacctttgtattgcagccctgtggcttcagatatgacacttacagcactgggccccgcacaaactcaggttcctgaacaaagacaattcgttacatgtatattgtgtcaagaggagcaagaagttaaagtggaaagcagggcaatggtcttggcagcatttgttcagagatcaactgtattatcaaaaaacagaagtaaatttattcaagatccaggtaagtcatagctagatcctcatcttcccttttaataacaactgccagttaatgtggttggtgatacgttgagattttttaaacctaaaaataactccatggacttggatggtatctttggcaggtaacttaggcaggaattccccacttggcagatgtggaaccactccagaaagttgcacctgaatcacatagctgataaatagcagggattcaaagaaaagcttttctttgtgatgtaacattacatactttggcatttcacagtcttttccatccttcagtacacttgcaaagtcctggtcatttgttgacacactgaaataataattgttttgtcttattgatagagcctgagtggaatctcctgagaacagtgatggagagttacctatgtaagaggcaatccttgagccaaattgttttagaatagtaataccaccacagatcgggttccccagaaagcagattcttgggatacagattaccgtgcaggacagttgagggccctctttcagcaactgagggagtaaagcagggagatccagtccgcacatgattttgtccaccacagacacatttatttctctgcttgtaggttgtgctctgtgtgcgtgtgcttcagcgatacccagtaaacttcttgagagtaggaactgtgtcttgggaattcccagagcactgctttaaccagtgcctttcacactgcagcgtgaaaggaggtttgagagcccacttttagagttgccttctctctgtaaagaaagtctttgcatcctacttatgaaaggttggtctgcttcatctttaaaaatggtcatttaggctgggtatggtggctcatgcctgtaatcccagcactttgggaggccgaggcaggtggatcacctgaggtcaggagttcaagaccagcctggccaacatggcgaaaccccatctctactaatagtacaaaaaaaaaactagccaaatttggtggcacgcgcctgtagtcccagctactcaagaggctgaggcatgagaattgcttgaacctgggaggcagaggttgcagtgagccgagattgcaccactgccctccagcctgggcaacggagcgagaccctgtgtggtttttttgtttgtttgtttgtttgtttttaaaaaaaaaaaaaaaggccaggcgcagtggctcatgtctgtaatcccagcactctgggaggccaaggcaggcagatcacaaggtcaggagatcaagaccatcctggctaacacagtgaaaccccatctctactaaaaaatacaaaaaaaaattagccaggcgtggtggcagttacctgctactcgggaggctgaggcaggagaatggcgtgaacccaggaagcagagcttgcagtgagtcgagatcgcgccactgcactccaatctgggcgacaaagcgagactgtcttaaaaaaaaaaaagatatttaaactaggtgctttataaatttcattccaggccaaagacaaagttgctaattttatttaacttattacttctgaagaaaaagcattagctggctataagtggattttcttaatgctttgacatttgcactgttctagtgttaaagcaaattaaaactattaaagcaaattaaaagtagttctttctagagtgttaggaaatttcgaagattatactaatttatataaagaattcaaaaattccaaaagaagccagacatccatcttgtttttcatgatttttcatcccctttgaatataaaaattagcaccaggacagaagactctgaattaccttttttccccccatctgatctggtctgtgcttagattttttgttgtcactttggctctgatgtgattattcgctgtatgagtgttgttaggcagtctgtcctctagggggcgccccgttactgccaaaacattttttattagcgatcattttaacccagctgccctgaacgcacataaggcagccccatgaagagagtagctcttttacctggagctcagggtacaatgggaggaattggaatatctcagcaccctgaaagtgtgaaatgttcaaaagattggatatatttaaattcatagttctaatttcagtttaacaatttgagaatgtttaattaatttgctgtgggtggtgaaaattagagagtcctactttctaaataatccaaggtgttgcataaattggtatctcagaggaataaactagcatttcatttcaaatttcaagtctttatcaaggattttacaatttaaagttacacatttgttataggaaaattaaatgcttcacttttgttttgttttgttttgttttgtaatgcagaaaaatatgatccattattcatgcaccctgatctgtcttgtggaacacacactagtagctgtgggcacattatgcatgcccattgttggcaaaggtaatgtatattcttaatatttgtcaagagaagtttatctaagggctcaatattttttaaatagaggaaatttcattctagaaaaaaggaaaagaactaaaaatgttgaaaaaatccgtatcattgcctaataaataacaaaagttatttgccttgtcatagatgtaaagtgtatgtcagatatgttttttaatttagctttatatccaagtctcttctatatcttccaaagaaggaagtggatctgtatcagtctgtggatgaagaaaagggtttttacagtaggataaactctagaagggtaatgttgtctttctttgggtccagggtggacaacttttgattccatagatgttagtacttgctttgttacttcccaaaattgtaatggctccctgtgatgagatgtcctgaatttgttctaccttggtgtttcctatgcttctacaaaaccaacaaatcaataatactattattctagaactatgctcacccagttatcatgaactacccctaacaactagccaccacattgtagtcccagctacttgggaggctgagacaggagaattgcttgaatgtgggaggtggaggttgcagtgaaccaagattgtgcaactgcactccagcctgggcgacagagcaagactccatctcaaaaacaacaacaacaacaaaaaaaaaacaaatagccaccagccttggggaagtggcaagagaacaatgacaccaagaaatttttgttgctgctttgtgaatgcttttttacatggcagtctttttttttattttactcttttagaacttttaatccatttggatttttaaaatcactcaaaaatcatgttaaaaataatttagtttaagattttcatttttgaactatttgtggaaacaaattattttaaatgttgaagcttatggctgtcatttatgtaaattaccattgttttgatacctcatgttctctaattgtaaaggtattttgattccgttcaagctaaagaacagcgaaggcaacagagattacgcttacatacgagctatgatgtagaaaacggagaattcctttgccccctttgtgaatgcttgagtaatactgttattcctctgctgcttcctccaagaaatatttttaacaagtaagttttggctcatgacaactattacaaagcaatagtttgctttgaagataatgaaataataaatcaaggaggaaaacttagtctaggcaattgcatagtgttttccagatactttccaaactctaatcattttcttctagcagacctgtggaatgtgattttagtttttagagaggaacaggtgaaaatttaacagtttctaagctattaaattcctatgtatttatgaaaaccaagtatctggtttatttctagggaccctacttttaatatcttccatacacttttcaagagatgctcagtaaactggtagagggagatggaacaactcaaactgactttataggacagtctaaaaatcgaataaaactttttgctgtactggccattcatagttttaagaaccaggcaaaaaagtgaaaatctgttggtatattttaaatggaaaaatctcagctgggcgttgtggctcacatctataatcctagcactttgagaggccaagatgaaaggatcatttgagcccaggagttcaagaccagcctgggcaacatagtgagaccctgtctgtacaaaaaataaaaagttagctggatgtagcggcatattcctatagtcccagctacttcagagactcaggtgggaggctcgcttgggtcaaggctgcagtgagctttgatcatgccattgcacttcagcctgagtgacagagcaagaccctgtctcaaaaataaaataagtgcttgcttcagcagcacatatactaaaattggaacgataaagagaagataagcatggctctttcacaaggatgacacacaaattcatgaagtgttccatatttttagctcttttagaatttgtctagcagactaaaaaaaaataagaaaagaaaatggaaaatttctgtaacttcacagttttttggatgcttttagttacgagtattggacatactcatttcgagtatgaatttgataatgtctgcttttcgaatctgaacttcatttctcaatgtagaattatgctatctacgttgcatgcacaaatactaagttatgtgagtataaacgatccatttctgtgttatttggattcagttcaaagcaaagtcagttttttcttgtcagttttaggagttcaaactttggtgttcttagtctatgctaccacaaaatgttcttaaaatattagtagatttgagtgtaagctcatgctttttaattataaaagaatatcgtggtactgacttatctgcatttgaactgatgaagaaattaattattgttagatggaggattaactgtgtataagaagaaatcacccttgttggatttcatctgtcactttattggtccaatttttgggttttgcccatgagattcaattatggtttagtcatattcgaatacaatcataaaaagaacacaggctttggaatctgacagagccaagtttgaatgctagctttgtcccttattcggccttagtcaagttacatagctctaaacctcagtttcctcatctgtaaaatggggacaataataaaacctattacaaaatataggaatacaacctatgcaaataataatacaacctgaaacaaaatgtagggatattttgaggattaagtctaataccataagatatttacagtaaaattccttactaagtgcttgtaacataataagcacttggtagatattaatagtgatggtgattatgatacttaagaaattctagcaaattccaatactgaagagtgagatttttaatacacagtgttattaccatcatattgacaaataatatattcctttccattggccaatatcctgattttttttaatgcaacaaattttcccttatcctttttgtttttaatatttggagtgtgtctaaaatatgcctgtgatcatttaaggagtcttttgtatcttaaggaacaataataaaacactaaatactctctataatcttttctagcaggttaaatttttcagaccaaccaaatctgactcagtggattagaacaatatctcagcaaataaaagcattacagtttcttaggaaagaagaaagtactcctagtaagttctggtaacctgttttcatttttccctaaagtccgaggtcatcagaaaatgtatttccagaagaagttgtttaaaagtgaaacctcccatttaaaattttgactcattctaattttccttgtcttaataaactaaatttgactttactgcattactccttattccttaaacacacaagctcatgtgaagtttctaataaacacttctcacttattcccccattttattgaagagcttctggaggtgggggagatgtaactgagtgttgcagagctagctttagttctcggtgggctaactcaccttactgttggcattaccaaaggcttcccaagtttcatagaccatgcactgcacttatgaccttgtgggaacgtagtatgaacaggatttatatcattggttttcatagaaacagaatagctactcttgtttttgttttagtggctgtactataaggaaaagcatagttaagaaagggccttggtcaactagagcaataacgttttcatgcttcatatggttgttatgccagtttttattagggaatttttttccttttgtttttgatttctttgacctatatggctgtacttttaggaatattgtcatctattgaataatagtataaaatgcctgtttctatagataatgcctctacaaagaattcagaaaatgtggatgaattacagctccctgaagggttcaggcctgattttcgtcctaagtgagtatattattttactcctttaatatttgacccatttgaaatgaatgattaagtcagcagttaggaggaatatgatttggcaagtgagggagcaaaatgttataggatactgatctttagttgtaaggtttaagcagaggctgagacaggaggatagtgtgagccccagaggtggaggctgcagtgagccttcattgcaccactacattccagtctgggtgacagagtgagaccctgtctcaacaacaacaacaaaaaaagtttaagcattacttgatggtatttattgcagtacattaaaaaaatctaagaaccatgtggcatgtttaactctcaccaccctctcctagtcagcattgctgacccctgccacacccctttctttacctggctctccttgacaacatctaatcagtaattctaaatacaaactgctcagcctccccaatgaatcccgcacttccgtctgacttcaaaatttctattaatgacctaaccaagctcttagtaacccaggattaaaaccagaatattttccaccctattttaccccatagccagttagttacaaggtatagcatagattctggagctagactggttgattcagttcccagcaccaccacttattagctgtgcaactttgggcaaattgcttgacctctgtgtacctcaattccctcatctgtcaagtgaggataattcataggtgttattaggataaagtgacataatgtacgtagagctacctgaaagctgtgcctggcatgtaccaagtaactcaataaatacagacctaaagacttgaatagaaaaaaacatcatgcctataatcccaggactttgggaggccatggcgggcagatcacttgaggtcaggaattcaagaccagtctagccaacatgatgaaaccctgtctctactaaaaatacaaaaattagccaggcgtggtggtgcacgcttgtaatcccagctacttggggggctgaggcaggagaatcgcttgaacttgggaggcagaggttgcaatgagccaagatcatgccactgctctccagcctgggcgacagaccaagaccctatctcaaaaaaaaaaaaaagaaaaagaaaaaacttcaatcttctgtctgccacactcccccagtcctgtcattttatttgtcacttctagtgtttacttccatatttctaattagacagtatcttcactgttgactggtaaattattccacaatttttggttaaatctagttgtcagtttttacattataataactgtgtttctgctgatacaagttgcgtattagaattatatttcctttcttgtacagttttgtcttttttttttttttttttttttttgagatggaatctcgtgctgtcgcccaggctcagttttgtctttcttatagttaataattaccttgtctttttcatgtacttgttttctatgtatttttttttttttttctgaatggtgcagtagatctatccaatgtctaacaactttttctttttttttttttttgagacagagtctcactctgtcacccaggctggagtgcagtggcgtgatctcagctccctgcagcctcccctcccgggttcaaacaattctcctgcctcagcctcccaagtagctgggattacaggcatgcactaccatgcccgactgatttttgcatttttagtagaggtggggtttctccatgttgcccaggctggtctcaaactcctgacctcaggtgatccacccgcctcagcctcccaaagtgctgggattacaggcatgagccaccacacctggcctcctaacaacttttctaagtgctcagatctgtccgatgatcttctgttgctaggtccctccttcccctacacagcctctgttctcctacagtcaggagggggcacagctgtcacttctcttggccctgctcctcttattttctggattgagtatcttcctctttcttaagtacttgactctttttgcagattcctaagaaaggatacctggatggtatattttcatgttcgaaaatatgtttattttattcatatgctcaattgatagtttgggtgtagaattctagggtagaagtaactttttatctagattttgaaggcattattttactaaattctaatccattgagaaattattcccattctaattcttgttcctttgtaaatttttgtttttttgagacaggttctcactctgtcatccaggctagagtgcagtggcacaatctcagttcactgcaacctctgcatcccggattcaagcgattctcctgtctcagcctcccaagtagctgggattacagacatgagctgccacacctggctaatttttgtatttttagtagagacagggtttcaccccatcttggccagactggtctcaaactcctgacctcagatgatccacccacctcggcctcccaaagtgctgcaattacagtcatcagccactgcactcagcctcattttttttaacttttttagagacaggttctatgttgtccaggttggccttgaactcctgggctcaagcgatcctcccgcctcagcctcctgagtagttgggattacaagtgtgagccaccatgcctggttcctttataactctattactatactattacttctattttctattactactttttttttttcttttttgagacagagtgttgttcttgtcacccaggatggagtgcagtggcacgatctcagctcactgcaacctctgccacccaggttcaagggattctcatgcctcagccttccaagtagctgggactacaggcatgcaccaccatgtcccactcattttttgtatttttagtggagacagggttttaccatgttggccaggctggtctcgaactcctgacctcaagtgattcacccaccctggcctcccaaagtgctaggattacatgctgagccaccgcacccaggcttgtaactctgttacttctgaaaactgtaagatactctctttatctcttcagtgttccgaaattttctatgatatttcttggtatatgaatctttttttattcattttgctaggcgttcagtaaacctattgaatctgaacattcatgtccttcatttctgagaattttttatgttgtttcttaaataattttctcttggattttcttctttgaggtagttctgttagctcactgttgcccctcttgaactgataacctaattttcttatgattttttttgctttctacattgtctctgttttccctgagttctgtttctctgctcctttgttttggtttatctctttgatgctttccttaaatgtttattagtccttggataactatttaagcataaggcaatgagcataaggatacctggtggacaggttggagcttgctgacttgtaagcctcacaataaggtgatcaggacacctccagtcttttgcttggtgacccccgaatgtctgtgtaaaaacaactttcccctgaggattgttcactggaaaaactaatctctgtggaagtgggtatacattgctgatgttctcaggatgggaaacagggtcaaggatctcattgtgtagtgtgtaggcttgtgcccagcaccctgttttcagccctgtgcctcacccctgctaagtcaaagagtctaactcctcttgggcaggggcagtttgcattatctctgatcactgcatacaattatctctggatatatgttaagtggttcaatttcaatatagcaaagagctgttaagaaaccgaaccatttgattgatatgtgcacattgttctgagctaattttatacatgtttacttcaggatcccttattctgagagcataaaagaaatgctaacgacatttggaactgctacctacaaggtgggactaaaggttcatcccaatgaagaggatcctcgtgttcccataatgtgttggggtagctgcgcgtacaccatccaaagcataggtaagagatttacagctgtttctctataagtcacaagcattcattgatatgaattaggcatagaatcttgtttttaaatgaaatgtttgaagtgggtaacaacgtgaagaaataataaaaagacttagaagcaagaaatgtaatgtactgacaaaatactagattgatagttcataaattaaccacagcaacagagaactcttggtggtggtggttatagcttcttgtcagttgaaggaatgtactgttcgtttttactttgtaaccaaatttaattcttgtgaaatgactttgaagattctgaaacttgacaatattgtactttctgtaggattggggtttttttaacctttttaagaaaattatattaaaatatacataacataacatttaccattttaaccatctttaatctgtagaaagaattttgagtgatgaagataaaccattgtttggtcctttaccttgcagactggtaagttctcagtttattcagttcatgatagtggggcatggaaattaggtggttctgctgcttttaatcttatggacctgcagtagttacttacaccttcacttctttcgtagtaaaaacccattttctgtaaggatattaaaaagtaatgtttgtggtttaatctttcttttaaataaacttcaggaggccgggcgcagtggcccacgcctgtaatcccagcactttgggaggccgaggcaggaggatcacctgaggtcgggagtttaagaccagcctgaccaacatggagaaacctcgtctctactaaaaacacaaaattagccaggcgtggtggcgcatgcctatagtcccagctactcaggaggcagaggcaagacaatcgcttgaacccgggaggcagaggttgcggtgagctgagattgtgccattgcactccagcctgggcaacaagagtgaaactccatctcaaaaaaaaaaaaaaaaaaaaattgcagcctggcagtatagtgagacctcatctctacacaaattttaaaattggctaggagtggtggcgtggcatgtacctgtggtcccaactacttaagaggctgagttgggaagatcactggagctggggaggttgaggctgcagtgagccatgattgtgcccctgtactctaggctgtgcaacagcacaagatcctatctttaaaaaaaaaaaaaagaagaagaagaagcagaagaatgtatattctagctccactttcttgctaaccattcatatttcaactcctgcagtttggctccacttctaacactttctgacttctatgaaatatctctttccaagttcaccaaatgatctcctgattatcattttgcgtgggcattttttagcccttgtctttgaaacctctacttaattgctcattctgaaacttttatttctctccattccttcttcattctgaaactcaattttcccttaatttctgtgacactcttggctttctttctgcctctgtggctcctgcctctcagcccactctccctcctccatcctgcagttgtcatttttaaacctccagagttctgccatctaatactcttccctggtcagccccatctatgcctctgatttcagttatatccaaatgatccccacctgtgtatctccaacccagatctttatcttaggtgtaggttatctctgcctatttttttaacctggatctcctacacatacctaaaattcaatccaaattaatttttcttcctatagtccctgttttagttaatttcaccactattcatccaggagaaaccagaaaattgaagtcttttttttttgagatggagtctcactctgttgctcagactggagtgcaatggcacaatctcggcccactgcagcctctgcatcctgggttcaagcgactctcctgtctcagcctcccgagtagctgggattacaggtgcatgccaccgtgcccagctaatttttgcgtttttagtagagatggggtttcaccatgttggccaggctggtctcaaactcctgacctcaggtgatctgcccatctcggcctcccaaaatgctgagattgcaggcatgagccaccattcccggcctagatacattttttagcctgggcattcacattcagttggtcagcagagtctgacaaattctcaccattccttcttctacttgtttggttcagccccatattatttcttgcctagattatcatagcagtttttacccagaatctcactcttctctaatacgttattagaggggctcctcaaaagcaatcctgttcatattcttcatacttttacaaacttcttaacctatttctccattatcacctcctgccagttcccacccctgtggtccagacttgtagaatcactgccagttcctcaatgctagttcccatgcctttgcacattccatttcctctgcctagagtaccctaagcagactgctactctttcagatgctgttcaagctttcccttcccttagaaagccctctgaaccatgtactgtgagttagagacctctcatctgtgatgcctgcctccttccccactttcttcctttcccaccccaggactttaagctctttgagagcaggagggggagaatgggttttatttgaagatcttcagaaccaagacctagtgtatatagtaggacctcaatatttattgaaccaaacattacagaaaatttggaaaatgaaaaaacaagcaggaagaaaaaagtcatcaacttatcacatacccatctttttccattagcatatttatgcttgattacaattggtactcacatgtagctttgtttctgctgtattctttaaatcaagagttttcttattactgctacttagtcctcataacaatttttaatagctgcaggcaccctcatttgtaccaccatcttcttagacagtttccccaatatttggagtatctctttaggatactctacattttacggaagagtatccacattttagaggatctctttaggataaacataagagatatgtgttttagggtatctgtttaggataaacatagagaaatactgcatccgcatcttggcttgtttatttgttttttgagatagagtctcgctctgttttccaggctggagtgcagtggtgtgatctcagctcactgcaacctctgcctccagggttcaagtgattctccttcctcagcctctcgagtagctgggattacaggtgtgagccaccacacccggcctgcactggcatcttgggagtgtcccttgctttctgtcagatgcgtatattctatattcttttcttttccagagaaaaccagcaacatggtggcaaagagatagatttcatttattcagcacacacttagacatttcccattccatttatcctgtgttagaggcatgtcattgagatgtcatagatctagttccataccatctagagcagtttcattgtgcatccagctgtgctctgaactagcattcctgaaagagaactgctttgcatttttgttttttgttaattgcgttggtttattttaggatgactgtcttaggtcattgacgagatttgccgcagcacactggacagtggcatcagtttcagtggtgcaaggacatttttgtaaactttttgcatgtgagtattaatacatttataacatgttgtaatttttcatcctctgaaattttgtttttaatggtacagcttctctcagtaatgaattaaatatttagtagtactggttttcttatatataagctctagcttataaattctcatgtgtcttgcaagaagataaatttaaagcagattatatgcattttaacatgttggcatatgaaatatgctaatgtatttctctttaaatctgtagcactggtgcctaatgacagccatgaggaacttccatgcatattagatattgacatgtttcatttattggtgggtattgtgcagtttgtttggacttctacgtcatactatgtaactttaccttaggtttggtgagcagtgtagtggcagacaggaaggagttatgtgatttccttaccccttctgagtataattcttttatgagaaacctcaaaaagaaaatatttaggaacctagttgagagacttgacctggttatcgagacgtcctctgactcttattttgctttatggctgaggttagtattttaacctctctgtgcttttaacctgtaaagagataaaaacaccagcaacgggtcaggtgtggtgactcatgcctgtaatcccagcactttgcgaggctcaccccagatcacttgaggtcaggagtttgagagcagccttgccaacatggtgaaaccctatctctactaaaaatacaaaaaattagctgggcgtggtggcacatgcctgtaatctcagctactcaggaaagtgagacaggagaatcacttgaacccaggaggcggaggttgcagtgaccaagattgcatgactgcactccagcctggatgacagagcaagaccccatccaaaaaaaaaaaaacagcaacagaagcactgctgctggcccatacagtgcttttgtacattttcgaaaatctggcagatacagccctgtggtcacactacttagcagcagagagccccttataattcagggaaaggtatgtcctctgagccaggacatcctagtgctaagacacacagctgtccaaatagtgggtagccaaatttcagccctacctcaactgggttcccttgcacagggtacagagtgtactgccacacccagcagccccgagtgctgtgcctttattctctggacctcagattctgcccctttaagttggttagtacctactttatatgactatgtcagaactcagtgagttaatccatgtaacacacttagagcaatatattcctaataaatgcggctattactgttctcattgctgcaactaaaaccaccaccacttatactgccatgcagacagcaggaggccaacagagctagcatttgtgtacctgccagcttttacatacgttcacacttacatctctacaatttacatgtaacatattgtctttagtttaccaatagggaaactgaggcctgatcagagatattaatttgtgtaaaacagctcataagaggaggaggtaggattcatatctagatatttatgggtccaaaacccatgttttttcaactgcctacagtcctggagagagttcagatactgtttttgttaacaataagctatgtatagaggacccactggattaatgaaatcatagtgcccatcaagagtcctgtaactcaagtcatttcatgtagccagtcctattggattttccaacatggatgccctttctttaagaacaaagatttcttaaagggaggagctgaactcaggagggatcacagtaagaaaatggaaatgtgaccaggcgcggtggctcacgcctgtaatcccagcactttgggaggccgaggtgggcggattacctgaggtcaggagttcgagaccagcctggccaacgtggcaaaacctcatctctactaaaaatacaaaaagtcgggcatgatgttgcacgcctgtaatcccagctactcaggaggctgaggcaggagaatcgcttgaacccaggaggtggatgttgcagtgaaccgaggttgcgccattgcactccagcctgggcaacagagtaagactctgtctcaaaaaaaaaatcaaaataaaagtaaaagtaagaagatggaaatttgcttagctgtgaaaggaaaggcgatctgtctgatgtcctgtgtttggtgcctaggtgggcttggtgcttgcatttcctgcgttgcagtgtcaggatttttcagggatcagccttggcactggagaccttcacattttccatctggttactatggcacacatcatacagatcttacttacctcatgtacaggtaactcttgcctttttgtcagtttcttgaaggaaatacttgagttttctgagttttaaaaaaagtattagaggaaaaggtatttggatgagaataacacatgaataaggctgtttttttctgtgtatcttcatatgaaaagttttgaaacatttctttctcctcttaaaatttcctagtaatgtgaatgtttctagttttaatttcatacattcagtaatatttgtgtagaatagtaattaaatcttttagaatcttatgttttagaatgccaattttgttttaacttacatgtttgttaatgcccacatgaattcatcattaaattacgttttgcattcaaaattcttgtttttcatacactttaagactatatttatttgattttacttaaaacatgccagctggctgtttggtttgattgagatcaatactgtgctcccacttgagggattacaattttgcatgttttctaggaatacttcatgttatatgtgagtttatgaatatatttgcatgcttaatgtcttcagtccttttgataacacttaattggaaaatacagagtactagtatttccttatctttcagaagagaatggcatggatcaagaaaatcccccttgtgaagaagaatcagcagttcttgctttgtataaaacacttcaccagtatacgggaaggtgagttagttatctttacataacgcatttccctaaatattgctagatgatgatagcatgagaaaggaattcgtttgttaattaggggaatttgttgtctgttgacatgtttttaaaataagacgtggagtgatctgcagagcctttctgaactattcatatactaacataattggaaatctgggagaaaggtgataatatgcagagcttcccacatttatttggctgtggaacccttcatttgctcagggatctggcagagactagaggatagatcaaatgtactttggaaagttgatactctaaaacttatgttgtctcattcagaatgggaatttaaaactgcaagttaaattggcataatttatttttaaggtaatattcagtagtagcaggaataaaatgaaattattagaattccatgtatggttagagtcatgatttgctacaaatagcaattcagtagtttgcttagctttcaacagtatatatgtcaagaatctgtagtcaggaacctataaaaatgtctgttttttgactatcccatttctgagaacctacattaacaaaataattcaacatatagaaaaaaaacatataggcatataaagatggacactccagccaggcacggtgtctcacccctataatcccagcactttgggagaatgaggctggcagattgcttgagcccaggcatttgagaccagcctggccaacatggtgaaaccctgtctctaccaaaaaatacaaaaattagccaggcatggtagcatgtgcctgtggttctatcttctcaggaggttgaggtagtcagatcacccaggcaggtgaaggctgcagtgagccatcacaccactgcactccagactggacaaaagagtgagaccctgtctcaaaaagaaaaagatgtacactctgatattatttatattagcaaataattgaaagcaatctaagtgtttgcaggggaatagtttgatatagtgatgaatgtgttccaaaatattataaatctatttaaaatatggctcctaggagctgggtgcagtggcatgtgcctgtagtcccagctgctcaggaggctgaggtgggaggattgctggagcccagtagtttgagtccagcctggacaacttttcattttccacattttctctttatgtcactatgttacttttataaattttaataacatcacacctgtaatcccagcactttgggaggccaaggcgggcagatcacaagatcaggagatcgagaccatcctggctaacacagcgaaaccccgtctctactaaaaatacaaaaaattagccgggcgtggtggcaggcacctgtagtcccagctactcaggaggctgaggcaggagaatggcgtgaacccaggaggcagagcttgcagtgagccgagattgtgccactgcactccagcctgggcgacagagcgagactccgtctcaaaaaatttaataacagcattggaggctgtgtcaccacttacacctggcatcctataataacacacacccacttgcctgttaactcacaacttttaagcatacatgccatcagttccaaatgacagtcaagtctgttttcacactataagtacagtgaccttttcttagtagatttcccaataatcttttttttcttttttagtgccttgaaagaaataccatccggctggcatctgtggaggagtgtcagagctggaatcatgcctttcctgaagtgttctgctttattttttcattacttaaatggagttccttccccacccgacattcaaggtaatttatactttctttcaaaacgtagggagagttagtaatcctttactccagcaaatataaagatcacttgcaaaaatgaaaattgactaaaagttcaaagaatagcttattgactatggtgatgtacacatttatagcataaaatgtatgtttatgcatatgtctccatttatttggatctcagtaaatgactgttaaacttctgtgtaaatgtttttacacctgcaaagcccttctcccgtaaagatcatagttttgctttcagatgttaaaatgttcagttatgtattattcataaacaaggttcctcagatttgaaaaggtgaaaactgacaatttcaagtgatttttaacttgaaacatgcatagcattaaaatttagaatacccataattgcacataaatctgattttaatctgggaattgatttgctctttcatagttgttttccatgttctgttttgattcatttcataaaagtagtatgaatgtggacttgactgtatctctgtatcccacagtgcctggcactggccgtagagtacctgcatgcagtgctactctctgaaagtttgtccactggcatttccatttagctagttgcctaggaaccatataaaagagtttagtcttccagattatttgcagtgatgattagagttggtatttaaatctgtgtctcgtggtaaaaccatcttgtatttctgtattggttgatccttttccagagcacccatacatttttatcatttaatgttcacaataaccctgtgcagtagattgtgcaggcacaccattttgcaaatgataaagccgagacaccaggacattgggaccagtttgatgtaggagtcgcctgactgcacttgacgcattgcgtcattttccatggattccttccatgtgccattctgttaacttcctacaagttacgtacctggcaaattggaagtctttcatcctttttttttaaactctgctattgcttaactctcatgcagaatatgcccttagttgttatatgcactcttttcttgttcttcatttgcagttcctggaacaagccattttgaacatttatgtagctatctttccctaccaaacaacctcatttgcctttttcaagaaaatagtgagataatgaattcactgattgaaaggtaatgattatatacttttctttgttgtattaaatagctctatggaaccaaactttagttatcacatatgtagcaaaattctcaagtaatgaccctggtagaattcaacacaaataattcaaactataatgggtgggccttttgttgttgtttgttttgttttgttttgtttttgtttttgtttttgttttgagactgagtcttgctctgtcacccaggctggagtgcagtggcatgatcttggctcactgcaacctccacctcctgggttcaggggattctcctgcctcggcctcccaagtagctggggttacaggcatacaccaccatgcctggctagttctttgaccaccatgttggtcaggctggtctcgaactcctgacctcaaatgattcacccacctcggccttccaaagtgctgggattacaggtgtgagccaccgcacctggcctatgagtaggcctttttagctaaggatctggcttttcagtaaactttttgccaagctagtgaatagcataaacaaatttgcatggaaggggaatagtggtagaaatgttgatttctttacatgaacttacttgttaaggactctcttccataggttttttcttgtttttgtttttaagagatggggttttgccattttttccagactgcctttgaactcctgggctgagacattcctcccacctcagcctcctgagtagctgggactgcaggcacatgccatcacactcagcttttcatagatttttaaagctgaaagaacccttaaggctatctagtccaataccctcaactttatatttgagaaaagtgaagtctagagaaattggcctgtcaatcatgtcaagttagtgactgagttaaatatatggctgttctgtccacaaaacgggggaaaatatttgcaaactacatatctgataagggattaacatccagaataggccgggcacagtggctcacccctgtaatcccagcactttgggaggcagaagtgggaggatcacttgagcccagaagttcaagaccagcctggggcgggggcgcggtggctcacgcctgtaatccgcagcactttgggaggcccagacgggcggatcacgaggtcaggagatcgagaccatcctggctaacacgatgaaaccccgtctctactaaaaatacaaaaaattagccaggtgtgttggtaggtgcctgtaatcccagctactcgggaggctgaggcaggagaatggcgtgaacccgggaggcggagcttgcagtgagccgagatcatgccactgcactccagcctgggggacaaagcgagactccgtctcaaaaaaaaaaaaaaaaaaaagaaagaccagcctgggtaacatggcgaaaccccatctctacaaaaaatttaaacattaggcatgctgacatgtacctgtcaggaggctgaagtgggaggatcacttgagccctggaggtcgaggctacagtgagctgcatgccattccactccagcctggatgacagatcaagaccctgtatcaaaagaaaaaatccagactatatatatccagaattcctacaacaacaacaaaaataaaacccaattaaaaaataggtaaagggcttaaataggcatttctccaaagaagataaatagccaaaaaagcatacgaaaagatgctcaacatcactagtcactggggaaatcacactgacataccacttcacacccattaggtgagctattacttttttaaaaaaagaaaattacaaatgtttacaaggatgtggaaaaactggtatactggtatccttgtgcatgggatatagaaaatgatagagccactacggaagacagcatgacagttcctcaaaaagataaacataaagttaccttatgattcagcaattccacttctaggtacagattacaaaataactgaaagcaggaactcagatcaatattatacacccacatttatagcagcattattcatgatagccaaaaaatggaaccaactcagatgttcaacagatgaatggatgcacaaaatgtggtgtgtacacacacacaatggactattattcagtcttaaaagtaggccaggtgtggtggtgcacgcctgtagtcccagctactcgggaggctgaggcaggagaatcacttgaacctgggaggcggaggttgcagtgagccaagattacgccactgcactccagcctgagtgacagagcaagactctgtctcaaaaagaaaagtaaagaaaattctcacacatgctacaacgtggatgaaccttgaggacgtgtgctaagtgaaataagccagtcacaaaaggataaatactgtatgattccacttcactgaggtacctagagtagtcaaatttatagaaacagaaagtagaatggtggttcccaggggctgggagaaggaattttgcatttaatgagtacagagtttcagttgggaaagatgaaaatgttctggagatggatggtggtgctggttgcacaacaatatgaaggtacttaatgctacagaacattagactttgaagtggttaacatggtcatttttatgttatatatattttaccacactaaaaaaaaaaatttttttttttttaagtctcactctgtcacccaggcttgagtgcactggcacagtcacagctcatcctcctgggttcaagcactcctcctgcctcagcttcccaagtagctgcgactacaggcacatgccaccacacccagctaatttttgtatttttagtagagaagggcttttgccatattgcccaggctggtctcaaactcctgggatcaagtaatcttcccgcctcagcctccgaaagtgcagggattacaggcatgagcacctggccaaaaaagttttatttttaatatgaatgttctagctccagataatgttagcttggcattaatacaaattaatatagactagtttttctagagtatccaaattagtaagataatgatgtttatagtcacaaattgtatatatttaagcattcttgcttttagaaaatattctcctgattttaaaagttgtaggcaaaatagtatttctacaggtttcttttgatgaagtaaatatgttaggtcaagaatattattttcctcttattggctatggaggggaaaaaattctagttctaaccctttaaaagtgttttgtgtttttccccctctgtttacattaaagttggtgccgtaacagtgaagttaaaagatatctagaaggtgaaagagatgctataaggtaagttaaagagcctcaaaaactttattgaggtgggagaaagggtggaatcaggatataagtgctatattccttcagaaactgacttctcaagcctttagtgattccaaaaggttaagatatgttgccttcatattttcttcttaatctaatgagagtctatcaaagtcagaattatgaacataaatatactacattcttggcagagaaagcaaataacaaagttatattttaggatatttgctttaaaaaatataacacgtctcctaggtttttcttagctctatttttttctatctttcattatgggaaaactctccagaagtgtgaagagtaaaataatgaggctccacatacttgtcattcaccttcaataactatcagtcaaatcatggccagtcatttcttataattattttttcttcatttctttttacattctattctgattctatagtaaagtgtgctctaccagatcctaacaagatgtgtctcaattgttactatacaagttgcgcatctctaatccaaaaatctgaaatttggaatgtccccatgagcattcctttaagcatcatgttggcactcaaaaagtttcaaattatggagcatttcagatttcaggttttaacagtagagatactcaacctggattaacaattgaaatgcatttgttgttatctggtagagtatgctttactacagaatccaaacagaagtaatgcaaacattccaaactctaaaagaattcaaaacccaaagcacttctggtcccaagcatctcagataagggatactcaacccatatctcttagttctggtaaatacatcgtccataaaagtcagaagactagagattatctgtcctatttgtttgcttttacacatccagaaataacaccccaattttattagtttggaccacatgaaatgtcaatttttatcagtcaaaaatggttgaatatcacaatttcatgtgattccaccctgacgtcagaaaactcttaataaatggaacagtaatcctcaactagaagtatacatcagaataaccttgggaacttttgaaaaaatactcaggccactacctactgaatctaatttctctaaagttaaagccctagcatgtctgtcccctcaaaattcccccaagtgattttgatatgattaagaactactgtctagccgagcacattggctcacgcctgtaatcccagcattttgggaggccgaggcgggcagatcacgaggtcaggagatcaagaccatcctggctaatacggtgaaaccctgtctctactaaaaaaaaaaaaatacaaaaaattagctgggcatggtggcgggtgcctgtagtcccagctactcgggaggctgaggcaggagaatagcatgaacccgggaggcggaggttgcagtgagccaagattgcgccactgcactccagcctgggcacagagctagactccgtctcaaaaaaaaaacaaaaaacaaaaacaaaaaaaaaactgtctaaaataatccccccttcagtttaactccatttcttgtcttggcaataggtaaagtagtgaaaggccataccatgttacccgggctaggcaggtatgtgcacatggaagtgcctcatagtataatatgacctaaattaatggagtgttctttaatttttctctttttttcagatatccaagagaatctaacaaattaataaaccttccagaggattacagcagcctcattaatcaagcatccaatttctcgtaagttttgctgttagcattgaacattccctgccactggaaacacctctctacaaagaatttgaaggattttgttgttgttctttgtttgggtagagaaatcatatctgtagtcctttatgagaggagagggagaaaaaaggaaaaaaagaagaaacttggcgaggcacggtggctcacgcctgtaatcccagcactttgggaggccgaggtgggtggatcacctgaggtcaggagttccagcctggccaaacccttggtgaaaccctgtctctactaaaaatacagaattagcggggcatggtggcaggcgcctgtaatcgcagctactcgggaggctgaggcaggagaatcacttgaacctgagaggcagaggttgtagtgagccaagattgagcaattacactccagcctgggtgacaaaagcaaaactctgtctcaaaaaatgaataacatctgtagtactctatactacataacttataaaagcatcatttcactatgtttcagaataagacatggaatgggagtaggagaagcaaatttgattcatgaatgtttaataattgcacttaaagtaataacagcccttagtaatttttttttttttttgagacgagtctcgctctgttgcccaggatggagtgcagtggtgcaaccttggctcgctgcaacctccgcctcccagatgctagtgattcttgtacctcagcctcctgagtagctgggattacaggcatgcaccacaacgcccagctaattttttttttgtatttttagtatcacctcagcctcccaaagtgctgggattacaggcatgagccactacacccggcagtaatttttaatatagtatcaaatatttaacatacaagcagcataaagaataatataataggggaggctgaggtgggagtatcactcgagcccaggagatggaggctgcagttagtcatgatcgtgccactgcactctagcctgggtgacagcgagaccttgtctcaaaaaaaaaaagaagaatataataatgtaagagcttaaacattacctagacagttgaagctccccagctgtctcttctctgttgcctctttctcctccctctgaagatacctactattctaaatggaatattaagcattccattcctatacattaactatataagtttctattcttgagcagcatgtattgttattttgtatgttttttttttaattagtatttattgatcattcttgggtgtttctcggagggggggatttggcagggtcataggacaatagtggagggaaggtcagcagataaagatgtgaacaaaggtctctggttttcctaggcagaggtccctgcggccttccgcagtgtttgtgtccctgggtacttgagattagggagtggtgatgactcttaacgagcatgctgccttcaagcatctgtttaacaaagcacatcttgcaccgcccttaatccatttaacccttagtggacacagcacatgtttcagagagcacggggttgggggtaaggttatagattaacagcatcccaaggcagaagaatttttcttagtacagaacaaaatggagtctcctatgtctacttctttctacacagacacagtaacaatctgatctctctttcttttccccacatttcccccttttctattcgacaaaaccgccatcgtcatcacggcctgttgtcaatgagctgttggttgcacctcccagatggggtggcggccaggtagagaggctcctcacttcccagacggggcagccgggcagaggcgccccccacctcccggacggggcggctggccgggtgggagctgccccccacctcccggacggggcagctggccgggtaggggctgccccccacctcccggactgggcggctgctgggcggagacgctcctcacttcccagacggggcggctgccgggcggaggggctcctcacttctcagacggggcagccggtcggagacactcctcacctcccagacagggtcgcggccgggcagaggcgctcctcacatcccagacggggcggcggggcagaggcgctccccacatcccagacgatgggcggccgggcagagacgctcctcacttcctagacgggatgacggccaggaagaggggctcctcacttctcagactgggcggccgggcagagacgctcgtcacttcctagacggggtggcggccgggcagaggctgcaatctccgcactttgggaggccaaggcaggcggctgggaggtggaggttgtagcgagccgagatcgcgccactgcactccagcctgggcaacattgagcactgagtgagcaagactccctctgcaatcctggcacctcgggaggccgaggctggcagatcactcgccgtcaggagctggagaccagcccggccaacacggcgaaaccccgtctccaccaaaaaatacaaaaaccagtcaggcgtggcggcgcgcgcctgcaatcccaggcactgggcaggctgagacaggagaatcaggcagggaggttgcagtgagccaagatggcggcagtacagtccagcctcggctcggcatcagagggagactgtgcaaaggggagagggagagaagagagggagagggagagctgtatgttgtattttattttatttatttatttatttatttatttattgagacagggtctcactctgttgcccaggctggagtgcagtggtgtgatcttggctcacagcaacctccgcctcccaggttcaagtgattctccagtctcagcctccaaagtagctgggactacaggtgcacaccaccatgcctggctaatttttgtatttttagtagagacggggtttcaccatattggtcaggctggtctcaaactcctgacctcagttgatccacccacctttgcctcccaaagtgctgggattacaggcgtgagccactgcacccagccaattttgcattcattcagcattgtttctaagatttatctgtattgacgtttataactttattgatttttcattgctccatagtattttattatatggcagtggtaccgtttatctttttctcctattgatgattttatttatttttttttctccagttactgattcttttgagtgtttccagtacatggtctttgtatatatgtgcaagatgtttcctattccagattctaggaataaacttgcatagactgtaggatatacacttctttggctttacttgatattgcagaattcttttctgggctggttttttcatcactagctctttagccactctttagatcaatgacttgtgggttttttatcccttggaggtgcccgaaatcaggtggtgataagagcagagccccaactctgtgccttgtgtgcggatctctgctgtgctcccagagttactgctgccagactgaactggaaggggaggatgtaggagcctgcacagctcacacctactcctgtggctctggagtgggcatcttcctgaggtaaggacctgcaggggctttttagctttggatctgcctcagtatctgactgttagggtgtcacaggaaactactatattgccaggaattttgagactactgttccgtgtgattcattccagaaacgtggagctccttgtcgcctcacatctcacatctggtccatgccaactctgtgttggttcttttattgttaccattcccactcctcttccctcaaccataggtgacagttctgttctactttctccatgtctcccactaatgtgaaacttctctgattttctgaacaaatccagtcagaattactctttctgttatgtcctcatggcttttggattttacctccacttatacatattatcacaactctacatgccagcttgtgattagtgactactatgtaccaggcattgaggatgcagtagtccacagtgcaaagatctctgcccttatggatggagcttgttttgtatgagagagaggacaagcaagactgacaagaatttagatagtgatataggctaaggagaaaaaataaagcagggaaggggaatatgaaatggcagctatggagctaaatttgagatttaattttagtagatcagggaaggcttcctaagaacatgacttctgagtaaagacctaaagaagtgggagaacattctactcagaacattctgcacagttcctggggtagaaatgtgcctgtctgctcaaggcaaggaggcgcgtgtcactggagtgttgtgcacaggtgagagaatccaggggcctgctgtgtgctggtgacatctctgggcaaggtgtaagccatttcagggtttgaagcagaggcatgacatgagtgtgggctcctctggagcataggttgtatccatagcttagtcatccccccagtaccttgataatttcttatacgtattaggtcctcaataaatgtctgtttaattgtgctgtactattaatgccagaaaaaggcaaatgtctcaaagggatcaggggacacaaatttgactcgattcaacctatttcctagtttgtgcacaattttttaatggataacttcctcctaatagtggtttaaatatcagtactataagacttcattctatttggaactgaatacaaatgttggttactaatgtgtaaatgtgtaacgtatgactgatctctctacagagtacgggaatgtcaggtgctatttttagctggcaaaaccaaaggctgtttttattctcctccttaccttgatgactatggggagaccgaccagggactcaggtaagaacccatcctgagttagctaactcagggcctgcagcgcccttccgtatgtggtgacgtcctgagggtggagggctgaggtggttctggaagaggtggctgtgttatctgtggagtcttccaaggagggtgccctgtcagcctggtttggtgttcttttcccagccttcagaatgccatgaggaacatcaggataggtaagggaagagaataggacagagtgcaactttattccatttatcactccaaagaactgtttgaattgccatatagcatcccagctcagagcactccagggatggcccactctgacttgtatggccttgtatagaggaagcccagtgtttgagaaaatcttaattgctaacaaatgtgcttattacattaaaatctgggggacaaagatttaaaacataaagaacaatataacaatatttgaggctaagttacttctactctggtagctttagtatattgtaagctaacaattcccccaagcactattaaagaacttctttcagaccatctcttttgtctaaaggaggtataagttttaaccgccatagatatgcctgtccagccttaagtagcagatgttaaaggcctagaaacccaagcaaggtaagtagatgagctgccccaggcgctggactgcgaggctatgcccatatgccacccagtgctggtgcttcccactgttctcagcgtgggctgttaggaggaggagagtctgattagtgagtgagaggatggctgtgctcagaaacaggagcagaggtgcctggctcagggcactggtcccaggcaggaacccaccaaagcttgcacttgtgtttaaattagacctggaagttactcacatttgattgcttcactgagactgtggctgaaagattgcatctgaggaatgtttttcttttcttttcttttcttttttctttgcactcttagtaaaatctgtgaggaatatttttactcctataattcttcttttgtgttctcctctgccctcttccctttttacacgttaccaacaaaatgggcaatgaattggtagttttagcctctcaacccagaccctccttatcccccgcaacctctattccctcacctcactctgggtaagtctggtttgtgtacctttccttcctcatttcagcacttattcccttttacctgctcttggcaaagggtcagagctgatgtttttgttaatagccacagtcacctgccagacagaaatgttgcagggagtctaaaaccaataacttgtaaccttgcctaaatcaggaagggttgggttataatagaggaataaacagaacacattctgagtgacatgtgtcttctctttctagacggggaaatcctttacatttatgcaaagagcgattcaagaagattcagaagctctggcaccaacacagtgtcacagaggaaattggacatgcacaggaagccaatcagacactggttggcattgactggcaacatttataattattgcaccaccaaaaaacacaaacttggatttttttaacccagttggctttttaagaaagaaagaagttctgctgaatttggaaataaattctttatttaaactttccttcccagttttatagtttctggttctgaggactgatgaaaatcatcttccatcagcagattttcttgcactgtttgctgtgcccctcaaatataatgtcttgggttttaagatcgagcaaggagcttctcttcctagattggatcccagcccctttgtgggggtctgactgcatagtcccagccattatgtgatatttcacgttattgatgatagtgaaccgtgggtccgaagctgactcaacggaggcagggaacaaagtctctgtggtctgttgggtcatacttcctggttccactgagtggcccaacactgggactgggttggtgtcccctctgctgacaggaccctactcctaggagcaaagtggttgattttgaaggcagtgttcccttctctccattgactatgagagagttgggggacacacatgcagaagaagcccgtggggagaaggtggattcctggtgtgctggctggtttttcagggctgttagaggttttttttttttctttttttttttatggcaagacttttggctttgagaaaactcacttagagggctttccaaaaacttaggatggtctaaaaaattaggatattcttttagaattaggaagaaaaattaggatattctaaaagaatatggattaaaaatttaggatattcttttagatatcctaatatctagatgagaggccttccttcataagatctggttgtttgggctgtggttggcataagtgatatttattttggcctctgtcacatccagtttcttgagcttttaaggtaagcttcttttggctttttttcagatgttcaccaagcttaagtttaaaataataggtattctaaaagagtatcctaattttcttatctgtattcttttagaataccctaatgtttcagacagtgatattctcttgttatttctaaggctaaattggcagagtatatcatctaaagccaaacactgaagaaggtgagaacccactcccacccagccagcatttcctggaacagacaagctgctgcttccttgctggctcacttagtgcattcctgggatggtctggcacccaggctttttattctttttgatcattgttcttactgaggtgccttcctagaacaagagccacttacaaaatagcttataattattatgtaccacacaactactattgtttgatgtatgactgctgagagcttgaatacatgcagagagtgactgaagacttagtagaggaataaattctgagcctgtctaaggtggggctaaggaacagatgagtaataagaggctcttggatttttttaaccaatgcaactgaccctttcaatcagttttctttgaattacatctacaagttttgttccactcagctaccagtcaactaggcatgctccacagtatcacaggaagaaggtcagaaatctggaactgaagctaaaagaagtgaggatgtagaagccacattcctctccaaggtagtgtgtgaaagaaccgccccctcttgacaggaggatgaccgtcgccattcttgcgtgggactgactcacccagctgagaggaggaccaatagaaagaaaattcacatttgagtccacctctctccccctttttctggccttcattcataagatctggttgtttgggctgtaggtggcataattcatgtttattttggcctctgtcacatccagtttctttagcttttaaggtaagcttcttttggctttttttcatatgttcaccaagctaaaatttaaaataataagaccaggtttctctctgtacaagtggattataaacattttcaccaaatcataacaatactccagctttccggtccgacttcctaggagcctggagttagcaaaggttgtctctggatttcattctctgagaatatcacagagcctgggagaagatgaatttacatgaaattgcaacatacacacctttttattttctggtgttaagctagttgtctttcctaccttacaaatcatgttagttttatgatttgttccgcatgttttatgtttattgtagaaatgtttatataacatacgctttccatatcagggaaaatcatatctgtttaataaattggctataactttaatatctgtggacaacttgtaaaatttggaatgtatcatatgtaaaaagtttaaagatatccaaataaatgctttaggtgttggcatta

SEQ ID NO: 1014 - DNA, 2071 bp, Homo sapiens
actcttgttttttaagtcacatttattgaggtatattttacaaacagattaactctttttagtgtacagttttatacattttaacaaatgcatacagttaaacaaccacaatcgagaaatagaacaattccatcttccccaaaagtcccctttgtagtcagcttcttgcctcatcctggctttcagctaccagtgtttttctctccctttgttttgtctcttcccgaatgttatataaatggaattgtatcatatgtagcattttgagtctggcttctcactaaagaagaatgcattcgggtcctccctgttcctttggattgctgagtagcattccgttgtacagacttctgggcagttgccagatgaagggcatttgggtgagtttgggtgattgttttggtgattactgctacaaacattcatggatgggtttttgtacaaacctgaattttcacttccctcaggtaaatagctagaagttgtcccttacatcttaatcctccatttgatgccatcctgagagctcagcattctctaatctgtaactttgctgtttacagtcctctgtgatggacaggataaaatgctgtcaggagttaagaactgacatgtttttccccttccagccaatctatccattgtgacctgggaaggcacttgtctcttccctggactttcatagtattggacagacacttttctcttcctaacacagtggtgctgcctgcctgcgctgtcattgagagccatctttttagccagtcgtggatgaaaagccctgtcttggtccacgattttccctggctaagctgcaaacatgctggcctagtgtaacaggtgcccggacgaggaggggcaggggagcgtgcagagcgggcacctaatcttattaacccatattaaggttactaggggtttatttactggcagctcagtcccaggcttgaagcatgttgtaaagaagctgtgggttctggaactgaggccaaaaattctaggacacagcttcccaaatattcaggatagtcatcacctgtttcttcaccgtggagtgagcattttaaaaatgaaagtcctaaggccctgtctacccccaccccatcccggggctatgctggcagaactttaaaagctagctgggccaggtggctcactcctataatcccagcactttgggaggccaaggcgggcagatcacctaaggacaggagttcgagaccagcctggccaacatggtgaaatctcatctctaataaaaatacaaaaattagccgggcgtggtggcaaacgcctgtaatcccagctagtagggaggctgaggcaggagaatcacttgaacccaggaggcggaggttgcagtgagctgagatcatgccattgcactccagcctgggcaacaagagcaaaactccatatttgaaaaaaaaaaaaaaaaagtaggctgggtccctcaggagaaaaggatttacaccagcccaaggaaagactgaagttacacacaagcaaaaacctgatagcagagacttcctgggcactggtaggtgaccaaaagggatggtccaggtttctctcgcaactaccggctacctgagaagacctgttaaaatgcagttaaccctaagcctgctccgaaccaatgagtgagatttattgtagagtcaatgcactcttggtcctctcaacaaccttcagattctcaggttgttcacatttgctcctataacctggccccatagagactcatatttccctgtttgaggaaataacgttttggccagaggagaagaaaaaatggcttggagttttgcctaaatttctacattaaaattccatgtattcagctctggttcaaactccagcaaatgctgagattatttggatataataatagtcactgttgtaatagtcaccgttcttacaggtaagagatggcaagatggagagatgtgatacccaagccatgtttataacaacgattgttaccaatgcttcccttagggtgggtttcttttcttttttggcaaatactagcggtagtaggggattctgatatatgttgttgaatggg

SEQ ID NO: 1015 - DNA, 7428 bp, Homo sapiens
actgaatggtcagatgagctgaggcagaagttcctagaagggtttgatgcctttttggaattactaaaatgtatgcaggtatgtaaaaactgttacacttttctttttccttttttttttttctcttttctctttttttttttttttttaatttttctttttctttttaagagatgggggtctcactgtgttgcccagggtggagtgtagtggctagtcatagacacaaccatagtgtactatacctttgaactcctggtctctggcagttctcctgcctcagcctccaaagttgcctgggactagaggcgcaggcacgggcccaggcccagcttctttgttgttgttgttgttgttgttgttgttgttcattgaaatgaacagctttctgtctgcgcatcttttcatttcgtgcacatttccaaaagatcaatttggatggctgcaattctgaccaggaagctcctctttaattggaaattcttagaaaggtatggagcaaaggagatcccagcaaacattccggcatctactgctcttgggttttttctgtgttggttttttttgttttgttttgtttatgagatggagtctcactctgtcgcccaggctggagtgcagtggcgcaatctcagctcactgcaatctccacctccagagttcaagtgaatatcctgcctcagcctctcaaacagctggaattacaggtatacaccaccacaccagctaattttttgtatttttaatagagatagggtttcaccaagttgtccaggctggtctcgaactcctgacctcaagtgatccacccacctcaacctcccagagtgctgggattaccggcatgagccaccgcacctggccagtttttggggttgtttttttgtttgttttttgttttgttttgttttgttttgtttgagacatagtttttcactctgttgcccaggctggagtacaatggcacaatcctggctcactgcaacctccgcctcctgggttcaagtgattctctgacctcagctttttgagtagctgggattacaggcacctgccaccatgcctggctattttttgtatttttagtagagacgaggtttcaccaagttgtccaggctgatttcaaactgctgacctcaagtgatccgcccacctcggcctcccaatgtgctgggattacaggcatgagccactgcgccagccacttttatatttctttggtttccactaatgttctttctttagaggttacaagtttatttttttaatatgctttcttggaagtatagtcaagttatttgagaaactgtagtggtttttgattttgctttttaatgtttccatgtttctttttctctccttcatgtggtatttatataatacagtgtagacctttttcccctgtttaattctctttttaggaaacatccctatatacaaaacagaatctagaagtagaaacgaacaggtatatttaaccagttataactgtaagaagataggtgacgtctctaaaaatctgagcaagtactattatgatttctttagtagccacctggctttcttaagaaaaggaatgaccaaagttgacttaccatttttatttttatttgtttgaatttatttttatttatttatttattttggaggtggaggtttgctctatcgcccaggcgggagtgcagtggcgcgatcttggctcactgcaacctctgcctcccaggttcaagcaattcttctgcctcagcctcccgagtagctgggattacaggtgcacgccaccacacctagctcatttttgtattgttagtagagacagggtttcgccatgttggccaggctggtcttgaattcctgacctcaagtgatccacccgcctcggcctcccaaagtgctgggattacaggcgtgggccaccatgtctggcctgacttaccattctagttcctaggttgggtggtagttcatgggtgtttattataatactactatgtttttcatgtatctgtgaaaacaatagctactttggtcatttttgatacttgaagtattctgtattctctattgtttaataagttctgacatactagaatagttaggctagtttctgaacagtaattttaattaaaagctatttattgttttgccttctttcaggctctgtgaaaacttctaattgcatattaggacataatattaaaactttattataaaatacagttataaattcaataacattttaaaagcttgtcacatttcttttaacaattttttctatagaccatagagctaaaaaggaaggattattgcagtgaaatattgaagtattttattgcctaaaacagatcttagatgatacctctgaaataatgtgtttattgggatttctaaatttatattttagagaatgttatataaacacataattttaaaagctattatttctcatagtacttgaagtttcctgttaaaacttataccttctatgtttttataatcaatatatatttctcctacattacttcttaggtttccatataaaagaacaactattattttcattcatatataattttttcacttccgttaagggaatggatccaattacacgtcaagtaggacaacatattgaaatggaaccagagtgggaagcagccttcacactacaaatgaaattaacacatgtcatttcaatgatgcaggactggtgtgcttcagatgtgagtttcttctgggtgcggggaataggaggaaagtggaagagggaggaataagcagaatcctaagtaaatttcaaggagatctggagaaaatagtggtgatacttagttcattaaacagcgtattttccttctccacctataaactcagtaaaattttaaaattctacagcctgaggaaaaacttgaaaaatagagaaagaaataatccagattgtctcttccctaatgtaactatctttgttttttttccataatcccttctagactttgaggatataaaaatggtagtttctaaatttattcaaaaataaagttttattattggtacatttgtcctgtgtcttaaaattattttggccttcctttggcgataaagtctagatgagagcctgtatacattatgaggttagggaggtttctgtaaggtctgaacaatctgtaaaagttaatggaacaatgagtaaatgatattcctgactgagaagacagctgcattatagtctgtgatgacagggactagggtagtcctaggagctatagaaaggtctgtggttggagcacagaagtagagaacagagatttgggcacaggagtgatttttcggggccttggccatggttgtttttttttttgttttttttttttttgagacacagcttactctgttgcccaggccagagtgcagtggtgcaatcccggctcactgcagcctcaacctccctgggcttaggtgatcctcccacctcagcctcccaagtagctgggacaacaggcacacaccaccacacctggctaatttttctattttttgtagagacagggcttcgccgtgttacccaggctggtcttgaattcctgggctcaagcgatctgcttgcctcggcctcccaaagtcttggaattaccagcgtgagccaccacactcagcctgcattttatttgaattgaagtgggaagcctttagagattaccatctctctattaaattccctgcttcaactcttgccccctttatccattttccatacagtgacatgattcaatttacatgttttttaaaattgctctgtatggagaatggatgaagggggcaagagtcaaagcaggaatttaatagagagacgcttggcaatgccttggagttactagagatagagaaaagtagcaagttttgagagaaacttagaagatgaagttgccagcttggtaatagattggacaatggggaatgggggaaaggagggtattggaataacttctagatttctgcactatatgagtaaatgtatcattcactgagatgagggacactggaagagggaccaaatttgggagggaggattgagtttggttttgcctatattgttatttgaggtacttactcactgaatttaaggtgcttattcaatgttgtaaaaactcaaccttttgagtaacttacagaaaaaccctcttttttaggaaaaagtgttaatcgaagcttacaagaaatgtctcgctgtactgatgcagtgtcatggtggttatactgatggtgaacagccaatcacactaagcatttgtggacattcagtggaaactatcagatactgtgtttcccaagaaaaagttagcattcacctcccagtttctcgcttacttgcaggtaaagcatttcccctaaaataaaaccctaaaattatcttttaaattgttgtttgtggttaatatctgtgaatacttactttgtgccagatgttattctgtgatttctacatcattaacttatccaatcatcacatcgtcctgtgaagtaggtattattattaagcttgcttcatagatgggaagacagaggcatagagagtgacttgcttagtaagtcacacaacaagaaagaatcagttggcattatgaggaagtttggcaccagaggccatgtttatagccgttataccatagtgcttctttagacaactacagataccacgttttatcatttcatcgaatccagcttcaaagtctatgttgttaccattcaaattaatctgtcacttaagcaattgctaatcatttgaagccaccctaggttttctattctcctttttttcctctccctctgagctgtttcatatatttattgatagctttttacgcaacaggtcaagaacaaggacataatggggtgataatcttttaatttcaagtagttgatttacaagccacttgtaattaattggtagaatgtctgaagctgccatcttatgtggccaaagactttgaatatgcacttatccatctctgcagactcatttcagtacagctttcatatttcttgattctaggtattcttttcttgctcgcacactgttgttttctttagttccgttttaactcagagaacagaaagaaattttgaaggtatttttactcattgtaaaatatgtagtttatgttaagtttgtggctcagtagcttaatgtgatgtgagggtatgttttttgttttgttttgtttttttctggaggagattgtagagagtttgtttcatttcttccttaaatgtttgacagaattcaccagtgaagtcatctcatctgatgctttaggttttggaaggttattaataattgactcaatttctttaatagatacgggcctgtttaggttatctttttctccttgtgtgagttttggtagtctgtgtctttcagggaattgatccatttcatctaagttatcagatttgtgggcctagagttgttaatattccttcattatccttttaatgtacatggggtcagtagtaatgattcctctttcattctgaaggcattttttttcattgttctgagacctatcacattatcccactgatagacccttgccatgggtatattattgaagtcatggtaatttaagataattacttactctgaggcttataaagttgttattcctagacatatgaatatcaaatggtacaatagaccattacctagaatgaaatcatgatcgtaagaagaaatctctcttatttctataacttgttcaggcccagttttgtttttataagtgttttgagcaactgaactgtcaatcctcaacacaggcaattgatggcatggtgttgtggaaaagtattggacagaaggcaagaaagtgaggcatgcgtgtggaagtagcacgcaggcgcagcgtggcatgccctgcacgtgcccttaaaaaaaaaaaaggcaagaaattgagtaatgagtcctgtctccaactgagccactgatctcttctgcctttaaaaatcagagtgagactctgtctcaaaaaaaaaaagtctaattttatgggaggaagctgatgctgatagttatctacagtgaaaaaagtcagtgctctaaaaatgtactaatttctgcctaggtttttacctccctcaaagctgtcgtgtgaatatttttgagtattcatttcatggtatttcataaaccttagcctaactgcttataatctaattggaaatctaagtaaaccaacacaaaacagttcatggacagtttgaagcaagtgctaatggagtttgtaaatgttgagcatttacaacatttacaaatggagcagtaaatgttgagaataagctattagaatggcattagtagtgcaagttttcctagatgaagaaagcctcaaaccaggcttgagtaaatggccattatatattgataagactttaaagggtgtcctctgtttaagcaatagcataaacaacacattcagaatgaactgaaggctgggcgtggtggctcatgcctgtaatcccagcactttgggaggccgaggccagcagatcacctgaggtcaggagttcgagaccagcctggccaacatggcaaaaccccgtctctactaaaaataaaaaaattagctgggcatggtggagtgcacctgtagtcccagctgctctgctcaggaggctgaggcaggagaatcgcttgaacctgggaggcagaggttgcagtcagccaagatcccttgaggttagaaactaatgaggctttgatcctaaaccaaaagttctggggaacttaattcaaaggtcagtatcagtaaggaccgtgaattccagggccagtttttccgatcagtggccagaaggatctctcactgctatactttaaatgggaacaaattccatggcccagtgaaatacaactcttaaagctggcataacatgtatataaattgttttgatagcttttaaaatgtcattggtgtgtattagtacatacaactaagactagttctaagtgtgcctttgataacagattcatgagaagcattaaaaagcctcttttattagccgggtgtggtggcgggtgcctgtggtcccagctactcgggaggctgaggcaggagaatggcgtgaacccgggaggcggagcttgcagtgatccaagatcgcgccactgcactccagccgggtgacagagcgagactccgtctcaaaaaattaataataataataagcctcttatgaatatagatcattttctatcttaattggtaatttgataggttcccaaagagaaaagaagttagatataaagttgagtgaatatttagggtatttttcctaaatgatttttactgatagaaatactgttttttgtttgttctttcatgcaggtttacatgtattattaagcaaaagtgaagtggcatataaatttcc

SEQ ID NO: 1016 - DNA, 1938 bp, Homo sapiens
gcggccgcacaatccaacatggcagcgggggcgggcgagaccacaggacggagggcgcgggggagcgcgccggaaacgcgcggctgcggcccgggagaaacccccccactcggcggcgggcctcgcggcgcgggcccgaagccacgcccccttccggccgaggcgcggaccgcgcggagctaagtggaatcccggttggcttggggcgcaggcttccaacttcgtactctggcctctggcgtctcggctcgtcggttgggtacccgaacccagctactgctgcttgaagagaagatggatggggactcctcgccgtcgctgcgccgccggccttccctgggcggacgtacacctttgcgaagcgtcagtgaggacccagggcccctccttggaatagctcttatttctcaagcgctgcagcgtgaagctcgctctgcgggtccgagaggcctgcgatctgaagactgaaaactgggaagagacgctctaccctgtgctcctcgccggcttcgataggagccgcaggtgcctgggattttctcaaactttgtcccaaacttcagctgtgggagtggaggaacaaacaggcctctcccagaattgtgaaagagatcgccctggtggatgaaacaaaaacaaatgcacttgacttccaccgcctgcctggcgtgtcacgcgggtttaatgtatgtgtcacatttaaattcaaagtattttcttctaagggcctggacacatttcttttctccctgtatcgtgaattggaaaataccttaggatattaaaagttatctaagataaccccctttcttctgtaagttaaatactaaacggcttaagacgaaattttggaatatagagatgatgatgcagactgcagtgaattatcaaatatgcatctcactgttctccacattaaacatatttttgttgcgtaaattcatgttaagacgtctataacaattacactttggtaaaattgttggatgttaacatctctgatagctcccaatagaaatctctgatgtactaaccagactggtaaaccattatcatgcactttgaaaatataataaaatattataattaaagctgccattaatgaaataggctgagcaacaataaatttacaaaggaaaataaaagtggatagccttgggagttctcacataaaatatggagatttcaaagttaaacttgattaattatgttagggtaaaaagtgaattaaagcaacaggactatttataaaataattagatttagaaagcagtcgtagaaatataagcctggagttgcctctgaattacatatttaacaaacctagaagctaaatcagtttgtcttttatcaaaactgcaactcctctaagttgaaagcacagtgacaagagaaagcattacaaattcttgagaaataatagaaattaaagctcttttcaaacctgtgaacaagtatagtaccagaagtataagattcagataggcccaagttgtagttcttgttatgagtcttacaaccctatggactttggacaaattacttctctgcgtctgtttcctcatctgtaaaatgaaaataatttctgtttcatacaggtatagtctaaatagggataattacacctacttcaaagttgtaaaatacacaattacaactagataggaggtataagttctagtgttctgtagcactgtaggatgactatagttaacaatattgtatagtttcaaatagctagaagaaggatattgcatgttcccaaaacaaagacataagtttttgagatgatagatatgctaattaccctaatcactatatgttatatgtattgcaacatcactatgtacccccataaatatgtacagttattgtgtattaaaatttttttaaactaaaattataagacattaaaaaaaggtatcacatgtaaagtac

SEQ ID NO: 1017 - DNA, 2368 bp, Homo sapiens
cacacatttcttgccgaggaaagtgaagagggactcgttctcctgcggggtgagcaacagggaccccacgttggtgaccctccgcggcggcggcggctgctgctggacggagctcatggtttcgccggcggggttgggagtccagggccgtctcctccggcgagtgggcgagagctcgttccccctctcggtgacaggggcggggagaagtggagtcagaggcgccacatctcgcagctcctccggagcggggaggaggacgaggtcgagggaagcaggcgctgacggcgagccaccttcgcgccgcgctgagaaagggaagctcccggcacccgcccggccaggctagggccggatggtcgttgtcctcgcactccggcgactgcgctaaactcccaactcctcccccaaccctcccgcagcggcggcggcggccgcacaatccaacatggcagcgggggcgggcgagaccacaggacggagggcgcgggggagcgcgccggaaacgcgcggctgcggcccgggagaaacccccccactcggcggcgggcctcgcggcgcgggcccgaagccacgcccccttccggccgaggcgcggaccgcgcggagctaagtggaatcccggttggcttggggcgcaggcttccaacttcgtactctggcctctggcgtctcggctcgtcggttgggtacccgaacccagctactgctgcttgaagagaagatggatggggactcctcgccgtcgctgcgccgccggccttccctgggcggacgtacacctttgcgaagcgtcagtgaggacccagggcccctccttggaatagctcttatttctcaagcgctgcagcgtgaagctcgctctgcgggtccgagaggcctgcgatctgaagactgaaaactgggaagagacgctctaccctgtgctcctcgccggcttcgataggagccgcaggtgcctgggattttctcaaactttgtcccaaacttcagctgtgggagtggaggaacaaacaggcctctcccagaattgtgaaagagatcgccctggtggatgaaacaaaaacaaatgcacttgacttccaccgcctgcctggcgtgtcacgcgggtttaatgtatgtgtcacatttaaattcaaagtattttcttctaagggcctggacacatttcttttctccctgtatcgtgaattggaaaataccttaggatattaaaagttatctaagataaccccctttcttctgtaagttaaatactaaacggcttaagacgaaattttggaatatagagatgatgatgcagactgcagtgaattatcaaatatgcatctcactgttctccacattaaacatatttttgttgcgtaaattcatgttaagacgtctataacaattacactttggtaaaattgttggatgttaacatctctgatagctcccaatagaaatctctgatgtactaaccagactggtaaaccattatcatgcactttgaaaatataataaaatattataattaaagctgccattaatgaaataggctgagcaacaataaatttacaaaggaaaataaaagtggatagccttgggagttctcacataaaatatggagatttcaaagttaaacttgattaattatgttagggtaaaaagtgaattaaagcaacaggactatttataaaataattagatttagaaagcagtcgtagaaatataagcctggagttgcctctgaattacatatttaacaaacctagaagctaaatcagtttgtcttttatcaaaactgcaactcctctaagttgaaagcacagtgacaagagaaagcattacaaattcttgagaaataatagaaattaaagctcttttcaaacctgtgaacaagtatagtaccagaagtataagattcagataggcccaagttgtagttcttgttatgagtcttacaaccctatggactttggacaaattacttctctgcgtctgtttcctcatctgtaaaatgaaaataatttctgtttcatacaggtatagtctaaatagggataattacacctacttcaaagttgtaaaatacacaattacaactagataggaggtataagttctagtgttctgtagcactgtaggatgactatagttaacaatattgtatagtttcaaatagctagaagaaggatattgcatgttcccaaaacaaagacataagtttttgagatgatagatatgctaattaccctaatcactatatgttatatgtattgcaacatcactatgtacccccataaatatgtacagttattgtgtattaaaatttttttaaactaaaattataagacattaaaaaaaggtatcacatgtaaagtac

SEQ ID NO: 1018 - DNA, 430 bp, Homo sapiens
cacacatttcttgccgaggaaagtgaagagggactcgttctcctgcggggtgagcaacagggaccccacgttggtgaccctccgcggcggcggcggctgctgctggacggagctcatggtttcgccggcggggttgggagtccagggccgtctcctccggcgagtgggcgagagctcgttccccctctcggtgacaggggcggggagaagtggagtcagaggcgccacatctcgcagctcctccggagcggggaggaggacgaggtcgagggaagcaggcgctgacggcgagccaccttcgcgccgcgctgagaaagggaagctcccggcacccgcccggccaggctagggccggatggtcgttgtcctcgcactccggcgactgcgctaaactcccaactcctcccccaaccctcccgcagcggcggcg

SEQ ID NO: 1019 - DNA, 20501 bp, Homo sapiens
ctttcccatggtttggcatggacattgggggaactctagtaaagctctcgtactttgaacctattgatatcacagcagaggaagagcaagaagaagttgagagtttaaaaagtattcggaaatatttgacttctaacgtggcatatggatccaccggcattcgggatgtacaccttgaactgaaagatttaacactttttggccgaagagggaacttgcactttatcaggtttccaacccaggacctgcctacttttatccaaatgggaagagataaaaacttctcaacattgcagacggtgctatgtgctacaggaggtggtgcttacaagtttgaaaaagattttcgcacagtaggtatcttttactcaaaactgaaaattgatacctgtttttaaatatgagagtaggtttccatctagcatgttccttaattctccctgcacatgcagtgggaaatatgtatccatggttgcctttcacttggggcgttttaaacacgtttatgagatgagtaaaaattgcccggatttggtcatgttgttgcacataatatttggtaaaacttgtttagggctgtactacaaagctacaataaaaaggggatttggggactttaatgaatttggcagtgtacaaagccagatataaatgaagcttgaattattttcactattgtcctacatttacatggtttttggaatattacttattcaaataatattaatcttccagggccatctccttcccaaaccctaagtctggaaaccaatgtcttttggttagtataatggacacctgaatgaaaatctgttacccttttttttctgtttttatgctgttaatcctgccatgttcctgtgtcaaatggggtgatttgaatggatctggcaggagaactatgagtattggtttgagttatgtgctgttagcagtttgccatcttctagtcttttccattagaatgagagttcaaagagtggtttgccaagcttctagtcttttctattagaataaagaatggctctgtttaggaccactgaaatttgtttttcttgaaaatgtaaatgtgaataatttaatttctgaaaatcataagaaaatactgttaatggaatataaaggctgacgtgggaggatcacttgaggctaggagttggagaccagcctgggcaatatagtgggaccccgtctctacaaaaaataaaaaaattagctcagcatagtggcctgtgcttgtagtcccagccactcaagaggctgatgaagtgggaggattgcttgagctcttgagattgaggctgcagtgagctgtgattgagccattgcactccagcatgggtgacagtgagaccctgtctcagaaggaatataaataacttaaatggctcatagaagcgagacccatataatttgaggtaaagatctgtagtactgtatgaaaagaggtgccttgggaacacagaggagtaacaacagctagagagttgaagaggttcccagaggaagtgatatctaagctgcaatgttttataaacggtgtcttataatacgctttttactaacctgaaatgatgaatgtaatcatttcaaactagtactcaaactataatataaagacaggagattaaggtatcagttattaatcagaaattaatctatccgtgggtagattaacaaacagtatgatcattccagaggacatcatgaagtagttatatgcttgcacctatgcatagattgatcatgaataccaaagctacacatgccagattgatatggtatgttctgttggaaaataagataccataaatggcattgctgttggtgacatgaccctccaacatgctaaacaaacacttggtaaaattccaaacagtaagaagtacaattttcccttgctttatgtggtggttcaattcctagcaaatttagtatatatttaaaactacgtgggttgggcacagtggctcacgcctgtaattccagcactttgggaagccaaggtgggcggatcacttgaggttaggagctggagaccagcctgaccaatgatggtgaaacctcatctctactaaaaatacaaaaattagccaggcgtggtggcgggcgcctgcaatcccagctacttgagaggctgaggcggagaatcgcttgaacccacgaggtggaggttgcagtgagccgagatcatgccactgtactccagcctgagtgacagagctagactctgtctcaaaaatgaatgaatgaatgaatgaatggagtgactgaatccataggacgaatacttttgtatttgtatacacagacagataggtaaaataactttgttattctctagcctcagataattataaataattttcctactgccactataaaaatgactggcagaacactcaaagataatgcatagatgggataattttttggtctgcagaaatgtcacacccattaaagatgtctggcatcacaagtccctgcccactaaatgtcagtttggtccttccttcctccccatcatttagaaaactagcagtgaggtgataccaccctcactgaggaccagtggactagatgaaatcccgaaagagattctgacatgaaacaaaatgaaaatgtgggggtcatagaccatttttaatttttgtaaagtaatacaggaaaatcatatagttgagtgtttttgaatgtcatccttttttgtttttgtttgtttgttttaacagattggaaacctccacctgcacaaactggatgaacttgactgccttgtaaagggcttgctgtatatagactctgtcagtttcaatggacaagccgagtgctattattttgctaatgcctcagaacctgagcgatgccaaaagatgccttttaacctggatgatccctatccactgcttgtagtgaacattggctcaggagtcagtattttagcagtccattccaaagacaactataaacgagtgactgggacaaggtagtgacctttttggttgtattgctgcattcacattgttttatacacagaagttatgaaatcagtataataatgtcattttcaccagtaaaagagcatgtatttgcacaacagcaaaaaaaaaaaatatatatatatatatattttttttttttaagtgaaagagggtgccatgttgcccaggctgctcttgaacttctgagctcaagcaatctgcctgtctcggcctcccaaagtactgggattacaggcatgagccactgctcccagccaacagataatgtatttttataagatgtgtatgtcaagactcaaactgaaattattaaatgtttattagtcagcatcagttgggatcaaaatttccataatggtaaagtgaatttttatctagaatgagtctggtaacgttttttctagaatttaactggagcatttacttggaagcaacagtgttctattgattttaaactttattatgtttatattttgttcttttttccaaagcatttttcttctttacctattttttgactttttaatggatattaatatatgtaaacccttaaactgcagtactggggaacattgtaatttattcttataggatgaattaatgtgatttctttttgtgataacattaatgttcccaaatagcccacatacttttctgtaatacctgaaatacgaatgagaaataagatataaaactcatgattcttttatgtattttatcaacttttacagagaggtgaagattccagtttaaggaagaaagattttcaaatactttagattaatttgtgaaaaaaactcattttaattttaaagtagtaattctgtttaaattatacttaattagtactttatttttatggtggttaaaagttcacctctgttgtaattctctatgccaaagaattgtacactgctattgccttcttcggttaactctaaaagaagttcagtctgttaactaaatccaacagtgattcaggggtagaacttgctagaaatttagatgagactagggagcaaaggtttacagtttaggaattagatatgatttcattctgtgagcatatccagaagaataatagaagcaaataaatttctgtaattgacatgttggccagctggacataaatttactcattgtatttatgtgtaggtcatgtgaaatattagtgtatcatattgaattgatttcatccatgtcaggccaagtaaagaagcctttcccaaaatcatttcttggaaacgatttaaaattacaaagatgggcatggtagttcatgcctgtaattctaacactttgggaggccaaagtggaggattgcttgagaccaggagttaagaccagcctgggaaacatagtgagacccccatctctacaaaaatatatacatatatattagtccagtgtggtagtgtgcattgtagtctagctgctgcggaggctggaacaggaagattgcttgagcccaggagttcaaggatacattaggctatgatcatggtcactgcactccagcctgagggacagagtgagaccttgtctcaaaagaaaaattacagattttctctttgtaattaatatggtactgatttttaacatttattcctttttaatgcacacacaacaatttatctttggtaactacagagtgtaaggtattaggtgaagactttgggagagatttaataggtctttcctttcctcatgtttccaccaagtgatttttttctttggtttattctttgatctaacaagtttggttttactaaacaatttttgttgccttcgttatgttatttcagcactcagcattagtcataggttttttttctgtgtgttcattgaatacatgaatgatccacccttttactttagagaaagaatataatgtataaatgcaacttagcaagtttctttattttctttagccttggagggggtacctttctgggtttatgcagtttattgactggctgtgaaagttttgaagaggctcttgaaatggcatccaaaggtgatagcacacaagctgacaagctggtccgtgatatttatggaggagattatgaaagatttggtttgccaggttgggctgtagcatctaggtaagtttaacatttgtgttatttaagttacagaagttaagtaattcaagttgcttatgtttttggaaagcaatgtaacagaaagttgtaagggtgctttctcttatccagtttaggttccaagttttgaacattgatgtcatttaaaaattaagtatacattaagaagtttaccctgagtgcaccttgtaagaaacttttttttttttaatttttgagtgtctttccagtgtttatgcaaatacaaatacatatttttacttttctccccatatacaaaaggtaatctaccattatatggcatactatatatactctaaagtatccatatagaaatctttacatgttgttgaccttattttatacaggtgtaggataaattcccaaaagttggattgcaaatgcatttttgagatattgttaattatgcaaaagagcggtactgtttttcactctcaccagcggtaaatgaaagtgcctgtttcaccagtagagtgctaacttttgcatttttgctaatcagatggagaagtggtatcttaatgtaattttaatttacatttctcctaccaacactggggttaagagccttgcatattttattttctgtgagttattgttcatgttctacttttctgttggattgttatacagttgaatttatcagtcttttcttttatggcttctggatattgattcatagtaagtaagtcttctacattccaaatatataaaggaataaacccttattttcttctgatatgttaatggtggtatttttatacttaaatctttgatttacttatagtttatcttagggtattttgtgagttacagatcatgctttcatttttcaggttttttgtttttttttccagaaggccctaatgtctaataatccatctttatttcactgatttgagatggcttttttacatatgctggcttttcattctgttgatgtaccagcattatactttcagctttatagaggcataaaaagtatgttttaatctctagaagggctagtttcactcctttgcttgattttctgtatgaacttggcaaacattttctctattacaaaaatgtttttggaatctcagtaagtttacatattaacttagggacaaatgatatctttatagtaagtcttgctgttgaagaacttagcttgtctgtttgtttaaggctacttttgtgcctttcacacatttaaaaaggcctctccaaatatgtccatacatggctttttaaattgattcctaaatattttaaatttactgttctgttgtttatcagtcttgtctcccattatgcttcctaaccattgttgcttgtgcaccccaagttctttgtcagggaatccagtgccctttgatagtggactttgtctcactcttcagtaatatctcctgcctctcccttgcatagacgcttcactccgaccaaacatcttgtgatttcatagatgttttcatttctcatttctgtgtgcctttaacctttagttgcctctgcctaagatttttcttctcattttttctggctttttctggtccttttgctctgaaagccctgcctcataccttcttaacttttttctcttaccactgtaataaaagatatttttttgtttgtatttccaaggttagcctttgtttggggttagcctttgtttggattttttccctgttactgttagcgcttctcttgctgtcttttgtatgtaggcctgcattgtccattacagtagcctctagccacgtaaggcacttggcttatgagtgccacatgttgaattgatgatatttggatatattggcttaaatgaaatgtacaattaaaattaatttcacttgtttatttttacctttttaatgtggctaatagaacatatatgaaattatatattactcgtattttatttctattggacagtgctgcactagactaattcactgtttgagggactatctgtctccagcacaaagcttggtatgtcataaatgtttcttgtgactgaatgaaaaagaatttgaagttaaagctgagatacttttggaaacattttgtaattttggctaatttgttttgaatcaggtttaagtgaagatattttggtaatctttgctttcttataataactaactatgctttttttgagatgtcattttaaccttaattctttgaaaggtattactttactcttgcatagattttttttgttagtttgttttgatcttatccctatgtgtttctactttttggtcctaattttataaaaatatccaggttgtagatatatctgttaatacgtaaaatgttgctttttatcagcagatttgactttatttttcatttttctgcagttttgggaatatgatttataaggagaagcgagaatctgttagtaaagaagatctggcaagagctactttagttactatcaccaataacattggttctgtggcacgaatgtgtgctgttaatgaggtaaaaaaacaaaaaacacaaaacttgaattatcaaaaatgtgaattggagtcctatatacacctagcagggcttcttcactttccctaaggaggcctctgggattgagatgtaacccattaaatgccaagactcattaggtatatatgttacgtatccagttgctatattacttttaaagaaagtagcagataattcaaattgaaataggagaaatttattcagaattttttttcagaaaaacacaacctaaatcccttgaggatgtaaaagaaagttctaagcataagacattttgagatactttgtgaaagcattttttttagtcttaattttgcatttggaaggcagctatgctcaccactataccaccagtgcttaatgttgcatttgattagtgaaattcttggaagttttcttactgccctcggcttctttacagtgctgccttgttgcatatggatcaagcagcattgtacagggctatgaaggcattgagacctgttcttcatgatatttgagtggtgtttattgttacaagaaaagtgtgaaaaggatatactgttagattgaccatatagttgggattctttgtttggaagagaatatatatatttaattctagcttccttatataataatagatatatttgcccgtttaatttttataaatatcaaatactttaaatggattgggaagtacgcttttcgaaggaacccttcatttgttcattcattcatttattcattgagtaaatatttactgattaccagatgccagacatcgttctgggtatttggaacatattaatgaagaaaacaaagatctggctttgtggagcttgcattcattctagtgacatattaagtaaattgtgtagtgtgtattaggtgataagtgctatttttttaaaaagagaccatcaaacaggataaagaggattgggaatagggcagagagtggtagaggacaaattgctaagtaattgagtggttaaaggaaagctttattgaaaatgtgattcttaggcagaggtttgaaggaggtgagggggaaactgtgcatgtagacattttggggagaaagcttccagcagagagaacaaatatgcaaatcctctgaattattctgtatttaaatccagaacttggtctcatcagttttttaataacttagaaacttaagtgttagttggttgatggagttactagtagaccatgttgggagctgacaacaatttgagacctttattcttagccctttatgtctaaatttccactgaccaattgagttaacaataatttaggccatggtttacagtatcccaacttatgtacaaagatttctactcaaaagtcagtatagtgtgagagtcgaaataagttttctggtgattcaaacaccagttcccctttgtaagatttcctaatcatagagataatctaagaaaccaaattagtgtggaatctttgcagagagagaatgatttgatgaatcaggcaggggacggagaaagaatgctagaatcctaggggaatgcacatgccagtaccccagtcagtattactctccaattctgtagaatccacagttgcatgtcattgttcaacatgcattgcaatgtgtgggccaagtttgctacttatcaactaaatgcattttatagtacttaccatgttttgatttttttttttaatcacatcagtaatgtgtctccaaatgactttgtaagggggctatttattggccattttcaaaaacaaatctcacctgaaatcatctgctagagtctttctggaacctttttttaaaagtagactttattttttagatcagtttcaggttcacgtaaaattaagtggaaagctcagtgagttcccatataccaccttccatacacacacagcccacttccatcctcagcatcccatagtagagtgatcatgtgttacagtccataaccctgtgcacacatcatcatcacccaaagtccataatttagggttctctcttggtgttacacattttgtggattttggatgatgtgtgcagaactaatttttaaatattcaggattatacagctatatgccaggaatgtagtaggtgttatactaataaagcgtagttgtgtttttttgcattttaaaataaattttaaataaatatttagaaaccttttatattgtaaaatctattatttttacaagttttttctttgttcttttcttttagaaaataaacagagttgtctttgttggaaactttttacgtgtcaataccctctcaatgaaacttttggcatatgcactggattactggtcaaaaggtcaactaaaagcattgtttctagaacatgaggtatggtaggaaaatgttttttgtgaattttaatagcatgttttttaagagacagggtcttgctctgtcactcaggcttgagtttagtggcacaatgatggcttactgcagcctcttcctcctgggctcatcaatcctcccacctcagcctcccaagtagctgggaccacaggtatgcaccactgtgcccagaaaatttatttttattaatattttttgtggagacaggatcactctttgttgcccaggctagtctggaactcctggcctcaagcaatcctttataggtgtgagccaccatgcccagccttaagtagtagaatattggttccttcgcttcagtttcagttgtggggaagagaattacaataacctgttaggcacccccagatttttttgtattcatttactacatgcagttaagttctgatctgagcaattatcagtccacataatgttttggattaacttaacttgaatcattttgtgatcaaagtcaaatggctgtatcattacaaattagtaacagagattcaaattattctgctcttaaaagcttccatgtcttggccgggtgcggtggctcatgcctgtaatcccagcactttgggaggccaaggcggacggatcacgaggtcaggagatcaagaccatcctggctaacaacggtgaaaccccgtctctactaaaaatacaaaaaaaaattagccgggcgaggtggcgggcgcctgtaatcccagcgactcgggaggctgaggcaggagaatggtgtgaaccccagggggcggagcctgcagtgagtcgagatggcgccactgcactccagccactccagcctgggtgatagcgagactgtctaaaaaaaaaaaaaaaaaaaagcttccatgtctcattgtcactgctcacacaatacaaatcagaatggtgtgcccttgtgcaattccacatggcatgcagtgagagtgtcaggcacagccacaggaagttagtttgttttattaagtaaaggggagagggtgcagaattgctgttacagtcctggaagctttagtgtctaaaggccacacttttagaatacgtatttcagtgtgagcctatagtcccagctattcaagaggctgagatgggaggaccatgtgagcccaggaattcaaggccagcctgggcaaaatagtgagaccatgtctctaaaaataataataataaataaaaatacatatttcaaaggtgtgtagacatcaagaatacagattcagaaaattttttataatagctaacaacgcagaaattggtaggtttccaaatattattaaacaaatagattgtgcatagttgtgtgttctcaagtggttaatattatatgctaacttaaaagctgtactacataacagttatttttaaattacacagggttactttggagcagttggtgcacttcttgggctgccaaatttcagctaaagcatcaggtctctctctctgctaataaatgtcatccaagaggaactaaaaccagaggcattattactgcattgtttgtcactgggaaccaaaggataaaagagtagcataagctgctgaatgttgccatattaaaggagagaacttggtaacgtgaagtatttctcattgaaatgctttcccttttgtatatagccagtgttaaatccttaaatgcaatacagcctctgattattgagcttcctcttaaaaagatttttttattttatgtagccaacattgcagtactgtatgctcaaacacaaatcttaaagtatcggaactgtttagcttatgaaaataatcgactctgaatatttgttacaagtctgttttatgtgttttgattactagtgagcagaaaataacataccctgtattcaaaattactgaaatggcaatcaaagatgatcatttttatgtgattttagaaatgttaaggcaatactactaattattgtaggtttttttaacgtatcacccaaagcatgtatgtgatctttccccattagtatctttttctcaaatgccataattaactgaaatactattattaaattttcatgagaattctaaaatgaatcctgggaaatgcacgtttggtgatgttgcactttctgtattttacaggaattagtcaatacatgttgaaatgtttaacattttaagattggaggcttaattactgggagtctgtctaatgaagtcctgggactattgtaatggaatatgatttgagttcactgtgctctttttgtttgtttgttttggtcatatatacattcagaacttttattttaaaacaaccacaataacattaataatagaaaattcatctgtaaatattcacagtctagtcactgaaaaatgggaaaacctctaccatgccttattattaccctttgctgtttgaggagccagaaatagaggtgcagttagaggacggtcactttttccaacaaaacccactccatagccatgtggatttttatccaaaggctcaacaaccagagggaatggtgagacctgataactaaaatactgttattggcaagggtttgaaatgtgtaagaacctaggagggaaaggaagattgagcaacataggaaaaggggaagagaggctgagtgtcaccaaggtccaaactccatttataaaaatactgcaaaaccaggagttgatggtagaaatgcatatgatccatggcaggagtaaatctctccacctcctctaactctctgaaaactctagagttggagcaagtcttccatttgcttcttatccccttaaaagaatgccttccacttcccaacagcccccatcaagggaccccaagaggccaccatgctcttatctcgcactttctttcctattccccttgcctgaatctggagtggggttgagccctctgccttcaaccttaagatttaggaagttctttccccaactgtctaacttggaaaggtagatgagtctgaattttgaagtaacgaatgcaaattccactcagcagaggcaatgttatttatgtacatagggatagtggaatgagttttaatagattctgtccaaaggggtttgttcctcttatttcctctatgtaggaagttgtgtcttaggcaactttatcagtatcatggaaaatgataggcactacaatgaaatggcaggatgccaatatgagatatttcaggaataataagaaatacgtttgtttgtataaaataaactatctcaagaaagttttcaacgacagtgatagtgttcatttgtaagagagagttctagaacttcgatgtccagtgcagtagccactacccatatgtagctgttgagcatttgaaatatggttagtccaaattgagatgtgctctaaaggacaataaaaggttaaatatctcctaattttttgtattgattacatgttgaaatgttaacattggaaatattgggttaaagaaaaatacacaattaaaatgaatcttggccaggcgcagtggctcacgcctctaatcccagcactttgagaggccagggtgggcaggtcacctgaggtcaggagttcgagaccagcctggccagtgtggcaaaaccctgcctactaaaaatacaaaaattagccaggcatggtggtgcgcacctgtagtcccagctacttgggaggctgaggcaggagaattgcttgaacccaggaggaggaggctgcagtgagctgagattgtgccactgcactccagcctgggcgacagagtgagactctgtctcaaaaaaaagaatcatctgtttccaattatttttaaatgtgcttactagaaaagataaaatcacacatggtttacattttatttctattaagacagcaccgttaagaacatagagctttgaggaattgtggtattagaaccaaatctatttaccacagtgagcttacagggagttactcgagatcttaataaaaaattataatctttggcagccttcattatgattttgtgttcttattattccagtacctctagattacatatgggaaaagctaaagagccacagtggtgagatggttgctcactctagcaggtaatttcagtttgaaaggataaaatatatgaatcatagttcacattaaccaaagtacagtgatgaaataacttagactctgaccattccattttttcttaaagattgccctaaatctatagatgctaatacagtatttgccacaggtataaaacttgtagttactgtcattcaattaagattcttatctgtacagatatacaaatcagaaacttttaaaataaattgaactaatggaattttggctccaatatttagtcactacaatggaaatattaaagcaaggaacatgaagtcattgtagggttttaaaatggctactgactgacatgaattcagagtttcaaacagtctaaattctaaaaacttaactttacacgcttttcctcctaaataaccactctaataattcatacattcatatcttcaggtaaagaaaactgaattttaaacaattgaggctgggtgcagtggctcatgcctgtaatcgaatataaggacttgagtataaaatttgaaaactacatggggaaatgtctttatcatgcatctcttgatagtctactgaaaactattaagtaaacctgcggtctgtaaacaaaaaaacccatagtgatacttaccttgtgtaatgtaaacaattttttaagctctttaaagtacatctagatttactggtaatgtatagaagtcaattttatccccaagcatttctacttcctaaaccattagcaagagtctcaaaacaacttcactaaactattggacctccagtgttaacttgccaacataaaaatctgaaaaactttgtaatcactatcaaaaatacaaaagagagaataaattcccaggtaaaaggctttacaaattttggaactattatgcttttgtttactaaacactgatccttttagtaattctgcagtattgcctcagactcccacaaagtttcaaaatagctcatctattagattcctgtaacatttatttgggataaacgtggttttgttgccgttgttcataatagaataaaatatttagctttgatggttcagatgtaatacaaagaaataactaagtttgggcctgagataaatgtggtaaagcaagaatgcagagatgctgtaatgatgagtgagttttatagcattactgaggacctgaaaacttgctgccaaggacactttgaaggttttgttggctggaagaagtgtctctggaatcccactcctagctcttcttgaatatttgaaaagaattagataagggccatggggacccaggtcaccccacctcttcttttcagtttggctacaacattggagtcatcagtgctcctgagacagtcatacaggactttctcagttacactttgaaagagaggtcagaagactctccctctgaggttttgctcatgtccccctggcccttgtctgtggccatcttccccaatggtgatatgattggctcctttctgttgcactctttgtcaaccactttggcaggtgcagttcaatgcttatcataatttgttggctattactggttgccttatgggattctgcagacaagctgagttggttgaaatgctgatcctgggccactagattactggcttgtaatgcggactctgcacaagttttgtgcccatgtacattggagagatctcgcctactcccctttggggtacctttagtgctctcaaccagctggacgtcgttggtattctggagatccagatctttggtctggagttcatcttggggtctgaagagctatgcccagtgatactgggctttaccatccttccagctgtcctataaagtgtagcccttccattttgccctggaagtcgtaagtttttgctcattaacagaaaggaagagtactaatgagatccttcagcaattgtaggggactcaggatgtgtcccaggacatctaggagataagagtgctaggatgatacaagaaaagcaagtcactacactggcgctctttagagtacccagctaccaacaacccactgtcatttccatcatgctccagctctctcagtagctctctggaatcaatgttgtcttctattactcaatgagaatcttcaaggatgcaggtgttgagaagccaatctatagattagtgcaggagtggttaatattatcttcttgactgtagtctctctgtttgtggttgaaagggcaggaaggactttacatatgataggtcttgaggcatggcgttttgttctgtcctcatgattgtttctttgttattaaaggatgagtatggtgggatgagctttgtctgtagtggggctatcttggtctttgtggccttctctgaagttggaccagactccgttccctggaatactgtggccacactcttcagtttgcaatagcagtggctggttgctccaactggacctccaactttctagttggattgctcttcctgaacaattattatctagtttaagtgtgttgttgctttagggtcatggcatgcttatgtatttctgttaccatctgaccatggtactatgccaagttctcttaggggacctgaatctttccagtagaccacatttgagagagtatgagtcaactgggcatagttcccaacaacccaaaatacatacgtacttcactgaagcagatctcatgattccattgacttcatttctaaaattggactttgagcagccaatttctaaggattaaaaagaaactttaatgcattgtagacctctgtacacagaaaaatctttgtaacttttgggcttaattttcattcttaaaaaatctggtaactttttcaaatgcaaccactgtcagtttgctgtgaggctaggcaaacaacacaaggtatagaatttcccatcaccaccaccctgaccccgcgagaagattgccttttaattagagacttgtagaactagtgccttttaagttctacactcatcttttccaaagactattagtaaacttgccatgtaatttgacatggcagttccttgctcagctactctaaataaagttggaaattaggtggtctcttagtttgggtaaagtcagtactattgccagtaatatacatggtaattgaaagcccttaaagtggttcagattatttgccaaatattagactctataaaaatttctgaggttttttttcttttacctttgagtgtacatgtgattgctataatgtaaataccagtcccttaaagactgtttctataagcagaatgatgcagcacaaagtggaaaggttttcctcttattccagcagtattcttgccttcaaagagtagtccatcttgccttgatttttaaggttgttttcttggatggaaagcttaactggatagtaatttccatatgttctttataaccactctgtatattataagcaaagttttttcatattgtatctttttctgttgagcactttatgcattttagtctattgcatttgagaatgtagtttagaaattcactgtttaaagccatgtgaaaactgatagaggataatgaaaatgagtgtacattattttgaatttaacttaactgttttgtggtgggtgtgaacaaaacattagaaatatattatctttttgtgataatactctctgacctcacttaaagtgatctgccatgaggtatccatgatcaagtttatgtttattctaatacctaaggaattcagccaactttgtttctatcatcagataatctcagaaaatagtgtgttttatctatattactgcctcttttcaatatttaagagaataattgtcttctggtttctactgagcctagtaataatcactaaagacctaaaaaaggaattccttctgttaagagtatttggatagcccattcacgataatggtggtgtgaaaatcaatcatcccagcttttctgacatatctaaattttgaataattaatttccacttccaaaaaattcaaatgttttctcaaagcagtcactacttatttgcattattcctgcatattcagtgaatgtgaggtcatatttggtattgtattagaagtagtgttggtcactggtcttgcctctttgaacattatttttatttgtaaaatgagggagttggtttgttatgatgggaaatgagtcagttttcagggtcctgagaaaattgcttcattcatggctgtgtttgagataactaaagtaaattttttttcaggtatttggtgtcatgttttggagttaatatttagtgcttatataattttaagttattacataatttttattggtatatatttgataggtactaggtattggattctcaccaaaccagtagaatggtattctctcttaatatgtgattgcctgtaatggccaggtagatataccttaaagtaatatgaaaggttttatatgtatattaaaatgtttgtacttttaaatctgtaaaggttatctggaatttttactgtgttaacttcagaattatatgggcattatgactttttcattgtacaaaaaattattcataaatgttagaatacagatgttccttgacttacatagggttatgttccagtagacccattgtaaattgaaaataccgtaagttgaaaatacatttaatacgcctaacctactgaacatcccagcttagcctagcctatcttaaatgtgttctgaacacttaacgttggcctttagctgggcaaaatcatctaatacaaaacctattttataatgaagtgtttaatatctcaaataagagtattgtaccacatatcgttatcccaggataatatcagagtacaaaatttgaagtacagtttttaactgaatgtgtattgcttttgccccattataaagttgaaaaaccataagtcaaaccattgttaagtcggactgtttgtgttacatatatttgggattttttagtggccctttttaaaaagctgtttcttatttctgatcattgtgagtggggatagatgtgggaagaaccatgtctctactaaaaatacaaaaaatagccaggcttgttggcacacacctatagtcccagctactcgggagaccgaggcaggagaatcacttgaaccgggaggcagagggcagatcatgccactgtattccagcctgggcaacagagtaagactctgtctcaaaaatgaatgaatgaatgaatgaacgaatgaatgtactatgagctgatactgggatttcaggtaccgcagtttgtgctgaatgatatgtttggggtaaatcagtttttttcttatagaatttcggcgtttttgctgcaactgccactaattttgcatttaaaagaacaaaagaggaatgtatttttcaaaggagtgaatgaggttaaaatcaagattttgaatggtataaatatgcaactaattcagttgtaggatattattaaattttttattgctaaatatgtttctttcatacgttgcagtgcttacagttccaacagctttccaagaaaacatttccatatttgtgttatttgtaaagtatacataaataatgtaaaataatttgggattatttcaactttacattgtatgtctgaatttcatcgatgttgtacctggctcagtcaatagttgtcacaggtattaagccattttggaatttgccacttttttctgggtaacctgttttagtttagtttacagcatttagaaacagaaggtaactttatagaagtaacaccaatatcctagtctgcttgccccgaatataactaatagtattaggatgtaagcaatattaagatggtttttattattttttatacactgtgtgcttttactttttatttaaactacagcaaaaaactgattttttaactaaaattgaatggcgtttatcttaatgaccagttattgaccaaagtgtactcagaagatgttattatgtcccaatctaaggaatcctttaatttggggattaattttacttacacatgccatttcagtttcagttgcctcattctattacatcattcttgtcaagtctaagctttatcatgtctgaattcttttaacactgaatctgtgatgtaaaaatgtatgatgtgccataaattttattcataataaactaagttatagcctattgtaatctgtaaaacatttcttgtaaattacctaatttattttttcatttatgtacagtatcttatgtaaatttgaaaaatgtttgccatggcgcattctgtaaacattcccgtattcttttccttaatgcttatttgcatgaaggtaacttgggttttgcttgtttgtattggataaccattaagccaacttcagtttctctgcctttttttctgtagtttaaccatttctaattttgttcatattctaaatagatgttagaatcatactttttattttctactttctaaataaattatctaagttgtttactatg

SEQ ID NO: 1020 - DNA, 15574 bp, Homo sapiens
agccttggagggggtacctttctgggtttatgcagtttattgactggctgtgaaagttttgaagaggctcttgaaatggcatccaaaggtgatagcacacaagctgacaagctggtccgtgatatttatggaggagattatgaaagatttggtttgccaggttgggctgtagcatctaggtaagtttaacatttgtgttatttaagttacagaagttaagtaattcaagttgcttatgtttttggaaagcaatgtaacagaaagttgtaagggtgctttctcttatccagtttaggttccaagttttgaacattgatgtcatttaaaaattaagtatacattaagaagtttacccctgagtgcaccttgtaagaaacttttttttttttaatttttgagtgtctttccagtgtttatgcaaatacaaatacatatttttacttttctccccatatacaaaaggtaatctaccattatatggcatactatatatactctaaagtatccatatagaaatctttacatgttgttgaccttattttatacaggtgtaggataaattcccaaaagttggattgcaaatgcatttttgagatattgttaattatgcaaaagagcggtactgtttttcactctcaccagcggtaaatgaaagtgcctgtttcaccagtagagtgctaacttttgcatttttgctaatcagatggagaagtggtatcttaatgtaattttaatttacatttctcctaccaacactggggttaagagccttgcatattttattttctgtgagttattgttcatgttctacttttctgttggattgttatacagttgaatttatcagtcttttcttttatggcttctggatattgattcatagtaagtaagtcttctacattccaaatatataaaggaataaacccttattttcttctgatatgttaatggtggtatttttatacttaaatctttgatttacttatagtttatcttagggtattttgtgagttacagatcatgctttcatttttcaggttttttgtttttttttccagaaggccctaatgtctaataatccatctttatttcactgatttgagatggcttttttacatatgctggcttttcattctgttgatgtaccagcattatactttcagctttatagaggcataaaaagtatgttttaatctctagaagggctagtttcactcctttgcttgattttctgtatgaacttggcaaacattttctctattacaaaaatgtttttggaatctcagtaagtttacatattaacttagggacaaatgatatctttatagtaagtcttgctgttgaagaacttagcttgtctgtttgtttaaggctacttttgtgcctttcacacatttaaaaaggcctctccaaatatgtccatacatggctttttaaattgattcctaaatattttaaatttactgttctgttgtttatcagtcttgtctcccattatgcttcctaaccattgttgcttgtgcaccccaagttctttgtcagggaatccagtgccctttgatagtggactttgtctcactcttcagtaatatctcctgcctctcccttgcatagacgcttcactccgaccaaacatcttgtgatttcatagatgttttcatttctcatttctgtgtgcctttaacctttagttgcctctgcctaagatttttcttctcattttttctggctttttctggtccttttgctctgaaagccctgcctcataccttcttaacttttttctcttaccactgtaataaaagatatttttttgtttgtatttccaaggttagcctttgtttggggttagcctttgtttggattttttccctgttactgttagcgcttctcttgctgtcttttgtatgtaggcctgcattgtccattacagtagcctctagccacgtaaggcacttggcttatgagtgccacatgttgaattgatgatatttggatatattggcttaaatgaaatgtacaattaaaattaatttcacttgtttatttttacctttttaatgtggctaatagaacatatatgaaattatatattactcgtattttatttctattggacagtgctgcactagactaattcactgtttgagggactatctgtctccagcacaaagcttggtatgtcataaatgtttcttgtgactgaatgaaaaagaatttgaagttaaagctgagatacttttggaaacattttgtaattttggctaatttgttttgaatcaggtttaagtgaagatattttggtaatctttgctttcttataataactaactatgctttttttgagatgtcattttaaccttaattctttgaaaggtattactttactcttgcatagattttttttgttagtttgttttgatcttatccctatgtgtttctactttttggtcctaattttataaaaatatccaggttgtagatatatctgttaatacgtaaaatgttgctttttatcagcagatttgactttatttttcatttttctgcagttttgggaatatgatttataaggagaagcgagaatctgttagtaaagaagatctggcaagagctactttagttactatcaccaataacattggttctgtggcacgaatgtgtgctgttaatgaggtaaaaaaacaaaaaacacaaaacttgaattatcaaaaatgtgaattggagtcctatatacacctagcagggcttcttcactttccctaaggaggcctctgggattgagatgtaacccattaaatgccaagactcattaggtatatatgttacgtatccagttgctatattacttttaaagaaagtagcagataattcaaattgaaataggagaaatttattcagaattttttttcagaaaaacacaacctaaatcccttgaggatgtaaaagaaagttctaagcataagacattttgagatactttgtgaaagcattttttttagtcttaattttgcatttggaaggcagctatgctcaccactataccaccagtgcttaatgttgcatttgattagtgaaattcttggaagttttcttactgccctcggcttctttacagtgctgccttgttgcatatggatcaagcagcattgtacagggctatgaaggcattgagacctgttcttcatgatatttgagtggtgtttattgttacaagaaaagtgtgaaaaggatatactgttagattgaccatatagttgggattctttgtttggaagagaatatatatatttaattctagcttccttatataataatagatatatttgcccgtttaatttttataaatatcaaatactttaaatggattgggaagtacgcttttcgaaggaacccttcatttgttcattcattcatttattcattgagtaaatatttactgattaccagatgccagacatcgttctgggtatttggaacatattaatgaagaaaacaaagatctggctttgtggagcttgcattcattctagtgacatattaagtaaattgtgtagtgtgtattaggtgataagtgctatttttttaaaaagagaccatcaaacaggataaagaggattgggaatagggcagagagtggtagaggacaaattgctaagtaattgagtggttaaaggaaagctttattgaaaatgtgattcttaggcagaggtttgaaggaggtgagggggaaactgtgcatgtagacattttggggagaaagcttccagcagagagaacaaatatgcaaatcctctgaattattctgtatttaaatccagaacttggtctcatcagttttttaataacttagaaacttaagtgttagttggttgatggagttactagtagaccatgttgggagctgacaacaatttgagacctttattcttagccctttatgtctaaatttccactgaccaattgagttaacaataatttaggccatggtttacagtatcccaacttatgtacaaagatttctactcaaaagtcagtatagtgtgagagtcgaaataagttttctggtgattcaaacaccagttcccctttgtaagatttcctaatcatagagataatctaagaaaccaaattagtgtggaatctttgcagagagagaatgatttgatgaatcaggcaggggacggagaaagaatgctagaatcctaggggaatgcacatgccagtaccccagtcagtattactctccaattctgtagaatccacagttgcatgtcattgttcaacatgcattgcaatgtgtgggccaagtttgctacttatcaactaaatgcattttatagtacttaccatgttttgatttttttttttaatcacatcagtaatgtgtctccaaatgactttgtaagggggctatttattggccattttcaaaaacaaatctcacctgaaatcatctgctagagtctttctggaacctttttttaaaagtagactttattttttagatcagtttcaggttcacgtaaaattaagtggaaagctcagtgagttcccatataccaccttccatacacacacagcccacttccatcctcagcatcccatagtagagtgatcatgtgttacagtccataaccctgtgcacacatcatcatcacccaaagtccataatttagggttctctcttggtgttacacattttgtggattttggatgatgtgtgcagaactaatttttaaatattcaggattatacagctatatgccaggaatgtagtaggtgttatactaataaagcgtagttgtgtttttttgcattttaaaataaattttaaataaatatttagaaaccttttatattgtaaaatctattatttttacaagttttttctttgttcttttcttttagaaaataaacagagttgtctttgttggaaactttttacgtgtcaataccctctcaatgaaacttttggcatatgcactggattactggtcaaaaggtcaactaaaagcattgtttctagaacatgaggtatggtaggaaaatgttttttgtgaattttaatagcatgttttttaagagacagggtcttgctctgtcactcaggcttgagtttagtggcacaatgatggcttactgcagcctcttcctcctgggctcatcaatcctcccacctcagcctcccaagtagctgggaccacaggtatgcaccactgtgcccagaaaatttatttttattaatattttttgtggagacaggatcactctttgttgcccaggctagtctggaactcctggcctcaagcaatcctttataggtgtgagccaccatgcccagccttaagtagtagaatattggttccttcgcttcagtttcagttgtggggaagagaattacaataacctgttaggcacccccagatttttttgtattcatttactacatgcagttaagttctgatctgagcaattatcagtccacataatgttttggattaacttaacttgaatcattttgtgatcaaagtcaaatggctgtatcattacaaattagtaacagagattcaaattattctgctcttaaaagcttccatgtcttggccgggtgcggtggctcatgcctgtaatcccagcactttgggaggccaaggcggacggatcacgaggtcaggagatcaagaccatcctggctaacaacggtgaaaccccgtctctactaaaaatacaaaaaaaaattagccgggcgaggtggcgggcgcctgtaatcccagcgactcgggaggctgaggcaggagaatggtgtgaaccccagggggcggagcctgcagtgagtcgagatggcgccactgcactccagccactccagcctgggtgatagcgagactgtctaaaaaaaaaaaaaaaaaaaagcttccatgtctcattgtcactgctcacacaatacaaatcagaatggtgtgcccttgtgcaattccacatggcatgcagtgagagtgtcaggcacagccacaggaagttagtttgttttattaagtaaaggggagagggtgcagaattgctgttacagtcctggaagctttagtgtctaaaggccacacttttagaatacgtatttcagtgtgagcctatagtcccagctattcaagaggctgagatgggaggaccatgtgagcccaggaattcaaggccagcctgggcaaaatagtgagaccatgtctctaaaaataataataataaataaaaatacatatttcaaaggtgtgtagacatcaagaatacagattcagaaaattttttataatagctaacaacgcagaaattggtaggtttccaaatattattaaacaaatagattgtgcatagttgtgtgttctcaagtggttaatattatatgctaacttaaaagctgtactacataacagttatttttaaattacacagggttactttggagcagttggtgcacttcttgggctgccaaatttcagctaaagcatcaggtctctctctctgctaataaatgtcatccaagaggaactaaaaccagaggcattattactgcattgtttgtcactgggaaccaaaggataaaagagtagcataagctgctgaatgttgccatattaaaggagagaacttggtaacgtgaagtatttctcattgaaatgctttcccttttgtatatagccagtgttaaatccttaaatgcaatacagcctctgattattgagcttcctcttaaaaagatttttttattttatgtagccaacattgcagtactgtatgctcaaacacaaatcttaaagtatcggaactgtttagcttatgaaaataatcgactctgaatatttgttacaagtctgttttatgtgttttgattactagtgagcagaaaataacataccctgtattcaaaattactgaaatggcaatcaaagatgatcatttttatgtgattttagaaatgttaaggcaatactactaattattgtaggtttttttaacgtatcacccaaagcatgtatgtgatctttccccattagtatctttttctcaaatgccataattaactgaaatactattattaaattttcatgagaattctaaaatgaatcctgggaaatgcacgtttggtgatgttgcactttctgtattttacaggaattagtcaatacatgttgaaatgtttaacattttaagattggaggcttaattactgggagtctgtctaatgaagtcctgggactattgtaatggaatatgatttgagttcactgtgctctttttgtttgtttgttttggtcatatatacattcagaacttttattttaaaacaaccacaataacattaataatagaaaattcatctgtaaatattcacagtctagtcactgaaaaatgggaaaacctctaccatgccttattattaccctttgctgtttgaggagccagaaatagaggtgcagttagaggacggtcactttttccaacaaaacccactccatagccatgtggatttttatccaaaggctcaacaaccagagggaatggtgagacctgataactaaaatactgttattggcaagggtttgaaatgtgtaagaacctaggagggaaaggaagattgagcaacataggaaaaggggaagagaggctgagtgtcaccaaggtccaaactccatttataaaaatactgcaaaaccaggagttgatggtagaaatgcatatgatccatggcaggagtaaatctctccacctcctctaactctctgaaaactctagagttggagcaagtcttccatttgcttcttatccccttaaaagaatgccttccacttcccaacagcccccatcaagggaccccaagaggccaccatgctcttatctcgcactttctttcctattccccttgcctgaatctggagtggggttgagccctctgccttcaaccttaagatttaggaagttctttccccaactgtctaacttggaaaggtagatgagtctgaattttgaagtaacgaatgcaaattccactcagcagaggcaatgttatttatgtacatagggatagtggaatgagttttaatagattctgtccaaaaggggtttgttcctcttatttcctctatgtaggaagttgtgtcttaggcaactttatcagtatcaatggaaaaatgataggcactacaatgaaatggcaggatgccaatatgagatatttcaggaataataagaaatacagtttgtttgtataaaataaactatctcaagaaagttttcaacgacagtgatagtgttcatttgtaagagagagttctagaacttcgatgtccagtgcagtagccactacccatatgtagctgttgagcatttgaaatatggttagtccaaattgagatgtgctctaaaggacaataaaaggttaaatatctcctaattttttgtattgattacatgttgaaatgttaacattggaaatattgggttaaagaaaaatacacaattaaaatgaatcttggccaggcgcagtggctcacgcctctaatcccagcactttgagaggccagggtgggcaggtcacctgaggtcaggagttcgagaccagcctggccagtgtggcaaaaccctgcctactaaaaatacaaaaattagccaggcatggtggtgcgcacctgtagtcccagctacttgggaggctgaggcaggagaattgcttgaacccaggaggaggaggctgcagtgagctgagattgtgccactgcactccagcctgggcgacagagtgagactctgtctcaaaaaaaagaatcatctgtttccaattatttttaaatgtgcttactagaaaagataaaatcacacatggtttacattttatttctattaagacagcaccgttaagaacatagagctttgaggaattgtggtattagaaccaaatctatttaccacagtgagcttacagggagttactcgagatcttaataaaaaattataatctttggcagccttcattatgattttgtgttcttattattccagtacctctagattacatatgggaaaagctaaagagccacagtggtgagatggttgctcactctagcaggtaatttcagtttgaaaggataaaatatatgaatcatagttcacattaaccaaagtacagtgatgaaataacttagactctgaccattccattttttcttaaagattgccctaaatctatagatgctaatacagtatttgccacaggtataaaacttgtagttactgtcattcaattaagattcttatctgtacagatatacaaatcagaaacttttaaaataaattgaactaatggaattttggctccaatatttagtcactacaatggaaatattaaagcaaggaacatgaagtcattgtagggttttaaaatggctactgactgacatgaattcagagtttcaaacagtctaaattctaaaaacttaactttacacgcttttcctcctaaataaccactctaataattcatacattcatatcttcaggtaaagaaaactgaattttaaacaattgaggctgggtgcagtggctcatgcctgtaatcgaatataaggacttgagtataaaatttgaaaactacatggggaaatgtctttatcatgcatctcttgatagtctactgaaaactattaagtaaacctgcggtctgtaaacaaaaaaacccatagtgatacttaccttgtgtaatgtaaacaattttttaagctctttaaagtacatctagatttactggtaatgtatagaagtcaattttatccccaagcatttctacttcctaaaccattagcaagagtctcaaaacaacttcactaaactattggacctccagtgttaacttgccaacataaaaatctgaaaaactttgtaatcactatcaaaaatacaaaagagagaataaattcccaggtaaaaggctttacaaattttggaactattatgcttttgtttactaaacactgatccttttagtaattctgcagtattgcctcagactcccacaaagtttcaaaatagctcatctattagattcctgtaacatttatttgggataaacgtggttttgttgccgttgttcataatagaataaaatatttagctttgatggttcagatgtaatacaaagaaataactaagtttgggcctgagataaatgtggtaaagcaagaatgcagagatgctgtaatgatgagtgagttttatagcattactgaggacctgaaaacttgctgccaaggacactttgaaggttttgttggctggaagaagtgtctctggaatcccactcctagctcttcttgaatatttgaaaagaattagataagggccatggggacccaggtcaccccacctcttcttttcagtttggctacaacattggagtcatcagtgctcctgagacagtcatacaggactttctcagttacactttgaaagagaggtcagaagactctccctctgaggttttgctcatgtccccctggcccttgtctgtggccatcttccccaatggtgatatgattggctcctttctgttgcactctttgtcaaccactttggcaggtgcagttcaatgcttatcataatttgttggctattactggttgccttatgggattctgcagacaagctgagttggttgaaatgctgatcctgggccactagattactggcttgtaatgcggactctgcacaagttttgtgcccatgtacattggagagatctcgcctactcccctttggggtacctttagtgctctcaaccagctggacgtcgttggtattctggagatccagatctttggtctggagttcatcttggggtctgaagagctatgcccagtgatactgggctttaccatccttccagctgtcctataaagtgtagcccttccattttgcccctggaagtcgtaagtttttgctcattaacagaaaggaagagtactaatgagatccttcagcaattgtaggggactcaggatgtgtcccaggacatctaggagataagagtgctaggatgatacaagaaaagcaagtcactacactggcgctctttagagtacccagctaccaacaacccactgtcatttccatcatgctccagctctctcagtagctctctggaatcaatgttgtcttctattactcaatgagaatcttcaaggatgcaggtgttgagaagccaatctatagattagtgcaggagtggttaatattatcttcttgactgtagtctctctgtttgtggttgaaagggcaggaaggactttacatatgataggtcttgaggcatggcgttttgttctgtcctcatgattgtttctttgttattaaaggatgagtatggtgggatgagctttgtctgtagtggggctatcttggtctttgtggccttctctgaagttggaccagactccgttccctggaatactgtggccacactcttcagtttgcaatagcagtggctggttgctccaactggacctccaactttctagttggattgctcttcctgaacaattattatctagtttaagtgtgttgttgctttagggtcatggcatgcttatgtatttctgttaccatctgaccatggtactatgccaagttctcttaggggacctgaatctttccagtagaccacatttgagagagtatgagtcaactgggcatagttcccaacaacccaaaatacatacgtacttcactgaagcagatctcatgattccattgacttcatttctaaaattggactttgagcagccaatttctaaggattaaaaagaaactttaatgcattgtagacctctgtacacagaaaaatctttgtaacttttgggcttaattttcattcttaaaaaatctggtaactttttcaaatgcaaccactgtcagtttgctgtgaggctaggcaaacaagcacaaggtatagaatttcccatcaccaccaccctgaccccgcgagaagattgccttttaattagagacttgtagaactagtgccttttaagttctacactcatcttttccaaagactattagtaaacttgccatgtaatttgacatggcagttccttgctcagctactctaaataaagttggaaattaggtggtctcttagtttgggtaaagtcagtactattgccagtaatatacatggtaattgaaagcccttaaagtggttcagattatttgccaaatattagactctataaaaatttctgaggttttttttcttttacctttgagtgtacatgtgattgctataatgtaaataccagtcccttaaagactgtttctataagcagaatgatgcagcacaaagtggaaaggttttcctcttattccagcagtattcttgccttcaaagagtagtccatcttgccttgatttttaaggttgttttcttggatggaaagcttaactggatagtaatttccatatgttctttataaccactctgtatattataagcaaagttttttcatattgtatctttttctgttgagcactttatgcattttagtctattgcatttgagaatgtagtttagaaattcactgtttaaagccatgtgaaaactgatagaggataatgaaaatgagtgtacattattttgaatttaacttaactgttttgtggtgggtgtgaacaaaacattagaaatatattatctttttgtgataatactctctgacctcacttaaagtgatctgccatgaggtatccatgatcaagtttatgtttattctaatacctaaggaattcagccaactttgtttctatcatcagataatctcagaaaatagtgtgttttatctatattactgcctcttttcaatatttaagagaataattgtcttctggtttctactgagcctagtaataatcactaaagacctaaaaaaggaattccttctgttaagagtatttggatagcccattcacgataatggtggtgtgaaaatcaatcatcccagcttttctgacatatctaaattttgaataattaatttccacttccaaaaaattcaaatgttttctcaaagcagtcactacttatttgcattattcctgcatattcagtgaatgtgaggtcatatttggtattgtattagaagtagtgttggtcactggtcttgcctctttgaacattatttttatttgtaaaatgagggagttggtttgttatgatgggaaatgagtcagttttcagggtcctgagaaaattgcttcattcatggctgtgtttgagataactaaagtaaattttttttcaggtatttggtgtcatgttttggagttaatatttagtgcttatataattttaagttattacataatttttattggtatatatttgataggtactaggtattggattctcaccaaaccagtagaatggtattctctcttaatatgtgattgcctgtaatggccaggtagatataccttaaagtaatatgaaaggttttatatgtatattaaaatgtttgtacttttaaatctgtaaaggttatctggaatttttactgtgttaacttcagaattatatgggcattatgactttttcattgtacaaaaaattattcataaatgttagaatacagatgttccttgacttacaatagggttatgttccagtagacccattgtaaattgaaaataccgtaagttgaaaatacatttaatacgcctaacctactgaacatcccagcttagcctagcctatcttaaatgtgttctgaacacttaacgttggcctttagctgggcaaaatcatctaatacaaaacctattttataatgaagtgtttaatatctcaaataagagtattgtaccacatatcgttatcccaggataatatcagagtacaaaatttgaagtacagtttttaactgaatgtgtattgcttttgccccattataaagttgaaaaaccataagtcaaaccattgttaagtcggactgtttgtgttacatatatttgggattttttagtggccctttttaaaaagctgtttcttatttctgatcattgtgagtggggatagatgtgggaagaaccatgtctctactaaaaatacaaaaaatagccaggcttgttggcacacacctatagtcccagctactcgggagaccgaggcaggagaatcacttgaaccgggaggcagagggcagatcatgccactgtattccagcctgggcaacagagtaagactctgtctcaaaaatgaatgaatgaatgaatgaacgaatgaatgtactatgagctgatactgggatttcaggtaccgcagtttgtgctgaatgatatgtttggggtaaatcagtttttttcttatagaatttcggcgtttttgctgcaactgccactaattttgcatttaaaagaacaaaagaggaatgtatttttcaaaggagtgaatgaggttaaaatcaagattttgaatggtataaatatgcaactaattcagttgtaggatattattaaattttttattgctaaatatgtttctttcatacgttgcagtgcttacagttccaacagctttccaagaaaacatttccatatttgtgttatttgtaaagtatacataaataatgtaaaataatttgggattatttcaactttacattgtatgtctgaatttcatcgatgttgtacctggctcagtcaatagttgtcacaggtattaagccattttggaatttgccacttttttctgggtaacctgttttagtttagtttacagcatttagaaacagaaggtaactttatagaagtaacaccaatatcctagtctgcttgccccgaatataactaatagtattaggatgtaagcaatattaagatggtttttattattttttatacactgtgtgcttttactttttatttaaactacagcaaaaaactgattttttaactaaaattgaatggcgtttatcttaatgaccagttattgaccaaagtgtactcagaagatgttattatgtcccaatctaaggaatcctttaatttggggattaattttacttacacatgccatttcagtttcagttgcctcattctattacatcattcttgtcaagtctaagctttatcatgtctgaattcttttaacactgaatctgtgatgtaaaaatgtatgatgtgccataaattttattcataataaactaagttatagcctattgtaatctgtaaaacatttcttgtaaattacctaatttattttttcatttatgtacagtatcttatgtaaatttgaaaaatgtttgccatggcgcattctgtaaacattcccgtattcttttccttaatgcttatttgcatgaaggtaacttgggttttgcttgtttgtattggataaccattaagccaacttcagtttctctggctttttttctggtatttaaccatttctaattttgttcatattctaaatcgatttttgaatcatactttttatttttctaactttcctaaattaattttcttagttgtt

SEQ ID NO: 1021 - DNA, 20507 bp, Homo sapiens
ctttcccatggtttggcatggacattgggggaactctagtaaagctctcgtactttgaacctattgatatcacagcagaggaagagcaagaagaagttgagagtttaaaaagtattcggaaatatttgacttctaacgtggcatatggatccaccggcattcgggatgtacaccttgaactgaaagatttaacactttttggccgaagagggaacttgcactttatcaggtttccaacccaggacctgcctacttttatccaaatgggaagagataaaaacttctcaacattgcagacggtgctatgtgctacaggaggtggtgcttacaagtttgaaaaagattttcgcacagtaggtatcttttactcaaaactgaaaattgatacctgtttttaaatatgagagtaggtttccatctagcatgttccttaattctccctgcacatgcagtgggaaatatgtatccatggttgcctttcacttggggcgttttaaacacgtttatgagatgagtaaaaattgcccggatttggtcatgttgttgcacataatatttggtaaaacttgtttagggctgtactacaaagctacaataaaaaggggatttggggactttaatgaatttggcagtgtacaaagccagatataaatgaagcttgaattattttcactattgtcctacatttacatggtttttggaatattacttattcaaataatattaatcttccagggccatctccttcccaaaccctaagtctggaaaccaatgtcttttggttagtataatggacacctgaatgaaaatctgttacccttttttttctgtttttatgctgttaatcctgccatgttcctgtgtcaaatggggtgatttgaatggatctggcaggagaactatgagtattggtttgagttatgtgctgttagcagtttgccatcttctagtcttttccattagaatgagagttcaaagagtggtttgccaagcttctagtcttttctattagaataaagaatggctctgtttaggaccactgaaatttgtttttcttgaaaatgtaaatgtgaataatttaatttctgaaaatcataagaaaatactgttaatggaatataaaggctgacgtgggaggatcacttgaggctaggagttggagaccagcctgggcaatatagtgggaccccgtctctacaaaaaataaaaaaattagctcagcatagtggcctgtgcttgtagtcccagccactcaagaggctgatgaagtgggaggattgcttgagctcttgagattgaggctgcagtgagctgtgattgagccattgcactccagcatgggtgacagtgagaccctgtctcagaaggaatataaataacttaaatggctcatagaagcgagacccatataatttgaggtaaagatctgtagtactgtatgaaaagaggtgccttgggaacacagaggagtaacaacagctagagagttgaagaggttcccagaggaagtgatatctaagctgcaatgttttataaacggtgtcttataatacgctttttactaacctgaaatgatgaatgtaatcatttcaaactagtactcaaactataatataaagacaggagattaaggtatcagttattaatcagaaattaatctatccgtgggtagattaacaaacagtatgatcattccagaggacatcatgaagtagttatatgcttgcacctatgcatagattgatcatgaataccaaagctacacatgccagattgatatggtatgttctgttggaaaataagataccataaatggcattgctgttggtgacatgaccctccaacatgctaaacaaacacttggtaaaattccaaacagtaagaagtacaattttcccttgctttatgtggtggttcaattcctagcaaatttagtatatatttaaaactacgtgggttgggcacagtggctcacgcctgtaattccagcactttgggaagccaaggtgggcggatcacttgaggttaggagctggagaccagcctgaccaatgatggtgaaacctcatctctactaaaaatacaaaaattagccaggcgtggtggcgggcgcctgcaatcccagctacttgagaggctgaggcggagaatcgcttgaacccacgaggtggaggttgcagtgagccgagatcatgccactgtactccagcctgagtgacagagctagactctgtctcaaaaatgaatgaatgaatgaatgaatggagtgactgaatccataggacgaatacttttgtatttgtatacacagacagataggtaaaataactttgttattctctagcctcagataattataaataattttcctactgccactataaaaatgactggcagaacactcaaagataatgcatagatgggataattttttggtctgcagaaatgtcacacccattaaagatgtctggcatcacaagtccctgcccactaaatgtcagtttggtccttccttcctccccatcatttagaaaactagcagtgaggtgataccaccctcactgaggaccagtggactagatgaaatcccgaaagagattctgacatgaaacaaaatgaaaatgtgggggtcatagaccatttttaatttttgtaaagtaatacaggaaaatcatatagttgagtgtttttgaatgtcatccttttttgtttttgtttgtttgttttaacagattggaaacctccacctgcacaaactggatgaacttgactgccttgtaaagggcttgctgtatatagactctgtcagtttcaatggacaagccgagtgctattattttgctaatgcctcagaacctgagcgatgccaaaagatgccttttaacctggatgatccctatccactgcttgtagtgaacattggctcaggagtcagtattttagcagtccattccaaagacaactataaacgagtgactgggacaaggtagtgacctttttggttgtattgctgcattcacattgttttatacacagaagttatgaaatcagtataataatgtcattttcaccagtaaaagagcatgtatttgcacaacagcaaaaaaaaaaaatatatatatatatatattttttttttttttaagtgaaagagggtgccatgttgcccaggctgctcttgaacttctgagctcaagcaatctgcctgtctcggcctcccaaagtactgggattacaggcatgagccactgctcccagccaacagataatgtatttttataagatgtgtatgtcaagactcaaactgaaattattaaatgtttattagtcagcatcagttgggatcaaaatttccataatggtaaagtgaatttttatctagaatgagtctggtaacgttttttctagaatttaactggagcatttacttggaagcaacagtgttctattgattttaaactttattatgtttatattttgttcttttttccaaagcatttttcttctttacctattttttgactttttaatggatattaatatatgtaaacccttaaactgcagtactggggaacattgtaatttattcttataggatgaattaatgtgatttctttttgtgataacattaatgttcccaaatagcccacatacttttctgtaatacctgaaatacgaatgagaaataagatataaaactcatgattcttttatgtattttatcaacttttacagagaggtgaagattccagtttaaggaagaaagattttcaaatactttagattaatttgtgaaaaaaactcattttaattttaaagtagtaattctgtttaaattatacttaattagtactttatttttatggtggttaaaagttcacctctgttgtaattctctatgccaaagaattgtacactgctattgccttcttcggttaactctaaaagaagttcagtctgttaactaaatccaacagtgattcaggggtagaacttgctagaaatttagatgagactagggagcaaaggtttacagtttaggaattagatacgatttcattctgtgagcatatccagaagaataatagaagcaaataaatttctgtaattgacatgttggccagctggacataaatttactcattgtatttatgtgtaggtcatgtgaaatattagtgtatcatattgaattgatttcatccatgtcaggccaagtaaagaagcctttcccaaaatcatttcttggaaacgatttaaaattacaaagatgggcatggtagttcatgcctgtaattctaacactttgggaggccaaagtggaggattgcttgagaccaggagttaagaccagcctgggaaacatagtgagacccccatctctacaaaaatatatacatatatattagtccagtgtggtagtgtgcattgtagtctagctgctgcggaggctggaacaggaagattgcttgagcccaggagttcaaggatacattaggctatgatcatggtcactgcactccagcctgagggacagagtgagaccttgtctcaaaagaaaaattacagattttctctttgtaattaatatggtactgatttttaacatttattcctttttaatgcacacacaacaatttatctttggtaactacagagtgtaaggtattaggtgaagactttgggagagatttaataggtctttcctttcctcatgtttccaccaagtgatttttttctttggtttattctttgatctaacaagtttggttttactaaacaatttttgttgccttcgttatgttatttcagcactcagcattagtcataggttttttttctgtgtgttcattgaatacatgaatgatccacccttttactttagagaaagaatataatgtataaatgcaacttagcaagtttctttattttctttagccttggagggggtacctttctgggtttatgcagtttattgactggctgtgaaagttttgaagaggctcttgaaatggcatccaaaggtgatagcacacaagctgacaagctggtccgtgatatttatggaggagattatgaaagatttggtttgccaggttgggctgtagcatctaggtaagtttaacatttgtgttatttaagttacagaagttaagtaattcaagttgcttatgtttttggaaagcaatgtaacagaaagttgtaagggtgctttctcttatccagtttaggttccaagttttgaacattgatgtcatttaaaaattaagtatacattaagaagtttaccctgagtgcaccttgtaagaaactttttttttttaatttttgagtgtctttccagtgtttatgcaaatacaaatacatatttttacttttctccccatatacaaaaggtaatctaccattatatggcatactatatatactctaaagtatccatatagaaatctttacatgttgttgaccttattttatacaggtgtaggataaattcccaaaagttggattgcaaatgcatttttgagatattgttaattatgcaaaagagcggtactgtttttcactctcaccagcggtaaatgaaagtgcctgtttcaccagtagagtgctaacttttgcatttttgctaatcagatggagaagtggtatcttaatgtaattttaatttacatttctcctaccaacactggggttaagagccttgcatattttattttctgtgagttattgttcatgttctacttttctgttggattgttatacagttgaatttatcagtcttttcttttatggcttctggatattgattcatagtaagtaagtcttctacattccaaatatataaaggaataaacccttattttcttctgatatgttaatggtggtatttttatacttaaatctttgatttacttatagtttatcttagggtattttgtgagttacagatcatgctttcatttttcaggttttttgtttttttttccagaaggccctaatgtctaataatccatctttatttcactgatttgagatggcttttttacatatgctggcttttcattctgttgatgtaccagcattatactttcagctttatagaggcataaaaagtatgttttaatctctagaagggctagtttcactcctttgcttgattttctgtatgaacttggcaaacattttctctattacaaaaatgtttttggaatctcagtaagtttacatattaacttagggacaaatgatatctttatagtaagtcttgctgttgaagaacttagcttgtctgtttgtttaaggctacttttgtgcctttcacacatttaaaaaggcctctccaaatatgtccatacatggctttttaaattgattcctaaatattttaaatttactgttctgttgtttatcagtcttgtctcccattatgcttcctaaccattgttgcttgtgcaccccaagttctttgtcagggaatccagtgccctttgatagtggactttgtctcactcttcagtaatatctcctgcctctcccttgcatagacgcttcactccgaccaaacatcttgtgatttcatagatgttttcatttctcatttctgtgtgcctttaacctttagttgcctctgcctaagatttttcttctcattttttctggctttttctggtccttttgctctgaaagccctgcctcataccttcttaacttttttctcttaccactgtaataaaagatatttttttgtttgtatttccaaggttagcctttgtttggggttagcctttgtttggattttttccctgttactgttagcgcttctcttgctgtcttttgtatgtaggcctgcattgtccattacagtagcctctagccacgtaaggcacttggcttatgagtgccacatgttgaattgatgatatttggatatattggcttaaatgaaatgtacaattaaaattaatttcacttgtttatttttacctttttaatgtggctaatagaacatatatgaaattatatattactcgtattttatttctattggacagtgctgcactagactaattcactgtttgagggactatctgtctccagcacaaagcttggtatgtcataaatgtttcttgtgactgaatgaaaaagaatttgaagttaaagctgagatacttttggaaacattttgtaattttggctaatttgttttgaatcaggtttaagtgaagatattttggtaatctttgctttcttataataactaactatgctttttttgagatgtcattttaaccttaattctttgaaaggtattactttactcttgcatagattttttttgttagtttgttttgatcttatccctatgtgtttctactttttggtcctaattttataaaaatatccaggttgtagatatatctgttaatacgtaaaatgttgctttttatcagcagatttgactttatttttcatttttctgcagttttgggaatatgatttataaggagaagcgagaatctgttagtaaagaagatctggcaagagctactttagttactatcaccaataacattggttctgtggcacgaatgtgtgctgttaatgaggtaaaaaaacaaaaaacacaaaacttgaattatcaaaaatgtgaattggagtcctatatacacctagcagggcttcttcactttccctaaggaggcctctgggattgagatgtaacccattaaatgccaagactcattaggtatatatgttacgtatccagttgctatattacttttaaagaaagtagcagataattcaaattgaaataggagaaatttattcagaattttttttcagaaaaacacaacctaaatcccttgaggatgtaaaagaaagttctaagcataagacattttgagatactttgtgaaagcattttttttagtcttaattttgcatttggaaggcagctatgctcaccactataccaccagtgcttaatgttgcatttgattagtgaaattcttggaagttttcttactgccctcggcttctttacagtgctgccttgttgcatatggatcaagcagcattgtacagggctatgaaggcattgagacctgttcttcatgatatttgagtggtgtttattgttacaagaaaagtgtgaaaaggatatactgttagattgaccatatagttgggattctttgtttggaagagaatatatatatttaattctagcttccttatataataatagatatatttgcccgtttaatttttataaatatcaaatactttaaatggattgggaagtacgcttttcgaaggaacccttcatttgttcattcattcatttattcattgagtaaatatttactgattaccagatgccagacatcgttctgggtatttggaacatattaatgaagaaaacaaagatctggctttgtggagcttgcattcattctagtgacatattaagtaaattgtgtagtgtgtattaggtgataagtgctatttttttaaaaagagaccatcaaacaggataaagaggattgggaatagggcagagagtggtagaggacaaattgctaagtaattgagtggttaaaggaaagctttattgaaaatgtgattcttaggcagaggtttgaaggaggtgagggggaaactgtgcatgtagacattttggggagaaagcttccagcagagagaacaaatatgcaaatcctctgaattattctgtatttaaatccagaacttggtctcatcagttttttaataacttagaaacttaagtgttagttggttgatggagttactagtagaccatgttgggagctgacaacaatttgagacctttattcttagccctttatgtctaaatttccactgaccaattgagttaacaataatttaggccatggtttacagtatcccaacttatgtacaaagatttctactcaaaagtcagtatagtgtgagagtcgaaataagttttctggtgattcaaacaccagttcccctttgtaagatttcctaatcatagagataatctaagaaaccaaattagtgtggaatctttgcagagagagaatgatttgatgaatcaggcaggggacggagaaagaatgctagaatcctaggggaatgcacatgccagtaccccagtcagtattactctccaattctgtagaatccacagttgcatgtcattgttcaacatgcattgcaatgtgtgggccaagtttgctacttatcaactaaatgcattttatagtacttaccatgttttgatttttttttttaatcacatcagtaatgtgtctccaaatgactttgtaagggggctatttattggccattttcaaaaacaaatctcacctgaaatcatctgctagagtctttctggaacctttttttaaaagtagactttattttttagatcagtttcaggttcacgtaaaattaagtggaaagctcagtgagttcccatataccaccttccatacacacacagcccacttccatcctcagcatcccatagtagagtgatcatgtgttacagtccataaccctgtgcacacatcatcatcacccaaagtccataatttagggttctctcttggtgttacacattttgtggattttggatgatgtgtgcagaactaatttttaaatattcaggattatacagctatatgccaggaatgtagtaggtgttatactaataaagggtagttgtgtttttttgcattttaaaataaattttaaataaatatttagaaaccttttatattgtaaaatctattatttttacaagttttttctttgttcttttcttttagaaaataaacagagttgtctttgttggaaactttttacgtgtcaataccctctcaatgaaacttttggcatatgcactggattactggtcaaaaggtcaactaaaagcattgtttctagaacatgaggtatggtaggaaaatgttttttgtgaattttaatagcatgttttttaagagacagggtcttgctctgtcactcaggcttgagtttagtggcacaatgatggcttactgcagcctcttcctcctgggctcatcaatcctcccacctcagcctcccaagtagctgggaccacaggtatgcaccactgtgcccagaaaatttatttttattaatattttttgtggagacaggatcactctttgttgcccaggctagtctggaactcctggcctcaagcaatcctttataggtgtgagccaccatgcccagccttaagtagtagaatattggttccttcgcttcagtttcagttgtggggaagagaattacaataacctgttaggcacccccagatttttttgtattcatttactacatgcagttaaattctgatctgagcaattatcagtccacataatgttttggattaacttaacttgaatcattttgtgatcaaagtcaaatggctgtatcattacaaattagtaacagagattcaaattattctgctcttaaaagcttccatgtcttggccgggtgcggtggctcatgcctgtaatcccagcactttgggaggccaaggcggacggatcacgaggtcaggagatcaagaccatcctggctaacaacggtgaaaccccgtctctactaaaaatacaaaaaaaaattagccgggcgaggtggcgggcgcctgtaatcccagcgactcgggaggctgaggcaggagaatggtgtgaaccccagggggcggagcctgcagtgagtcgagatggcgccactgcactccagccactccagcctgggtgatagcgagactgtctaaaaaaaaaaaaaaaaaaaagcttccatgtctcattgtcactgctcacacaatacaaatcagaatggtgtgcccttgtgcaattccacatggcatgcagtgagagtgtcaggcacagccacaggaagttagtttgttttattaagtaaaggggagagggtgcagaattgctgttacagtcctggaagctttagtgtctaaaggccacacttttagaatacgtatttcagtgtgagcctatagtcccagctattcaagaggctgagatgggaggaccatgtgagcccaggaattcaaggccagcctgggcaaaatagtgagaccatgtctctaaaaataataataataaataaaaatacatatttcaaaggtgtgtagacatcaagaatacagattcagaaaattttttataatagctaacaacgcagaaattggtaggtttccaaatattattaaacaaatagattgtgcatagttgtgtgttctcaagtggttaatattatatgctaacttaaaagctgtactacataacagttatttttaaattacacagggttactttggagcagttggtgcacttcttgggctgccaaatttcagctaaagcatcaggtctctctctctgctaataaatgtcatccaagaggaactaaaaccagaggcattattactgcattgtttgtcactgggaaccaaaggataaaagagtagcataagctgctgaatgttgccatattaaaggagagaacttggtaacgtgaagtatttctcattgaaatgctttcccttttgtatatagccagtgttaaatccttaaatgcaatacagcctctgattattgagcttcctcttaaaaagatttttttattttatgtagccaacattgcagtactgtatgctcaaacacaaatcttaaagtatcggaactgtttagcttatgaaaataatcgactctgaatatttgttacaagtctgttttatgtgttttgattactagtgagcagaaaataacataccctgtattcaaaattactgaaatggcaatcaaagatgatcatttttatgtgattttagaaatgttaaggcaatactactaattattgtaggtttttttaacgtatcacccaaagcatgtatgtgatctttccccattagtatctttttctcaaatgccataattaactgaaatactattattaaattttcatgagaattctaaaatgaatcctgggaaatgcacgtttggtgatgttgcactttctgtattttacaggaattagtcaatacatgttgaaatgtttaacattttaagattggaggcttaattactgggagtctgtctaatgaagtcctgggactattgtaatggaatatgatttgagttcactgtgctctttttgtttgtttgttttggtcatatatacattcagaacttttattttaaaacaaccacaataacattaataatagaaaattcatctgtaaatattcacagtctagtcactgaaaaatgggaaaacctctaccatgccttattattaccctttgctgtttgaggagccagaaatagaggtgcagttagaggacggtcactttttccaacaaaacccactccatagccatgtggatttttatccaaaggctcaacaaccagagggaatggtgagacctgataactaaaatactgttattggcaagggtttgaaatgtgtaagaacctaggagggaaaggaagattgagcaacataggaaaaggggaagagaggctgagtgtcaccaaggtccaaactccatttataaaaatactgcaaaaccaggagttgatggtagaagtgcatatgatccatggcaggagtaaatctctccacctcctctaactctctgaaaactctagagttggagcaagtcttccatttgcttcttatccccttaaaagaatgccttccacttcccaacagcccccatcaagggaccccaagaggccaccatgctcttatctcgcactttctttcctattccccttgcctgaatctggagtggggttgagccctctgccttcaaccttaagatttaggaagttctttccccaactgtctaacttggaaaggtagatgagtctgaattttgaagtaacaaatgcaaattccactcagcagaggcaatgttatttatgtacatagggatagtggaatgagttttaatagattctgtccaaaaggggtttgttcctcttatttcctctatgtaggaagttgtgtcttaggcaactttatcagtatcaatggaaaaatgataggcactacaatgaaatggcaggatgccaatatgagatatttcaggaataataagaaatacagtttgtttgtataaaataaactatctcaagaaagttttcaacgacagtgatagtgttcatttgtaagagagagttctagaacttcgatgtccagtgcagtagccactacccatatgtagctgttgagcatttgaaatatggttagtccaaattgagatgtgctctaaaggacaataaaaggttaaatatctcctaattttttgtattgattacatgttgaaatgttaacattggaaatattgggttaaagaaaaatacacaattaaaatgaatcttggccaggcgcagtggctcacgcctctaatcccagcactttgagaggccagggtgggcaggtcacctgaggtcaggagttcgagaccagcctggccagtgtggcaaaaccctgcctactaaaaatacaaaaattagccaggcatggtggtgcgcacctgtagtcccagctacttgggaggctgaggcaggagaattgcttgaacccaggaggaggaggctgcagtgagctgagattgtgccactgcactccagcctgggcgacagagtgagactctgtctcaaaaaaaagaatcatctgtttccaattatttttaaatgtgcttactagaaaagataaaatcacacatggtttacattttatttctattaagacagcaccgttaagaacatagagctttgaggaattgtggtattagaaccaaatctatttaccacagtgagcttacagggagttactcgagatcttaataaaaaattataatctttggcagccttcattatgattttgtgttcttattattccagtacctctagattacatatgggaaaagctaaagagccacagtggtgagatggttgctcactctagcaggtaatttcagtttgaaaggataaaatatatgaatcatagttcacattaaccaaagtacagtgatgaaataacttagactctgaccattccattttttcttaaagattgccctaaatctatagatgctaatacagtatttgccacaggtataaaacttgtagttactgtcattcaattaagattcttatctgtacagatatacaaatcagaaacttttaaaataaattgaactaatggaattttggctccaatatttagtcactacaatggaaatattaaagcaaggaacatgaagtcattgtagggttttaaaatggctactgactgacatgaattcagagtttcaaacagtctaaattctaaaaacttaactttacacgcttttcctcctaaataaccactctaataattcatacattcatatcttcaggtaaagaaaactgaattttaaacaattgaggctgggtgcagtggctcatgcctgtaatcgaatataaggacttgagtataaaatttgaaaactacatggggaaatgtctttatcatgcatctcttgatagtctactgaaaactattaagtaaacctgcggtctgtaaacaaaaaaacccatagtgatacttaccttgtgtaatgtaaacaattttttaagctctttaaagtacatctagatttactggtaatgtatagaagtcaattttatccccaagcatttctacttcctaaaccattagcaagagtctcaaaacaacttcactaaactattggacctccagtgttaacttgccaacataaaaatctgaaaaactttgtaatcactatcaaaaatacaaaagagagaataaattcccaggtaaaaggctttacaaattttggaactattatgcttttgtttactaaacactgatccttttagtaattctgcagtattgcctcagactcccacaaagtttcaaaatagctcatctattagattcctgtaacatttatttgggataaacgtggttttgttgccgttgttcataatagaataaaatatttagctttgatggttcagatgtaatacaaagaaataactaagtttgggcctgagataaatgtggtaaagcaagaatgcagagatgctgtaatgatgagtgagttttatagcattactgaggacctgaaaacttgctgccaaggacactttgaaggttttgttggctggaagaagtgtctctggaatcccactcctagctcttcttgaatatttgaaaagaattagataagggccatggggacccaggtcaccccacctcttcttttcagtttggctacaacattggagtcatcagtgctcctgagacagtcatacaggactttctcagttacactttgaaagagaggtcagaagactctccctctgaggttttgctcatgtccccctggccctcgtctgtggccatcttccccaatggtgatatgattggctcctttctgttgcactctttgtcaaccactttggcaggtgcagttcaatgcttatcataatttgttggctattactggttgccttatgggattctgcagacaagctgagttggttgaaatgctgatcctgggccactagattactggcttgtaatgcggactctgcacaagttttgtgcccatgtacattggagagatctcgcctactcccctttggggtacctttagtgctctcaaccagctggacgtcgttggtattctggagatccagatctttggtctggagttcatcttggggtctgaagagctatgcccagtgatactgggctttaccatccttccagctgtcctataaagtgtagcccttccattttgccctggaagtcgtaagtttttgctcattaacagaaaggaagagtactaatgagatccttcagcaattgtaggggactcaggatgtgtcccaggacatctaggagataagagtgctaggatgatacaagaaaagcaagtcactacactggcgctctttagagtacccagctaccaacaacccactgtcatttccatcatgctccagctctctcagtagctctctggaatcaatgttgtcttctattactcaatgagaatcttcaaggatgcaggtgttgagaagccaatctatagattagtgcaggagtggttaatattatcttcttgactgtagtctctctgtttgtggttgaaagggcaggaaggactttacatatgataggtcttgaggcatggcgttttgttctgtcctcatgattgtttctttgttattaaaggatgagtatggtgggatgagctttgtctgtagtggggctatcttggtctttgtggccttctctgaagttggaccagactccgttccctggaatactgtggccacactcttcagtttgcaatagcagtggctggttgctccaactggacctccaactttctagttggattgctcttcctgaacaattattatctagtttaagtgtgttgttgctttagggtcatggcatgcttatgtatttctgttaccatctgaccatggtactatgccaagttctcttaggggacctgaatctttccagtagaccacatttgagagagtatgagtcaactgggcatagttcccaacaacccaaaatacatacgtacttcactgaagcagatctcatgattccattgacttcatttctaaaattggactttgagcagccaatttctaaggattaaaaagaaactttaatgcattgtagacctctgtacacagaaaaatctttgtaacttttgggcttaattttcattcttaaaaaatctggtaactttttcaaatgcaaccactgtcagtttgctgtgaggctaggcaaacaacacaaggtatagaatttcccatcaccaccaccctgaccccgcgagaagattgccttttaattagagacttgtagaactagtgccttttaagttctacactcatcttttccaaagactattagtaaacttgccatgtaatttgacatggcagttccttgctcagctactctaaataaagttggaaattaggtggtctcttagtttgggtaaagtcagtactattgccagtaatatacatggtaattgaaagcccttaaagtggttcagattatttgccaaatattagactctataaaaatttctgaggttttttttcttttacctttgagtgtacatgtgattgctataatgtaaataccagtcccttaaagactgtttctataagcagaatgatgcagcacaaagtggaaaggttttcctcttattccagcagtattcttgccttcaaagagtagtccatcttgccttgatttttaaggttgttttcttggatggaaagcttaactggatagtaatttccatatgttctttataaccactctgtatattataagcaaagttttttcatattgtatctttttctgttgagcactttatgcattttagtctattgcatttgagaatgtagtttagaaattcactgtttaaagccatgtgaaaactgatagaggataatgaaaatgagtgtacattattttgaatttaacttaactgttttgtggtgggtgtgaacaaaacattagaaatatattatctttttgtgataatactctctgacctcacttaaagtgatctgccatgaggtatccatgatcaagtttatgtttattctaatacctaaggaattcagccaactttgtttctatcatcagataatctcagaaaatagtgtgttttatctatattactgcctcttttcaatatttaagagaataattgtcttctggtttctactgagcctagtaataatcactaaagacctaaaaaaggaattccttctgttaagagtatttggatagcccattcacgataatggtggtgtgaaaatcaatcatcccagcttttctgacatatctaaattttgaataattaatttccacttccaaaaaattcaaatgttttctcaaagcagtcactacttatttgcattattcctgcatattcagtgaatgtgaggtcatatttggtattgtattagaagtagtgttggtcactggtcttgcctctttgaacattatttttatttgtaaaatgagggagttggtttgttatgatgggaaatgagtcagttttcagggtcctgagaaaattgcttcattcatggctgtgtttgagataactaaagtaaattttttttcaggtatttggtgtcatgttttggagttaatatttagtgcttatataattttaagttattacataatttttattggtatatatttgataggtactaggtattggattctcaccaaaccagtagaatggtattctctcttaatatgtgattgcctgtaatggccaggtagatataccttaaagtaatatgaaaggttttatatgtatattaaaatgtttgtacttttaaatctgtaaaggttatctggaatttttactgtgttaacttcagaattatatgggcattatgactttttcattgtacaaaaaattattcataaatgttagaatacagatgttccttgacttacaatagggttatgttccagtagacccattgtaaattgaaaataccgtaagttgaaaatacatttaatacgcctaacctactgaacatcccagcttagcctagcctatcttaaatgtgttctgaacacttaacgttggcctttagctgggcaaaatcatctaatacaaaacctattttataatgaagtgtttaatatctcaaataagagtattgtaccacatatcgttatcccaggataatatcagagtacaaaatttgaagtacagtttttaactgaatgtgtattgcttttgccccattataaagttgaaaaaccataagtcaaaccattgttaagtcggactgtttgtgttacatatatttgggattttttagtggccctttttaaaaagctgtttcttatttctgatcattgtgagtggggatagatgtgggaagaaccatgtctctactaaaaatacaaaaaatagccaggcttgttggcacacacctatagtcccagctactcgggagaccgaggcaggagaatcacttgaaccgggaggcagagggcagatcatgccactgtattccagcctgggcaacagagtaagactctgtctcaaaaatgaatgaatgaatgaatgaacgaatgaatgtactatgagctgatactgggatttcaggtaccgcagtttgtgctgaatgatatgtttggggtaaatcagtttttttcttatagaatttcggcgtttttgctgcaactgccactaattttgcatttaaaagaacaaaagaggaatgtatttttcaaaggagtgaatgaggttaaaatcaagattttgaatggtataaatatgcaactaattcagttgtaggatattattaaattttttattgctaaatatgtttctttcatacgttgcagtgcttacagttccaacagctttccaagaaaacatttccatatttgtgttatttgtaaagtatacataaataatgtaaaataatttgggattatttcaactttacattgtatgtctgaatttcatcgatgttgtacctggctcagtcaatagttgtcacaggtattaagccattttggaatttgccacttttttctgggtaacctgttttagtttagtttacagcatttagaaacagaaggtaactttatagaagtaacaccaatatcctagtctgcttgccccgaatataactaatagtattaggatgtaagcaatattaagatggtttttattattttttatacactgtgtgcttttactttttatttaaactacagcaaaaaactgattttttaactaaaattgaatggcgtttatcttaatgaccagttattgaccaaagtgtactcagaagatgttattatgtcccaatctaaggaatcctttaatttggggattaattttacttacacatgccatttcagtttcagttgcctcattctattacatcattcttgtcaagtctaagctttatcatgtctgaattcttttaacactgaatctgtgatgtaaaaatgtatgatgtgccataaattttattcataataaactaagttatagcctattgtaatctgtaaaacatttcttgtaaattacctaatttattttttcatttatgtacagtatcttatgtaaatttgaaaaatgtttgccatggcgcattctgtaaacattcccgtattcttttccttaatgcttatttgcatgaaggtaacttgggttttgcttgtttgtattggataaccattaagccaacttcagtttctctgcctttttttctgtagtttaaccatttctaattttgttcatattctaaatagatgttagaatcatactttttattttctactttctaaataaattatctaagttgtttactatg

SEQ ID NO: 1022 - DNA, 372 bp, Homo sapiens
tgactaccatgtgacatgtgaagtacatatcttttatttaaaaaaaattagcaagaactaggatgaaaaaaatctaagatctggactaaaggagaacatgatgcagtatggaagagatttgaggtgtagtttagctattcaaatgtaggaagtactgctgtcgcaagcacttagaaataagctcctaaagagcatacattcaaggctacacacttaagtctttcatttaaataaactttccaaggagggaaaagtctgtactggagtcaatacacagtgctatataaattttgaaagtggccaggagcagtagctcacacctacaatcccagcactttgggaaaccaaggcaggtggatcacttgaggccag

SEQ ID NO: 1023 - DNA, 1242 bp, Homo sapiens
tttctttctttctttctttttttttttttttgagacggagtcttgctccgtcgcccaggctggagtgcaatggcgcgatctctgctcactgcaagctccacctcccgggttcacgccattctcctgcctcagcctccagagtagctgggactacaggcgcctgccaccacggccggctaatttttttgtatttttttagtagagacggggtttcgctgtgttagccaggaaggtctcgatctcctgacctcgtgatccacccgtctcggcctcccaaagtgctgggatcacaggcgtaagccaccgcgcccggcctggagataatgattatttactgaagggaattgctttttgggtttgttttttatgacaggatctcactctgttacctaatctgcagtgtagtggtgcaaacatggctcaccgcagccccagcctcctggactcaagtgatcctcctgcctcagcctcctgtaactgggactacaggtgcatgctgccacgcccagctaatttttaaattttttgcggagacaggatcttgttatattgccaaggctggtttcaaactcctgttttcaagcgatcccccctacctcagcctcccaaagtattgggatttcaggtgtgagcaccatacctggcaggaattgctttttaaggaggtgcttttctcctgggttacttgaagtgattataggccagttttattgtattaaaatgcttatagaaacaaagattttcatgcccttagtgttgacctatttattgaaaaaagaatgatctgaattttttctcatccctggagcacatggtatttagtaaatgaaaaggggttgcctaccaggccaggaattaaaagatcctgggtcaactctaagcaccctatacgtttttagaaaatatattaataaaactttgaagggccgagcgcggtggctcacgcctgcaatcccagcactttgggaggcagaggcaggcggatcacaaggtcaggagatcgagaccatcctggctaacacggtgaaaccccgtctctactaaaaatacaaaaaaaaaaaaaattaggcaggcgtggtggtgggcacctgtagtcccagctactcgggaggctgaggcaggagaatggcgtgaacccgggaggcggagtttgcagtgagccaagatcgcgccactgcactccagcctgggcaacagagcgagactccatctcaaaaaaaaaaaaaaaaaaaaaactttgaa

SEQ ID NO: 1024 - DNA, 350 bp, Homo sapiens
tttttagaaaatatattaataaaactttgaagggccgagcgcggtggctcacgcctgcaatcccagcactttgggaggcagaggcaggcggatcacaaggtcaggagatcgagaccatcctggctaacacggtgaaaccccgtctctactaaaaatacaaaaaaaaaaaaaattaggcaggcgtggtggtgggcacctgtagtcccagctactcgggaggctgaggcaggagaatggcgtgaacccgggaggcggagtttgcagtgagccaagatcgcgccactgcactccagcctgggcaacagagcgagactccatctcaaaaaaaaaaaaaaaaaaaaaactttgaa

SEQ ID NO: 1025 - DNA, 372 bp, Homo sapiens; identical to SEQ ID NO: 1022

SEQ ID NO: 1026 - DNA, 946 bp, Homo sapiens
aaatccctctggagagtgagcgcactgctccatttttagtttatgtccccttctctacttctgacctgtataattggaaggctcataatccccccttctctgaaaagccccaggtcttgacttcactgatggagtccgtgctctggactcactggcccaccaggaatgactgtcagcaactccttttaacgcttttcacctctgaagagagggaccgtatccgaagagaggccagaaagtattttctcacatcagccggtagaccagaggaggaagcccaggacctccttgaggaggcttttccctctacccggcctgattgggatccaaattcctcaggtgggaagacagctttggatgattttcaccagtatctccttgcgggtatcaagggagccactggaaaacccatgaatctgtccaagacaactgaagttgtccaggggcctgatgagtcaccaggagcgtttctagaatgcctcccagaggcccatcggacttacaccccttttgaccccgcggctcccgagaatagctgtgctattgatttggcatttatgactcaggcagcccctgatattaaaagaaaattacaaaagctggaaggatttgctggaatgaacaccagccaacttcttagaaatagcccagaaagtttatgacaatcgagagtttgaaaagcaagaacaggcagcccaggtagctgaaagaactgctgacaaagcatcaaaaagacaggcaaaaatcttagtagccaccatccaggggggcaagaagaaagggcccccatcacaaaacactggccaggggaccccgggtccccaccagaaaggccaaaaaggtgagtgggctcccctacaaagaaaccagtgcatgtattgcaaacagattggacactggaaaaagaaatgcccattaaaaccagaagaaaaaacagaaaagaaaa

SEQ ID NO: 1027 - DNA, 946 bp, Homo sapiens
aaatccctctggagagtgagcgcgctgctccatttttagtttatgtccccttctctacttctgacctgtataattggaaggctcataatccccccttctctgaaaagccccaggtcttgacttcactgatggagtccgtgctctggactcactggcccaccaggaatgactgtcagcaactccttttaacgcttttcacctctgaagagagggaccgtatccgaagagaggccagaaagtattttctcacatcagccggtagaccagaggaggaagcccaggacctccttgaggaggcttttccctctacccggcctgattgggatccaaattcctcaggtgggaagacagctttggatgattttcaccagtatctccttgcgggtatcaagggagccactggaaaacccatgaatctgtccaagacaactgaagttgtccaggggcctgatgagtcaccaggagcgtttctagaatgcctcccagaggcccatcggacttacaccccttttgaccccgcggctcccgagaatagctgtgctattgatttggcatttatgactcaggcagcccctgatattaaaagaaaattataaaagctggaaggatttgctggaatgaacaccagccaacttcttagaaatagcccagaaagtttatgacaatcgagagtttgaaaagcaagaacaggcagcccaggtagctgaaagaactgctgacaaagcatcaaaaagacaggcaaaaatcttagtagccaccatccaggggggcaagaagaaagggcccccatcacaaaacactggccaggggaccccgggtccccaccagaaaggccaaaaaggtgagtgggctcccctacaaagaaaccagtgcatgtattgcaaacagattggacactggaaaaagaaatgcccattaaaaccagaagaaaaaacagaaaagaaaa

SEQ ID NO: 1028 - DNA, 405 bp, Homo sapiens
acttggctctgctctccctcctaaaacccttaaaagaaagggctgagtttgaactttctgcctttcagtcgtggagacaccacagatatttgggctgtaagtcaagaagagagggggggtacttgaggaggcagatcttatgtggcaagaagcattagctatagctgttttcctacttcttctagctataatacttctgttcttccgatactacagcctcccaggctgtgaatatctctgtccgtgctgggtttaatatttctgctgaaaccttgttaattgcctccagaatgggaaactcttcttcccggccccgtagagattggagccctttccaatgtatgttacaatgtacttctctctgggcttctcagaggattacggagtccaccttaaaaaaggcaa

SEQ ID NO: 1029 - DNA, 405 bp, Homo sapiens
acttggctctgctctccctcctaaaacccttaaaagaaagggctgagtttgaactttctgcctttgagtcgtggagacaccacagatatttgggctgtaagtcaagaagagagggggggtccttgaggaggcagatcttatgtggcaagaagcattagctatagctgttttcctacttcttctggctataatacttctgttcttccgatactacagcctcccaggctgtgaatatctctgtccgtgctgggtttaatatttctgctgaaaccttgttaattgcctccagaatgggaaactcttcttcccggccccgtagagattggagccctttccaatgtatgttacaatgtacttctctctgggcttctcagaggattacggagtccaccttaaaaaaggcaa

SEQ ID NO: 1030 - DNA, 8056 bp, Homo sapiens
ccccactgccccctcccccaattatccttccccttccctccaggtctcggaggaccccatcctagccctacctgtctcggcccgcaacctccccgaagccgtcggtgccactcccagcccatgtgggcccccgcgggctgcccacgcctgtcccccagctccccgttccgctgggctttaccctcgccaggggtggctttctgagccgcccgctccgtgcccctctctgcagcctctcctgccactcggggcccccgttccccctcccggcggcggggggctgcccccggggggctggcggagctgggccgcgggggccccggggccggcggtgccggggtcatcgggatgatgcggacgcagtgtctgctggggctgcgcacgttcgtggccttcgccgccaagctctggagcttcttcatttaccttctgcggaggcagatccgcacggtgagccagggtgggcgctggcggtgttggggacgtctggcggtgttggggacatctgtccgtggtgctcaggggttttcggagtgtcgggcctctgtttgggcctaggaagggaatcctggctggggcttttctcgccagagaattgggcaccctaagcggggcgaggtgggagacccttgtaatagaaccttgcccttgggggttttgatggggctagatgggacaggatttggcaactcttgggggctaaggtggtgggtggggcgctctttaagaaagctggagttgttgctaaagaaaccaagaggcggggaacacctgtttgatgacagccggatctgtggatgtgggcttgggaaagaccctatttggaacctcggtgtgtgtttggtcctataacaaggaagagacagacttgtgtgtcaagggtggaggtgggtgggagggcatacgttacaaacaaggacgggaacttgggaaagccctgggtgtgaaggagaaacgcctgcggttcccattaagagaattcctccaaaaaggctgtgaaaatttatttcatagtgtgagtgtaggtatctggatttattgaagactaaagcagatgcttttacgatgggcctctttaattgtgggagggagttcaaggtgggtgctgtgcccaccattgaagtttgggtgtccctgtcagaggacagcgctgggcagttgtagggcttgaaaatgaggacgtttgcttctccaggagagcctagcattctgagggaaactgtccggatggacccaagcatctctgggtcccctctcccttagcttttctccaaggtcagaggtccttcagctaacagcactttaaatgaatgtgctcttgtggtctcaccaccaccagggagaatcctcggaaggagtctggggagaatttagtaagcggagacacaggttctgggtctgtactgtggtctgtaccccttagcatacctcaatacaatttgaaagaataaacccaggttggggtgacctggggtccagagaatttccagaaagccctcagtggtagtggtggttgatttaactgatttgggagaatgggtctggccttgggttcattctgtcctttaccagtctgcttccacttcctgatttagggcgcgaacagtacaggatggttgtggctgtaggcagcagcgctattcccccgagacaagagctaggagccaagaaaaatttagggtcagagatgctgggatatgtgtggggctatctcctggggttttcttttcttttctgagacagtctcgctttgtcgcccaggctggagtgcagtggtgccatctccgctcactgcaacctccacttcctgggttcaagcgattctcctgcttcagcctctcgaatagctgggattacaggcacctgccaccacacctggctaatttttgtaattttagtagaaacgggttttcaccatgttggccaggatggtctcaaactcctgacctcaagtgatctgcccgccttggcctcacaaaagtactgggattgagccactgcacccggcctccagcggttttctttatgggttgactgccatcttctctgacgttctcgctccaacacatcagttttctgggcatacggagtggtgcttcagctcatccacaggttacttccaaaattgctctcctttgggcagcactgaccccatagccttttgtcctcccttcccttccaatctggtttctttccccaccccgcttctggcagatgcttggagcattccctacatgcccagcatatgcaacccgagatagcaaggctggacactggagctctttcggacctcatcatggcccagggagaaaagaagggcagatcttgattagggggagagagccctgtgggtttagaagggagaacctggttctggtgtggcttggggcctaggtatgcactgaagagggtttgtacctttgaagaaaagtgtggaagagggaattgccaggctttgtatggggagatgtgcgtattaggaaatagcccctagagaatgcttggagaagcagagctggatgaggtggtgacgtccttgtcccttattcacctctcacttaacggccctgacttcactctggcctcctccagaccctgccagtcagcctggcaggggctttccagtgttctttgcctcaccctgggtaccaggataaggagactgttcagagggctgaggttctctgaacttgtgacttggctagaagggacagaagtggacaggtggctggttaaaataggcctggtggcttctagccagaggaacttagctgacctgacaacctctggattccctcattctatattcccattaaggacccagggatctcctcccgactcctactccatgtgcactagggaatctgaggcacttagttcccaatgatggtagttgctacaaataattcttggggtgaaggttgcgttgtgggggtcgtttctttgttcagtgtagcaggataatatcacagttaagagggcagcttcggccgggggtggtggctcttgcctgtaatcccagcactttgggaagctgaggcaggtggatcatgaggtcaggagctcaagaccagcctggccaatatggtgaaaccccgtctctactaaaaatacaaaaattagctgggcgtggttcgcgcgcctatagtcccagctgcttaggaggctgaggcaggagaattgcttgaacctgggaggtggaggttgcagtgagctgagatcgcgccactgcactccagcctgggcaatggagtgagactcccttctcaaaaaaaaaaaaaagaaaaaaaaagagggcacgttcttgggttgaactgcattggtacaatcctggctctatcacttcattgattctacttttttttttttttttttttttttttttgcgacggagtcttgctctgtcaccaggctggagtacagtggtgcgatctcggctcactgcaacctctgcctcctgggttcaagccactctgctgcctcagcctcccgagtagctggggctatgggcacgcaccaccacgcccagctaatttttatatttttagtagagacggggtttcaccatgttggccaggatggtctccgtctcttgaccttgtgatccgcctgccttggcctcccaaagtgctgggattacaggcatgagccactgcgcctggctgattctactaatatcaactgaccacttttgctactgtgttctaggcactgggaatacagccatgatctagacaaaatcatattctcatggagttttcattttaattagggagagaaacaacttaagataattcctagctgtgtggcctcagtttctttaaccttaaaacaggtataacagtaatattatggttgttttgaggattaaatgaaaaaggccagcgtagtggctcattcctgtaatcccagcactttgggaggcaaaggcaggaggatcacaaggtcaggagtttgagaccagccaggccaatatagttaaaccccgcctctactagaaatacaaaaatgagccgagcgtggtggtgcacgcctgtagtcccagctattagggaggctgaggcaggagaattgcttgaacctgggaggcggaggttgcagtgagccgagatcatgccgctgcactccagcctgggcaacagagcgagactccatctcaaaaaaaaaaaaaaaagaagaagaaataagcctaaattacatacatagtacctgtggtaaatgttcattatgtgctccctgttactgttactggggaaggcttccttatcaagggtttcaatcctcttttgtgctatttgtaggtaattcagtaccaaactgttcgatatgatatcctccccttatctcctgtgtcccggaatcggctaggtaagtatgtggtgggaagcctcctttagggtgaagtaggggctagctctgggtcagaggtcggtcaatattattcctccccactctggttcagcccaggtgaagaggaagatcctggtgctggatctggatgagacacttattcactcccaccatgatggggtcctgaggcccacagtccggcctggtacgcctcctgacttcatcctcaaggtgtgtggtggtggggagtgatgaaatggttccatctgttcctctgcccaaacctggactccctttcccagtcccagagcatctgtctccatccgctggcaccagtgtcagcctggaggagggaagcagatgggtggggcgttttctaggcctgggttgtggtggtcatgacatcccccagcccatcttgttcctctgtaggtggtaatagacaaacatcctgtccggttttttgtacataagaggccccatgtggatttcttcctggaagtggtgagttttggagagctaaagggagctctgtaatgaaggaatggttttagggctctgggaattgggaggatttggaggaaggggtgaggagaaacgggttagagcagttttctagaggggaggctgtgtaatggtaggggagtggctttcagtacttggggttcatttgttgtgctgatgtaattcttttccgctggcatctttctcttttgttcttgcatttctgaatcataagagtgtaggatgcctaacactgagtttggaggtttgggctgggggttcagaatttcgtgtcctcagagacatttgatgttgatggaaggcctgaaggactatgccattgcctttctgaaagataactgtatgtctaaaggaatcatcaccttgtatggcatcgccctctcccccaatctatttcaggtgagccagtggtacgagctggtggtgtttacagcaagcatggagatctatggctctgctgtggcagataaactggacaatagcagaagcattcttaagaggagatattacagacaggtaagctagaatcccagtctaagagtgtggcttgggagggaggccaccagggagggatctgggtttgaggagagtatcctggagagaggcctgctacatgatcccctgccttccagcactgcactttggagttgggcagctacatcaaggacctctctgtggtccacagtgacctctccagcattgtgatcctggataactccccaggggcttacaggagccatccaggtacgggggaaggtggtgagtctggcaggaccagaacatggttctgagaaggtatttttgcaggagacctgggctttggtccttgagagctgggattccctagattatccctagtttgctgtaagtcgaaatgcaagttatttttgtgtttcaaatgagataccatatatgtccatttcataagtcggatttcttatatcatttttttcatttttaaaatttatttttggctgggcacggtggattatgcttgtaatcccagcactttgggaggccgaggcaggcggatcacgaggtcagaagttcgagaccagcctaacaaacatggtgaaaccccatctctactaaaaatagaaaaaactagccaggcgtggtggcgcacgcctgtaatcccagcaactcgggaggctgaggcaggagaatcgcttgaacccgggaggcggaggttgcagtgagccgagattgcaccattgcactccagcctgggtgacagagcgagacgccgtctcaaaaaaaataaataataaataaataaaaataaaatttatttttatttattttttgagatagggtctcactctgttcccaggctggagtgcagtgtcatgatcatagctcactgcagcctcgatctcccaggctcaagtgatccttctgcctcagcctctcagtagttgggactacaggcgtgcaccaccatgcccagctaatttttttattttttatttttttttgagacagagtctcgcactgtcacccaggctggaatgcagtggcgtgatctcggcttactgcaacctccgacttccaggttcaagcaattctcctgcctcagcctcccaagtagctgggatcacaggcacctgccaccacgcgcagctaattttttgtatttttagtagcgacggagtttcaccacgttggccaggctggtcttgaattcctgacctcgtgattcgtccgctttggcctcccaaagtgctgggattacaggcgtaagccactgcccttggccaattttttgatttttagtagagaagggatctcattatgttgcccaggctggactcaaactcctgagctcaagtgatcctcccacctcggcctctcaaagtgttgggataacaggtgtgagccactgcgcctggccaagtgtgtttcaagtgaggcacaatggcagtaagcttgactagaagcatcaataggtatgagatctggtgattaaaacttagtttcggagcataaaccaggaaagttttacttaggttgttgacttccggtagtgggaggcatatatttttaacaataattcctccttccctccaagaagagaaaaacaccgtctctcttgaattctgtttcttctcatctgcattttcacccaccctagacaatgccatccccatcaaatcctggttcagtgaccccagcgacacagcccttctcaacctgctcccaatgctggatgccctcaggtaagggaagtgggctctggacacttggatatctcaagaaaggaggaggtgggggatcctcagagggaataaaaaaggtttgtcctgttttaactctgttcccttaagaatttaacatttggacccaggtcgtcttacttcaaagctcatcactttagctagtaggctgtgggcaaattgaacctatctaatcatgaatatggtgataatttaggtcccacatctccagtgatgctgccttacaagagtgttgtgagggtatgaactataaggtactctaccaatgcaagttattgtcaccccaggttcaccgctgatgttcgttccgtgctgagccgaaaccttcaccaacatcggctctggtgacagctgctccccctccacctgagttggggtgggggggaaagggagggcgagcccttgggatgccgtctgatgccctgtccaatgtgaggactgcctgggcagggtctgcccctcccacccctctctgccctgggagccctacactccacttgggagtctggatggacacatgggccaggggctctgaagcagcctcactcttaacttcgtgttcacactccatggaaaccccagactgggacacaggcggaagcctaggagagccgaatcagtgtttgtgaagaggcaggactggccagagtgacagacatacggtgatccaggaggctcaaagagaagccaagtcagctttgttgtgatttgattttttttaaaaaactcttgtacaaaactgatctaattcttcactcctgctccaagggctgggctgtgggtgggatactgggattttgggccactggattttccctaaatttgtcccccctttactctccctctatttttctctccttagactccctcagacctgtaaccagctttgtgtcttttttccttttctctcttttaaaccatgcattataactttgaaaccaaag

SEQ ID NO: 1031 - DNA, 1405 bp, Homo sapiens
gggccgtgggggcctccggggccggcggtgccggggtcatccggatggtgcggacgcagtgtctgctgggactgcgcacgttcgtggccttcgctgccaagctctggagcttcttcatttaccttttgcgggggcagatccgcacggtaattcagtaccaaactgttcgatatgatatcctccccttatctcctgtgtcccggaattggctagcccaggtgaggaggaagatcctggtgctggatctggatgagacacttattcactcccaccatgatggggtcctgaggccgcagtccggcctgttaggcctcctgacttcatcctcaaggtggtaatagacaaacattctgtccggttttttgtacgtaagaggccccatgtggatttcttcctggaagtggtgagccagtggtacgagctggtggtgtttacagaaagcatggagatctatggctttgctgtggcaggtaaactggacaatagcagaagcatccttaagaggagatattacagacagcactgcactttgcagttgagcagctacatcaaggacctctctgtggtccacagtgacctctccagcattgtgatcctggataactccctaggggcttacaggagccatccagacaatgccatccccatcaaatcctggttcagtgaccccagcgacacagcccttctcaacctgctcccgatgctggatgccctcaggttcaccgctgacgttcattctgtgctgagccgaaaccttcaccaacatcggctctggtgacagctaatccccctccacttgggttggggtgggggggcgggggggaaagggatggcgagcccttgggatgccatctgatgccctgtccaatgtgaggactgcctgggcagggtctgcccctcccacccctctctgccctgggagccctacactccacttggagtctggatggacacatgggctgggggctctgaagcagcctcactcttaacttcatgttcacactccatggaaaccccagactgggacacaggtggaagcctaggggagccgaatcagtgtttgtgaagaggcaggactggccagagtgacagacgtacggtgatccaggaggctcaaagagaagccaagtcagctttgttgtgattcgattttttaaaaaaactcttgtacaaaactgatctaattcttcactcctgctccaagggctgggctgtgggtgggatactgggattttgggccactggattttccctaaatttttcccctctttactctccttctatttttctctccttagactccctcagacctgtaaccagctttgtgtcttttttcctttcctctcttttaaaccacacattataactttgaaaaaaaaataaattagaaaaaggacagcaaact

SEQ ID NO: 1032 - DNA, 1333 bp, Homo sapiens
gggccgtgggggcctccggggccggcggtgccggggtcatccggatggtgcggacgcagtgtctgctgggactgcgcacgttcgtggccttcgctgccaagctctggagcttcttcatttaccttttgcgggggcagatccgcacggtaattcagtaccaaactgttcgatatgatatcctccccttatctcctgtgtcccggaattggctagcccaggtgaggaggaagatcctggtgctggatctggatgagacacttattcactcccaccatgatggggtcctgaggccgcagtccggcctgttaggcctcctgacttcatcctcaaggtggtaatagacaaacattctgtccggttttttgtacgtaagaggccccatgtggatttcttcctggaagtggtgagccagtggtacgagctggtggtgtttacagaaagcatggagatctatggctttgctgtggcaggtaaactggacaatagcagaagcatccttaagaggagatattacagacagcactgcactttgcagttgagcagctacatcaaggacctctctgtggtccacagtgacctctccagcattgtgatcctggataactccctaggggcttacaggagccatccagacaatgccatccccatcaaatcctggttcagtgaccccagcgacacagcccttctcaacctgctcccgatgctggatgccctcaggttcaccgctgacgttcattctgtgctgagccgaaaccttcaccaacatcggctctggtgacagctaatccccctccacttgggttggggtgggggggcgggggggaaagggatggcgagcccttgggatgccatctgatgccctgtccaatgtgaggactgcctgggcagggtctgcccctcccacccctctctgccctgggagccctacactccacttggagtctggatggacacatgggctgggggctctgaagcagcctcactcttaacttcatgttcacactccatggaaaccccagactgggacacaggtggaagcctaggggagccgaatcagtgtttgtgaagaggcaggactggccagagtgacagacgtacggtgatccaggaggctcaaagagaagccaagtcagctttgttgtgattcgattttttaaaaaaactcttgtacaaaactgatctaattcttcactcctgctccaagggctgggctgtgggtgggatactgggattttgggccactggattttccctaaatttttcccctctttactctccttctatttttctctccttagactccctcagacctgtaaccagctttgtgtctttt

SEQ ID NO: 1033 - DNA, 2295 bp, Homo sapiens
gcgcaaattcgtggatcgctccgctgaatccgcccgcgcgtcgccgccgtcgtcgccgccccccgtcccggcccccctgggttccctcagcccagccctgtccagcccggttcccgggaggatgaagttcgtgtacaaagaagagcatccgttcgagaagcgccgctctgagggcgagaagatccgaaagaaatacccggaccgggtgccggtgaggacagtagccagggccgagggcgcgggacgcttacgctgacgccacagcctggccttggatctgggacaggcagcgcagggatcaggctgctggctgtggtggggttggcagcgagcctgaaactgctgtccttgggacccaggatgaaaggagtggggtagtggtggatgtggggttgagagggatgtggacaggagagagaaaccttagcatttgaggccttagagagtttgacagcctgagcttcaaatggtcatccccccagctagctaaggttgcgagattgaatcactagtcgacccaaacaagtcacctccgtctaagatagttgtttatggtgacgccctattgggggatggatcctggatatttaaatgagctccagtcagtgaggtcaggatctctgggactcagtgctgcaccgcgtgtacaaagacaaagagatgaatctggggtagatttaggtgctaggaatattgtttcttgagttcttgacaggtgcagcttcggggctgcattccttctgtctcctaattttcatctctttatcaggtgatagtagaaaaggctcccaaagctcggataggagacctggacaaaaagaaatacctggtgccttctgatctcacaggtgggaacctgatccaagactcaggcttgcttcctgtgggtgggagtgcagtctctgcgggaggaggctccacctagcagctgttcttttgagggcatttttgacctctgtgactttcttgcatcttgtatcttttgcagttggtcagttctacttcttgatccggaagcgaattcatctccgagctgaggatgccttgtttttctttgtcaacaatgtcattccacccaccagtgccacaatgggtcagctgtaccaggtatggtgactgggaagtggtggaggctttggagaggaatcttggaagagcgtgaggggaagaaagtgttgttacatcagtagttttggactagcttcctggcttgccttaaagtttcataatagccgtgggttgggggtttggacagaacagtaggagtagagagaaggaaagagaacagtgagctagagaaactatctgttcgggactcttcccagtccccctccccattccaaagcagcagaaaacagtttgaggcctttttgcccaggactgcagagattatactgctcgtgtggtaggccttggagtcagtgaaggagtcaggcaatggtttgtggttctagaagaacgtgtctgggtcgtggttggtttaagttactggagcccagttgctgaacagttttctgctttcatcccaggaacaccatgaagaagacttctttctctacattgcctacagtgacgaaagtgtctacggtctgtgaagctgctgcccctgagctggaggggggtctcattctacaaagagagaggtggcccccctttcttgacctcctcctccttcaagctcaaacaccacctcccttattcaggaccggcacttcttaatgtttgtggctttctctccagcctctcttaggaggggtaatggtggagttggcatcttgtaactctcctttctcctttcttcccctttctctgcccgcctttcccatcctgctgtagacttcttgattgtcagtctgtgtcacatccagtgattgttttggtttctgttccctttctgactgcccaaggggctcagaaccccagcaatcccttcctttcactaccttcttttttgggggtagttggaagggactgaaattgtggggggaaggtaggaggcacatcaataaagaggaaaccaccaagctgaactgaattttgccttgtgttgctcccctcgtcccgctgattttaagtctttccaaggtgtcagtgggtttcagtggtggggaaagaagagtactgggtacaagctggagggatagaagtatattttggtttattctgttcatgttgggcttttccctgtctgcaaaaagagggtgcttttgttgtgatggaatggaatactgaggattatttcttgaaactttagttttataacacgcatgtgaaactaaatgttaaaaatgctca

SEQ ID NO: 1034 - DNA, 286 bp, Homo sapiens
gtcctttggacggtaaaatggcgcctgtcagagtgggaaacccagctgcagaggctgcagccccggtccccagcggctaaaggacccccgagctcggggagggggaggccgctccggcccagcgctctgcgccctccggctccccctccccctccttccctgctccttcgctctgcaggcccgttctccgctgccgcggccctttgcgcgccgctgcccccgccctccccgttcctgcgagcagccccctagcgcgcctgcgcagcgggccactctctgctttccc

SEQ ID NO: 1035 - DNA, 274 bp, Homo sapiens
ctgccccctcccccaattatccttccccttccctcctggtctcggaggaccccatcctagcccgacctgtctcggcccgcaacttccccgaaggcgtcggtgccactcccagtccatgtgggcccccgcgggctgcccacgcctgtcccccagctccccattccgctgggctttcccctcgccaggggtggctttctgagccgcccgctccgtgcccctctctgcattctctcctgccacttggggcccccgttccccctcccttcggcggggg

SEQ ID NO: 1036 - DNA, 274 bp, Homo sapiens
ctgccccctcccccaattatccttccccttccctcctggtctcggaggaccccatcctagcccgacctgtctcggcccgcaacttccccgaaggcgtcggtgccactcccagtccatgtgggcccccgcgggctgcccacgcctgtcccccagctccccattccgctgggctttcccctcgccaggggtggctttatgagccgcccgctccgtgcccctctctgcattctctcctgccacttggggcccccgttccccctcccttcggcggggg

SEQ ID NO: 1037 - DNA, 1857 bp, Homo sapiens
gcagacgtggtagaaagacagtaagagaggaacaactagaagtggagcccgaagatgtgactgaactgctgcaatctcatgataagacttgaatggatgaagagttacttaagtggtttcatgagatggaatctactgctggtgaagttgctgtgaacattgttgaaatgacagcaaaggatttagaatattacataaacttggttgggcagagtttgagaggattgactccaattttgaaagaagttctgctgcgggtaaaatgctgtcacacagcatcacatgctacagagaaatctttcatgaagagtcaatcaatgagacaaacttcattgttgtcttatttcaataaattggcacagccactctagccttcagcaaccactgatcactcagttcagcagccatcaacatcaagacaagaccctctaccagcaaaatgattacaacttgctgaagggctcaggtgatcattagcgttttttagcaataaagtatttttagatataatgctattacatgcataatagactagagtacagtatagtgtaaacctaccttttatgtacactggggaaccaaaaaattgtgtaacttgctttattgtgatacttgctttattgtggtagtctggaacagatcctgcagtatccccaaggtatgcctgtatctcagtatagtcgtgatcataggtcttgcttttctttagattcactgttggtgttatcatccatgaatttcaccttcctgtgtacaaacatctcttattacagtaggagaatatgggagtcagaaaaggaagacatttattgtcattatgaactcagaaatatgttttctagtgatcattgaaacaactgagattgatattttccagccacggcagttttggtgattgaaagcaagatctgttttttaaaaattaaatataagtttgcacattcttccagggaagggcacgggataatttcccttgccattttattttgaaaccagctttgttgtggtggcacgctccatgagatttgctccatgagatttgctccatgttgcaccacacacagtctttgctcctgtgtccttccatagaaaaaaacagtgtggggaaggatttggtttgtcttaccctttaatcttctgctcctacagctctctggtctgatagttcactattttggtaataaagtcagatatagttcaaatcctgtctggtctattatttcgtgaaatttttgaacttttccatgctttggcatcctccaagaactttttcctttctaagttttactgttttaatataaatggactcctatgtgaacacttttagactggagtctaaaagtggcctaataggcttgctatttttagagaaggagaaagttgccttttgttctctctgtgcttttcacctcccacatgttctttagagttttttttcctgttctggtcttagtagtgacagctttctaattccagaggctttttcctgggtctgtttctggctcattttgtctcatactcaaaatttttaatgtcagaattgggctgggctcttctctttctattatctgtaaacattttgggtttcttttcctctaatttatgaaaattatgaaatgtacacataaaggagtggaaaatatattcacccagtttaaagaagagtaataaaatggacattcgtatatacccaccatccaggttgagaaatagaacattgcttgtgtctcagaagctctctgtgttcctctcagtcacgttcccccaccccaactcctacccaaggtaacctctcatcctgaagcttacatggaagatttgggcatttttattaaaaaaaaaaaaaagaaagaaaaa

SEQ ID NO: 1038 - DNA, 6193 bp, Homo sapiens
agaaacagcagcagtcgtgcagtatcatccacagcctgagagagagtcagcagcaagagctgagccggtttctgaacccgcccagcatcgagaccacccagcccagtgaggacacgaatgccaacagtcaggacaacagcatgcaacctgaggtatgggcacgaggcgtcctctgtcccaggacactctgtgggcttctttcttttaataaaaataaataaaatgggtgctggtcagatcattcaaacaaggtgacaatatttctaataggaatattttcattaaaaaaaaaaaaggcaacggaaatccattgatccagattatgtctatgtctttgccatcttggatgcagttgaggttatttaaaaagagtctgactcatatgaatgccaaaaaaagtgaatgccctgaacttcataattctgtagttttatttttgtctaaagagttaacatcagctctaagggctgcatttgaatctgggtatattacatggagtatggtttacaggaagctctgccctaaatattttcctcccttctctaaagtcatagaaatttgcagtaaaatcagtgaaaatgtttgtaattagctttcaacctccttaaataatcagactcattgaagatatatcctttcctggttgggtatcagaagaacatatggaattcaggacaattggcttgaggagtttctatttattaagtcacagcatattttcattttcaaactctatgtatgtgtctatataaaaaagtacaaggagttatcagcgtcctggagagtcctgtgctgtgagaagcagctggctgggaggacctgcccctttatgaggcagcaattacgatttgaggttaacaacgtggagctgatcccgtgctctgtgcagagcccccagcagcaccaggctccatggtgtgcagcaacgcagccaggggccagagtacctttggaagcctaaggctccacggcccagcagggtgctccaggaggcccactggtgccatagctcagttttcagtagatctcatgttttgggctccccagcctttagaaatcatctgccaccgactgcagggacttctgcggagttagtcaaccaaggggcaaggggaggcatctgcagtggccttgccactggtcaccctgaagatggttggcaatgtctcgcatgggagagggaggcaggctgaagtcaggacagacagtgagacagggctaatgaggttggggaaagtgatgatttcagagccctctgtttttagatgaaaaagcctaagaaagaaagaggtgacaaaaaaaaaaaaaaaaggatactaaagagatgtgaagaccaaggcttttgttaggaaagggagaggtgacaggtgaacctgagaacaggtgaaatgtgtgggaagtcttggcatctctctttctttcactgtagcttagattgttatcagctccatcctccaccagggcccatcatacagctttgcctgcagagaactctttccctgaagctctaagtgtggatctccaggctggtgacagtagactgcccccgcccagcccgtccccactgccccaccttccttcctgcagttccccttccttaccccctggtttgccagcgaagatatgaagggaaacaatgacattctcaggcatggaggggaacgaaccatgggggttacccaggacaagatgtcccagaaagagtggtgtgtccttcagcagggcgtgcagtggtggctcttattcttctgtaacccttaatacccattttcacttttccccattgtggacactctgagtccatgttgttcttcccacttgtcctcctgccatgtgttttcctttcttatagtaaaaggaggagagcgcagggttaaaaagacggtaactgtgtgcttctcctcccatgcagacaagcagccagcagcagctcctgagccccacgctgtcggatcgaggaggaagtcggcaagatgcagccgacgcagggaaaccccagaggaaatttgggcagtggcgtctgccctcaggtaggtccatccaggcatttctccagcgatcgaggcattttaaaggtatttactctgtttgtgtgttttgggtcttgcctttcaaaatgcaagtctgcatctacagttgtttacagacagcaacataatgaaaaatgtagtcttgtcaaaaacattgtcccccaaaataacttctctaaatatgacttacattagcccccattttccgggtacatttcaggctatcatggttgagaagccagcacctatgaaaaagacaagattcagcaagagggagaaatttccaagggctttctgtgtgcctcaaggcatgctcaaacatgggcaaaagtattcaactgaagagggagtgggcagatgcaatcattcagaaaatgccacgaagttctcaaaaaagggacaggcccccgatttctctcagcacactttgcagctgagccggtcactggctttaggcaagctgctttacctccatacaataacaaacaacaacaacaaacacttacgtagtactcactgtatgccagtcactcttctaagtgcattacttgtgttctctcattcaatcctttaataaacagtcccattattttccatattttactgattcagtaagagaattttcttctatgagcttcttctctatagggttttggaaagccaggataatcccattaagagcactcaggaatggagggagagcaatgctccccacagcccagtgtccttgtacatgtttttttctatagataactaagttcatgctaaagcaggagctttataatgctctttaactgtgccccaacttcagcccaattgaaaggagaagatgtgtagcatatgtgttccacaaagcagatgacagcacagcttacattttgaggctgacgatgttcagtgggtcttcactgggactaccaccaaggaaagtatcccctttcatatccaggaacttatttttcagagatcagagaagatctaggttcctcctgattcaaacacagcagagaatgacagcatcaagacaacgtagatggtggtgccaggtcataaattacaagctgagtcggttcaattttatcctgtaggcaattaggagctagcaaagatttctgagcagtatgtgacttttggaatctgtgctttaggaagttgacttggcagcaaaggagggaattgtctatgacagagcctggaggcaggttacaagctggaggaagttaccgtggtgtgagcacaaggcaacaaaggcatggacagagctgggggccagatactgcagggacagataggagaggtgacctggggagaatgcacagtccttggtattcatttaaatggacaaaagaaatgatgctgtcaaaagtacttccattgggccaggcgcagtggctcacccctgtaatcccagcactttgggaggccgaggcaggtggatcatttgaggcctggagttcaagaccagcctggtcaacatggtgaaaccctgtctctactaaaaatacaaaaattagctgaccggtagtggtgtgcacctgtaatcccagctgcttgggaggctgaggcaggagaatcacttgagcctgggaagcagaggttgtggtgaaccaagattgtgccgctgcactcctgtctgggtgagagagtgagaacctgtctcccaaaaaaaaaaaaaaaaaaaaaaaaaaaaaagtacttccactggtccatgcctaggtggtccccaccaaaaacggtgatcgtgaaatagacatgctcttggggtcaggctgagtttgaggaggcagaggagaagaaaaatagtattttgagggggcagcaacaatgtcacaggtgtcatgctatgcactttcctaagtcatctcatgtaacctgttttaatcctgacaatagtctaattaggacattttcattgtcttcatcttacaatggaggaaacttgggttcagagacgtgaagttgcccatagctacatatccacaggttgcagaggtgggtcccaacaccatgactgtgaggccccagaaccacacctttcctcccataccctcactgcatcccccctcgcctttactgtgggtcacactctccttcctttttgttttttttattgcatatgctaatgaatgcacaggtttctgtgacacttaatagttcccgaattggaatttttttagtgattttctagtttttttaattatttcaaaatgaaaggggtgagcagcacgtttttttcccaaatgacatcattagttgtccatgagcacaattaaaaaaaaaatctatcgtgaacataaagaatcaagtcctgaaaaggatgtttacttagcatctgtggctaggacacgttagccaaaagtatcactgatgggaatatcatgggtttttaggagtgattacaatagggtgaagcaataccaagtggctcataggactcattaattccacagccccaaaaccaataagccattcagtgtcctcagtcaacttacggtttggaggaaggacaaccatgaaatctgtcgtgtgcaaaatgaaccccatgactgacgcggcttcctgcggttctgaagttaagaagtggtggacccggcagctgactgtggagagcgacgaaagtggggatgaccttctggatatttaggtggatgtcaatgtagatgaatttctagtggtggaaaccgttttctaataatgtccttgattgtccagtgagcaatctgtaattgatctataactgaattccagcttgtcacaagatgtttataaattgattttcatcctgccacagaaaggcataagctgcatgtatgatgggttactatcaatcattgctcaaaaaaatttttgtataatgacagtactgataatattagaaatgataccgcaagcaaatgtatatcacttaaaaatgtcatatattctgtctgcgtaaactaaggtatatattcatatgtgctctaatgcagtattatcaccgccccgcaaaagagtgctaagcccaaagtggctgatatttagggtacaggggttatagctttagttcacatctttcccatttccactagaaatatttctcttgagagaatttattatttatgattgatctgaaaaggtcagcactgaacttatgctaaaatgatagtagttttacaaactacagattctgaattttaaaaagtatcttctttttctcgtgttatatttttaaatatacacaagacatttggtgaccagaacaagttgatttctgtcctcagttatgttaatgaaactgttgcctccttctaagaaaattgtgtgtgcaagcaccaggcaaagaaatggactcaggatgcttagcggtttaaaacaaacctgtagataaatcacttgagtgacatagttgcgcaaagatgttaagtttcttaagaaaccttttaataactgagtttagcaaaaagaataaaactatatagctcaatttatttaaaaaaatctttgcatgtgtgatgttatcattggcttcatttcttacccaaggtatgtctgttttgccataaatcagcagagtcatttcattctgggtgatcctaacacaccattgctacgttagatttgaaatgacatctctgttaaaagaatcttctatggaaataatggtgccctgcaaaatcttcctttgaactcacaggttagggatcacacaacttacttaatcgttttttgtttttgttttttttccttatatgtcaatggcccatgtcctccgggaaaattagaaaagcaaaatgattacaaagtgctgttagatttcttgtgctgggccagccaagtagaagtggacttgacttggacctttaactattttattacagattggacatttgctgttcagatgttttttaacagagggattatctcagaatcctgtgacctccaggttgttttataatctatttttctctatttaacattcctcagatagataggcaaataggacattccttctgtgtcacagaagtatcgtggtagtggcagtctacagtttatatgattcattgtaactatgagataaagaacaaccagtcatgtggccaaaaggattagatttgatttgatgttcacttggagtttactttttgtacatacaagataaaataaatattggatttgtaaaataa

SEQ ID NO: 1039 - DNA, 336 bp, Homo sapiens
ctctattttttttttttttttttttttttttttgagacggagtcttgctctgtcacccaggctggagtgcagtggcacgatctcggctcactgcaagctccacctcccgggttcacaccattctcctgcctcagcctcccaattagctgggactacaggtgcccgccaccatgcccagctaatttttttgtatttttagtagagacggggtttcaccatgttagccaggatggtctcgatctcctgacctcgtgatccacccgcctcggcctcccaaagtgctgggattacaggcgtgagccaccgtgcccggcccactctattcttaatggtact

SEQ ID NO: 1040 - DNA, 3602 bp, Homo sapiens
gaaggttagaggatttgccctctgaccttggcccagccacttcccccctgtggagcggggttctcaccctgctttttccctggctctgatggagcctttgggctgcagtcgtgcttgagatgaatggccctgcccccgtatcccttcctccatgagctgctgcggcccacctagttgtgacacctggtggtggtcttgtaattgcccacggcttttccctctcctctggactctggcctcctccctccctctgtggccctagcacctggcagatgcattggatgggcagcaggcactcagaacatgtttttataatgaattcctcaaccaagggaactaagggacttgctgtttccttactgtcacctgggattctttttgctgttttctactttctgattgcttttcttcctgctaattcagtttcatcttctcttttcagatgaagctactaaacttatacataaagagggcccagaccaccaacagcaacagcagctcctcctccgatgtctccacgcacagctaatggcagtacctgtctcttgtgtagacctagaagcaatcggtggtgcctctcagagacctttccccacccccttcatcggctgcccagtcagtacaaggaggcccacaaatatttattacaatcagtattttggtcccttccagcttttctgtagaatcttactggtattgaatgtaaaggaagcaaggcctgtattgcagtcttcatacaaaacaaaaggaataagaacagaaaagagccatactgaaacatgtcttgtacagcctgctgagatggcgaaaccctgtgtgtggggtgcagtttttaaaaatcagagcgctctagccactacttggtagaaagtagcattttttttttcagttaataacatatttgggggtggggtggggtgttactttgtgttcttcctccttagcctattttcttgtgcgtatggtctgtgtggggcccctttcacagctgacaccacgaaaggtgatatatctttaagttgtgttctgagacctactaaaaatgggaatcaagtcttggcaagaacagtctgaagatggccttttaacaaacgctgggaattttgcttgtcatatccagactggaggccgactgccctggctttcagcgtagaattgggagtgcaccctgacagtctccttccagctctccctaatcgactccaccgacaaggtccctaccccagagcttccatgcaaaggaattcttcaagtttaaatctggacacaaaaataagataaatgtatggcatcatttagggatgcctgagatggcagttcatgaagcacagaagataaagaagaagtctttcatctttactgctgagatccttgggaacactgttgtcatgggggctctgccaagaccctcatctctgggctacacggtgattcagattgagcaccaacttgtttcctcccctcaaagttctgcctaagccgttcagttctaacatggtctcagttaatctggtaaatggcatctttaccatcttagttctgacttctcagtttaatgtgggattaagagccaagaaaagcctagagagactggatatcacaattttttttaattttataaactgaagtagttccttgaatgtctgttgatgaaatagtcactgtttaaggaaaaaagtaattatgaggtgtagcagattgcagaaaaacaggattagaaacacacttaaaaagaacacacatttagagtctctcttcctcctcagcgaaccactaggccccctttttaaaaacacctttagagcctaattactccaataaaagtaactagaggtttggagtctggttaaataaattctgagtaaaattcttaagccaaatggaaattcttaatgcaatcatgaggacttctattgtctcttactgttgtattagatcctataaattgaactgatttttccataaggaaaatgcttcttttgagattaattctaataacgtatttgctattgcagtgcagagcccaccgcaactgctaggactgaaagcagaggctgggtgccagagcacgtgattcttaacatcatttccacagacccctctgccctgaccctctgcattggatgcaggaagctgggaaagactgatgttgatttggaaacatgggctgaaaatgaaggccccatagtgcataggaacagtaaagccagggtgctgacgtgtgtgtgtgtgtgtgtgtgtgtgtgtgtgtgtgtgtggtgttgtgtgtgtttgtgcgtgcaccctacacatgtgtggtacctcactgctgctgtttagggaacttgagggacgcgtttcaaggggttgggtattactgacgagctttggctcaaaatatagcaggaccaggtcttttgttgataagtactgtttgtttattaatatgtcattaatggtatttcttttttacactctacaagtgaattagggagtctcttgttgacccctttgttgcaggaatgtgcgtcgggctaggttatccatgagtttctttattcctaatgcagttagaaagacctttctccttgagctctttgactcccagaaggtaccccagtccccagtgtacttagaaaggatctcgaacattgctggacgtcctcatagtactcacaaagggctagccttgaatgtcactcgcccagtcttcagtctcctgacttagagatacaatcacgtcacaggtctcttggcctcaatctgaaaactgctgccgccgcgccgaggagactcgcatgccgccaccacctcactgggagggcgccgagcccaccgtcgccccctagaccctgacagctgcagctgccttgccttgccgccgcctccctgcaggcccctgttccaatgaaaaacagaacacaaaagagcagagcacctaagcctgtctctgcctccctgtctaccggactggccagggcccaagacccccgctgctccactgcggggctgggcgggctgactccctgcttcctccaagctgctgcctcccctgcagccagggtctgggcagggtgcagccggtcctcggggcacgcagcttccttcaagtacactgtgtgtgcttcccggacctgcggcgatgcacgggcctgccttttctatgcgcctcactagcttaccaccctgtgcaggtaatgcaactgactttgtctcatcagtctttttctttccctgccaccctttatttatcaagcgtaatgttacactttaaaggacagcaaataagaactttgtagaatcccaccaggactttgctaacaataatgtttggaaataaagaagtgctctgaaacaaatatcagccccaccaaaatagttatgttggcactgtgttcacacgcatgtccccacaccccagcgttgggtgcgtctttttgctttttgcccttttccggggcgggcggcctcttcatgttacatccatatctgtatttatatcttatttgtctcactttcaagtgtatcatggcaaatgtacagatttttttgttaataatgtgctaggatttgctaaaaaagaaaaaaaaaaaacccttttgagtttgccctagaataaatga

SEQ ID NO: 1041 - DNA, 651 bp, Homo sapiens
gcattctgggaggccaaggcgggcggattacttgagctcaggagtttaagaccagcctgggcgacgtggcaaaaccccgtctccactaaaaatacaaaaattagctgggtgtggtggtgtgtctgtaattccagctacccaggaagctgaggtgggagaatcgcttgagcccaggaggcagaggctgcaatgagccgagatcatgccactgcactccagcctgggtgacagagtgatactccatctgaaaaatatatatattaatatacatttttttaaaaaggtcaatctggggaaatatcacatctgatggagtcgcctgggagctggttgctgtgccgtgtgtgcggtgacaaggtgggaggtgagacgcatgggctagaatcccacccacgctcctggaggccatgtgagcaggggcctccctcatcggctccatttcctcaactgatcagtgagaacagtggctccccggaaaggtagaagcaggagaaagcctcagcctcgaatcccgagatgagctggagagccgctgagagcagccgggctcccctgcatgcctgcggttcttctctgctggtcactggggactggagcaggctaggcagggcaagagcagagcctctgggagcaaatgcacaacatcacagg

SEQ ID NO: 1042 - DNA, 1933 bp, Homo sapiens
ccggtgagtgtgtaactcttgggaagattcttttctaaatacaggtataaagagaaggtggagggtgcgggtgcatggaagaaatactatgtgtgaagcagattcaccttcctgggaccggtgacatggtggtgacagtcaatggcttggacagacagacgggcacagtggcatttggaaccctctttggtgccctcccattctctctggaattgtttcaagtctgctggttttcaaacaagaaaagacctttctggccatagggagaatagcagggagtctatgttttggtggttacattggaaacatcttaagcaagatagggaaagttgattttaggcacacatgtaccctccttgacagcaggaactcagacttcaatcttgggggtctaagaccagaatattttccttctgccagaaaagaatcttgcacatatactcctgaaggcatgagtgtgtggtccatggcaagaaatagctaaaggctgctttccaggacccaaagccccatttaatgcaagaaccagagaagtgttctaggccattagtggacaatgtcatgtttggagaaagataacaacacaaataatgtaacctttccttaaaaggcagaactcaatccattttatttgatgcttattctaaccctaaccctgggtcacctggaatgaagaactctatgaataatatttgattttacaacgtgttatggttatgtgaaaactaaacatttgccttttataaagactgacaaaatataaatctttattctaaccctatccccaaaactagccaggccacaccccagatgttcttattgactattggaaagatagaaaaggcgttgtgttttttgtttttttgttgttgttgtcattgttgtttttttcagaagaccagtgtctcagttctgtcttagtagtaccacacccgtaaccgtgttttaaaagtttgttttagcctagagacagatcatacgagttcaacaatgtacagtgtgattgaaaagacaggttggtgtctatttttctttttaaaatatctgaatgtgtatttgtaatacgtaaaggtaaaaaaaaatagtgccaaaaatgtgcaaggcatctcattacagctcatgtacgtctgtttttataagatcaatattaaaacccattgggattaaatatttttgaataggatacactcttgagaaactcgagaatggactgagccttcctacaagccactctttgtttttaaaacagtggggaaatacgtttacagagattgtgagcttcagagaatgcatgtgatggtgtgtattacatgctaattcatataagctgtatctgtcagctaccaccctgtgctttaaaaatgcacacactcaaccctctttagcttggagctcagctttttgcttttttttttttttttttgtagaattatttagctaacataagtattctgattgctacctgatggccattcttacttagtttcatagatgtgctttaactatgatcctttgaagctcaccccttggagagcctacagaacctcaggctgatagctttgaagactgccaaacagcccagaaggaagcaaagcatctgcataatcaggagggttgtataacaagtagtgatttggcaaatatgtgggtagctttaggctgaggcacgggcctcaggcaaaaatgcccttcgagtgaatccgaagggcatgatcttcctatgtccttgactaggcatgacgagtcatttgaggtcagatattatttgagttgttcagcacccccaaaggtaggcattctcctgggaaattttcatttccattttatcgccaaacaaaataaaaagcaaaacaaactttctaagctagaataatgaaattaagtcattttccactttgtatatattgatgctaataaaacagatgaaaaagac

SEQ ID NO: 1043 - DNA, 269 bp, Homo sapiens
gacactctttcaatgatgaaagagcgtgtaatttatgctacaagtgccagaatcgatcaccatgttcagcaagccactctcaagctgtggtaataaacacacaggcttgggaggcaccagcggccccactcatacagtgacaaggatttgtgatgggaaaaaggaggtgccatgtttggaaatgcaggggtgagctctggtttctcctggggttctggaatatctcagccctcaaaatagaggagactcaagtgcactgattctctaaa

SEQ ID NO: 1044 - DNA, 176 bp, Homo sapiens
gtggcagcatcacctccacggctctttcaagctgccctgttcacacagctttcttcagagagcagcccactcctgaggcactggatgggattgtcctggctgaaaccagagacacagccctgcccttggaaacagaggagaaaacaccttgattctgggacctatggtagcagtgg

SEQ ID NO: 1045 - DNA, 2883 bp, Homo sapiens
tggaactgtccctcctaggggggaatgttcactttttttttgtcaggttttatgggggggcaggaacatggtttctggaaaaaatcccattcttttggaattggcccattccttttgggcaaaattttcaaaaggctggatcaacttggtgtggtatctctgatggcttagagtaatggcaatgagggtctctgttgtgatgtcactgagtactttctggggtgcttctgggcaccccttatgatgtcacaggaagcagttcctcagaggttacttcctgtgaacataagggagcaggtacttcctgtgatgtctcaatgagttcttccttgaaggtcactttggtgatatcatgggaaggtgtacttccggtgatgcctagaggtcacgtcctgtgatgtcattaggctgaagcatgtacttcctgtattggacagtgaccagtctctgacctgccttctccctccacacccttctttggtgggtgttggcctgggggtcttcctaggaagagaataaggcacgggacttggatccaatctggaggactctaacggaaaaaaaccaatattgtcagggtcatctccattcaaacacgtcaagtctgcgaactcgccctggagggaggggtgggagatggacctagtgcaaactactgttaaagacctcccttcccacccctgccttttgtgtgcatgcctgtgtctgcgtggctttgtttcattgaatcgggtgagccaagtgtgtggtggctctgtcaggccagtatggccaggtgtagagttcagtgagccatagtagggtcccttgggccagaatgcttcgtgtggtctgataggttagattggtttggtggcttccagcaagctggcatacttcggtgatgtctgatggatcagaatgttttggtgtgctcaccaggggctctggagaactagaatgttctgatggagtctgacaagccaggcggccttgagagttggtttaggagtggctccctgagtgctgtggctgtggtcagctctaaggacctgttggcagactgagatttcagggcctgacaaccatgtagactaggatagctgagacctccctctacccccacccatctccctctcttccttggagaccacctccactttctccaacccaaagcagggcgcccagtgccctggttccatcatcagcatctctgggggaggggcgccccatgcccaccctctcccccatttgtccgcctcctaggtcttccaaacccttttcttctctatgactttgggggaaatccagcctccttgtctctctcctaaaaaaggagggaagaaaagccacagagacaattcctgcccctaaagcctaggagatccctctcccttgctagagagccacccccaaatcaaaatgtgaaaatccctagaaagcaatagccttcgaggtaccttgcactgaatttcccaccccagcccttccacccgatgggaggctgtaacttgggcactggggtgactttttccatgcccttgtcatctccagggtgggaggcaggccccacttcccctcccctatcccccacttcccattgttgttgccccacccctaatctccagactgaacccagatggagatctgagtgccaaaacaattcttgatgtaactttgtacatatcttctactaccgttgggggctcttggggttagaggtgggggcggctctgtgggccattgctcccctccacctctcaaaagaccttacagtatttcacagtatctctacccgcacgcgagtattacagtatctagctggaatatccccctacagccccccaggaccctatgaggaagggaaggagccagggagagtgaagtaaggtctgggactggggaggtgggatctgaatgaactcatttgcatatcatttgcatcctccgcttggcagccgctttctacaaactcattcactggagtctgggtcccaatcagccgggtccaggactcctctcacacagacacatctccggaggctgggcctcctgaaaagtgtttgcttggggtgtctgtgtaacaacccctccctattcatatttcttggggaccccctacccagccagccagggtgatctgaaaggtatactttgctagctcagtgagctagttcactcaccatgttggtgagcagagagccacacctttccccattttaccttgggaaactcactccaccatctttgccatctcttgaaagtcccttctgcaatctgacctcaatcttttgtgctgcagtttgtccagaggggacacagatgtggggtcagggatgaggattattgaaaaacccatcatctctttttttttccccgtctccctattagccaatccgatctcagagtctctgagtggcctccttgcacccttctcttcagcacccagtaggtgcttaataagtgtttgctgcattggattatctccctattccttctcatttgccctctagcttcccataccttctccaagtgtcttcctccctttctttgtctggctccctatgactttctatttttttttcctccgtgtggttcccattgttttctgtcctgtctctatcttagtctttgtctgtcttcctcctttcctcaaatgtctcaactctctctccccaatttccccatttaaaaaaaaaaaaaagtgccaaacttccttggaactgagccgctctggggggagaggaccttggatagaggggaggaaatgggaccatttctctttgaggaggtccctaagaggcattgcaaaagtgtggacatggagctaaattgggtcccccttccacagccctcccaccctgagtttttcttagaatctttgtaagaaaaaaaaaaaaagac

SEQ ID NO: 1046 - DNA, 350 bp, Homo sapiens
caacttacccctatccttttgggtccccccaaattccaccagccaaggagaatcccacttgccaacttcctggcaaatctatggaaactggggaggaggagacaagctcaactcctcctctgctagcccaaggggcggtaccaactggattcaagagaaggacctcaaagctcctatgagaagagggggttcgatgtgccaaattaacctccttcatcccccatctcagggggctctgagccaacctgcccagccaccttcttctgccctgtcccagccacctctacatgggcaaggaggcttcactgcaataattagtaggggtggtgatcagaagacaatgattttgc

SEQ ID NO: 1047 - DNA, 555 bp, Homo sapiens
ctggggaaggggggcaagacgttggtggagtaccaggagctgacgggcgctcgcatccagatctccaagaagggcgagttcctgccaggcacgcggaaccggcgggtcaccatcacgggcagccccgcggccacgcaagccgctcaatacctcatcagtcagcgggtcacctacgagcagggagtgagggcctcaaacccccagaaagtgggatgaggcctgtggtgtgtgctcccacccttttctctcctcccatctcctcctcttccctctcctcctcccccccaactcctgacctcagcttggtgtagtcctgctcctcttgggatggggctggggtaggcccgactgcaccctccccttctggtagtcataggcaggattgagtgacggttgggaagggggctcagaagccccctccccagcccggaactgacccctccttcctccctccctgtgcttggctgggcctgacccttcctgtcccagggcccaggtctgtgtgatatctgtatatattgcattttgttgattttaatagaaaacaaagcgtta

SEQ ID NO: 1048 - DNA, 4243 bp, Homo sapiens
gaagatgatgagaagcttattgaggaaatccagaaggaggctgaagaggaacagaaaagaaagaatggaggcaagtgcccctccccaggcccccaggacagagcagcagccaggccatgcaggcttctgctggcctccctgagtgtcctggcactcaacccagcacaggagaggagggggtgctgtccctcaggtggctatagacctgacttcacccacgcggccacatctcaggcttatggaaaggccttcaacgccttgaatatagttttggcatctccttgatggtgaggaagtcccaaggggtgggtttgagctcaggaatcaatcaagccacacctggctaaagaaaagtagacccagctgatccttctgaggctgaaaagcagtgaagccaggtgtgttggcacacatctgcgatcccagctcctcaggaggcagaggtgggagcatcactggatcccaggaggttggggctagcctgggcaaaatagcaagaccccatctgtttttctttaaaaaaaagaggctaagtgcagtggctcacatctgcaatcccagcactcgggagggtgaggcaggtggatcagttgagcccaggagtttgagaccagcccgggcaacatggcaaaaccccatctattaaaaaaaaaaaaaaaagtaactgagtcactgaggtggcccatcaaggccctggctctgaaggatgtctggctgggtgggtggacgtgccaccttccaaggtgccactgtggagcaagacactggtggaagtacagatttgttcttggtttcttgcagtggcatttgggaggtgtccacgttttgtgctttgatcagcatgtggagccactcccgtgtccagaggtcgctgccctggtcccaggctagattccattgaggttggtttaatgtttttctccactaatccccacatccctttcagagaacaccttcaaacgcattggacccccgctggagaagcctgtggagaaggtgcagagggtggaggccctcccgaggcccgttccgcagaacctgccacagccacagatgccaccctatgccttcgcgcacccacccttccccctgcctcccgtgcggcctgtgttcaacaacttcccactcaacatggggcctatcccagccccgtacgtgccccctctgcccaacgtgcgggtcaactatgacttcggtcccatccacatgcccctggagcacaacctgcccatgcactttggcccccagccgcggcatcgcttctgatggccccgaatccccattgagcagcacaaagcccgtttggggtaggagtgtggatggagaaccctcccccaaggctggtgtctgtaccattgcatcctaagtcagcttgaagggtaggctggttttcttcccacccctttcctagaagggctactgctcctggaagagtggacggatccataataaagacgtcccaaatggtggagttcggagagagctgcgatgtgaactgcccctcccctcgcatcccccaggccaccaacggcagtccttctgccttgtccatggcataggccatagaccaggtccctgctgctcacacctgggcctctcctcggagccgacccctgggtagcaaggcagccgagagcatctccctggaggggcccacggttgggccaagggcagagggggctgcacctgcgggcctgggaagcattgctcagggtggggggctgggaccatggcccgcagaggcactgccacagctgtgagggccaagatgctgtccccccatccaaaacccgtgcgccactgcagtgagtgttgagggcacctctcctcccctcttacacctactcagatgaggcagcagcagacccatctcgcggcgggggttttgttctgttgccgcctaactttctcatcctcggtctctggaaagtcaggctgagaaatcctttcccaggccaggccgctgcggtacactggatggttctgaagctggcccattgaaagagcctcttaaggcagctgggacagaggcctggtggccctgctgggcagcccaactgctgggggagacgtttctgccaccctgggtgatgagcagcttttcccccctggctttctgggggaggagtgggcctccttagggagacaggtgaccctgggtgccacccctgccccgtgtgtgccccgggtgttctcagtggttgctgaaggcaggtagagggtgctgtccagtatcccccatgtgaaggtcacttcccttctcatggagtcagctgagcatcagctcagccctgccatgtccccactcaccctcctcgcctcctgtccggccctgggtttctagcggtgcctgaggcatcactctggcccattgacagatgagaggtctgaagccttcctggccacaggcatcactttctcctcctcctcatgccctgccttgtccttgtcgtgttgccatggggttctgagaggctgggagttcacagacctcagacacagctgagtccgacaaccattggggtggggctgcatcagtctccggagtggcccgccacctcctgaagcagggcctggcccacccaaggtgcctggggcaggcgggcaccgtcattcgctgccattggcttctcagatgtatttcaaggactaaagtgggctctaagatctaagatggcccggcgcggtggctcccgcctgtaatcccagcactttgggaggccgaggcgggcggatgagttgaggtcgggagtttgagtccccgtctctactaaaaatacaaaattagccggacaaggtggcgcatgcctataatcccaggtactcaggaggctgaggcaggagaatcacttgaacctgggaggcagaggttgcagtgagccaagattgtgccactgcactccagcctgagcaacaaaagcaaaactctatctttaaaaaaaaaaaaaaaaaaactaagatacccattctttctgcctttgcccaggatggaggctttgaagacaggtggtcacctggacctggggtaagggtgcgcagggaggccgggcttgggggcagcctgctgctatgtccttgctggcgcccatacctgttggactgcctgaactttgctactagcctgaacgacagtgccttggaaaggcaggctccatgcggcagcaacaggattgtcttcggtaccttaaatatgctccctgtgcttccccagggaggatctctgggagcagagggcggctgtagacatcacagctgaagaggtgacctcaggccctgggagcctcagctccctctgccctgtaccctaggcacgtggctccagcaagagccccaggcaggacaaagggagcaggcagcagctgcagaaacagccctagacaggtgctggcctcaaccctggcaggggagggggagcccagagtgatgtttctcctaaggccaaaccccaggggtgggtcatttgagaggagttccagctgttctggccacactgggctggtggggaaggagcggcggcctctttccttggagggtccctgattcctgaggatcctccccgagccaggcacgggggaccacagggctgccgtgagcacccaccctggttctccaggcccctctgtccagaggcagggcctgaacctcgggctcctgcctggaccagtgacagcattggggagagaagcactgggggtcttcagaccagccagcaaggggccgtgccagtgcccagagagcaggtcagacaacaggcaaccctgaggcagctggctccctctctctgccctgcagggcttgccgcagggcgtgaggctccccagccacagccccctcttacttgccttaaaactggagagaggaatctagtatttgcacttagcaaaatatttaaaaactgaaaaaaatgtgcatgatctgtcactttgtataaaaacaagaaacgattagttcattaaactttttctttaccttctggtagtaaaaatagataaaataattccgtttcaactactgtgtgtaaaaagcctgtatcatatgtaactgggacttttgtaaataaatgtttgtgcgctctgctccctccagcttcgtctctccaccccgccatccggcaagttacaggggccgccgacagattcgtccaagtgattgggtctaaaccagcatcctcacctccccgactgggtcctggcaggagcaggcccggaaggcccagtagtaagatccccaccactcccctgcc

SEQ ID NO: 1049 - DNA, 3461 bp, Homo sapiens
tggtttcttgcagtggcatttgggaggtgtccacgttttgtgctttgatcagcatgtggagccactcccgtgtccagaggtcgctgccctggtcccaggctagattccattgaggttggtttaatgtttttctccactaatccccacatccctttcagagaacaccttcaaacgcattggacccccgctggagaagcctgtggagaaggtgcagagggtggaggccctcccgaggcccgttccgcagaacctgccacagccacagatgccaccctatgccttcgcgcacccacccttccccctgcctcccgtgcggcctgtgttcaacaacttcccactcaacatggggcctatcccagccccgtacgtgccccctctgcccaacgtgcgggtcaactatgacttcggtcccatccacatgcccctggagcacaacctgcccatgcactttggcccccagccgcggcatcgcttctgatggccccgaatccccattgagcagcacaaagcccgtttggggtaggagtgtggatggagaaccctcccccaaggctggtgtctgtaccattgcatcctaagtcagcttgaagggtaggctggttttcttcccacccctttcctagaagggctactgctcctggaagagtggacggatccataataaagacgtcccaaatggtggagttcggagagagctgcgatgtgaactgcccctcccctcgcatcccccaggccaccaacggcagtccttctgccttgtccatggcataggccatagaccaggtccctgctgctcacacctgggcctctcctcggagccgacccctgggtagcaaggcagccgagagcatctccctggaggggcccacggttgggccaagggcagagggggctgcacctgcgggcctgggaagcattgctcagggtggggggctgggaccatggcccgcagaggcactgccacagctgtgagggccaagatgctgtccccccatccaaaacccgtgcgccactgcagtgagtgttgagggcacctctcctcccctcttacacctactcagatgaggcagcagcagacccatctcgcggcgggggttttgttctgttgccgcctaactttctcatcctcggtctctggaaagtcaggctgagaaatcctttcccaggccaggccgctgcggtacactggatggttctgaagctggcccattgaaagagcctcttaaggcagctgggacagaggcctggtgcgcctgctgggcagcccaactgctgggggagacgtttctgccaccctgggtgatgagcagcttttcccccctggctttctggaggaggagtgggcctccttagggagacaggtgaccctgggtgccacccctgccccgtgtgtgccccgggtgttctcagtggttgctgaaggcaggtagagggtgctgtccagtatcccccatgtgaaggtcacttcccttctcatggagtcagctgagcatcagctcagccctgccatgtccccactcaccctcctcgcctcctgtccggccctgggtttctagccgtgcctgaggcatcactctggcccattgacagatgagaggtctgaagccttcctggccacaggcatcactttctcctcctcctcatgccctgccttgtccttgtcgtgttgccatggggttctgagaggctgggagttcacagacctcagacacagctgagtccgacaaccattggggtggggctgcatcagtctccggagtggcccgccacctcctgaagcagggcctggcccacccaaggtgcctggggcaggcgggcaccgtcattcgctgccattggcttctcagatgtatttcaaggactaaagtgggctctaagatctaagatggcccggcgcggtggctcccgcctgtaatcccagcactttgggaggccgaggcaggcggatgagttgaggtcgggagtttgagtccccgtctctactaaaaatacaaaattagccggacaaggtggcgcatgcctataatcccaggtgctcaggaggctgaggcaggagaatcacttgaacctgggaggcagaggttgcagtgagccaagattgtgccactgcactccagcctgagcaacaaaagcaaaactctatctttaaaaaaaaaaaaaaaaaaaaaaagatctaagatacccattctttctgcctttgcccaggatggaggctttgaagacaggtggtcacctggacctggggtaagggtgcgcagggaggccgggcttgggggcagcctgctgctacgtccttgctggcgcccatacctgttggactgcctgaactttgctactagcctgaacgacagtgccttggaaaggcaggctccatgcggcagcaacaggattgtcttcggtaccttaaatatgctccctgtgcttccccagggaggatctctgggagcagagggcggctgtagacatcacagctgaagaggtgacctcaggccctgggagcctcagctccctctgccctgtaccctaggcacgtggctccagcaagagccccaggcaggacaaagggagcaggcagcagctgcagaaacagccctagacaggtgctggcctcaaccctggcaggggagggggagcccagagtgatgtttctcctaaggccaaaccccaggggtgggtcatttgagaggagttccagctgttctggccacactgggctggtggggaaggagcggcggcctctttccttggagggtccctgattcctgaggatcctccccgagccaggcacgggggaccacagggctgccgtgagcacccaccctggttctccaggcccctctgtccagaggcagggcctgaacctcgggctcctgcctggaccagtgacagcattggggagagaagcactgggggtcttctgaccagccagcaaggggccgtgccagtgcccagagagcaggtcagacaacaggcaaccctgaggcagctggctccctctctctgccctgcagggcttgcgcagggcgtgaggctccccagccacagccccctcttacttgccttaaaactggagagaggaatctagtatttgcacttagcaaaatatttaaaaactgaaaaaaatgtgcatgatctgtcactttgtataaaaacaagaaacgattagttcattaaactttttctttaccttctggtagtaaaaatagataaaataattccgtttcaactactgtgtgtaaaaagcctgtatcatatgtaactgggacttttgtaaataaatgtttgtgcgctctgctccctccagcttcgtctctccaccccgccatccggcaagttacaggggccgccgacagattcgtccaagtgattgggtctaaaccagcatcctcacctccccgactgggtcctggcaggagcaggcccggaaggcccagtagtaagatccccaccactcccctgcc

SEQ ID NO: 1050 - DNA, 344 bp, Homo sapiens
tttcaggctgtgcccactcagacccagccctctccaaacccttctcatatccaccacttgcacgcagctcagtgcatggaggccctccatccccccacctcaccaggcagctgcctgccatgctcagacccctctgcccagccttgtggatggcctccttgtggaacgccatcaggctgatgaaggaaggaggccttcggggaaataggaaggaacggtgtgcagcccaggccccactggccagcagcaggcttcgggcttgttccatggccataagcaacaagcggcctcctcactgtcccacggggcctcagcactgcatgaagctacaggttcatccttct

SEQ ID NO: 1051 - DNA, 195 bp, Homo sapiens
ccaagttcaagcgatcctcctgcctcagcctcccgagtagctgggattacaggcgtgtaccaccacgcctggctaattttttgtacctttagtagagacagggtttcaccatgttggcgaggctggtctcaaactcctgaccttgtgatctgcccgtctcggcctcccaaagtgctgggattacaggcgtgaggc

SEQ ID NO: 1052 - DNA, 1899 bp, Homo sapiens
ctattaatgactgtataaaaactgggatctagaacttttaatttgggggaagtgaatatcgctttttagctataaactatacatccttaaaggtgatatttaagtttaaggtgatgtgtttaaaaaattattaaacttccatgtctacttatgatagaagacataacaactcaacaaataccctaaccacaccatccatctgcagatagaacatcatcagcaacattgaaataccccatgtgctctctgcttcctaatctcagcgccctcctgtcctccatgatgaatgtttctcttgaaatttactttgttgtctttctttcacttttctgtgtcgttttaccattacatgcattattcctaaagtcgttctttttgttggattttgcttgctttcaaattttatgaaaatggcagcaaaatgtttatattcttctgccacttgctttttttcatttaatattgttttgaagatctatgcatactgatgcacactgatcatattttcagtgttgtactaattacagtttatgactattccacaatttgttcatccatttattccctcatttttgtgtatttggtttgttggaagatttcctggctttttttttctattatcaactgggctgccacatatgtctttatgcctgtttcatgataaatacgtgcaagaggccaggctatgcaaagtgccagctttacaagatcatgagcagctgttttgctacgtggtattgccagtttagactcacacaagtggtaaagaagcatccccagtgtcctaaatccttgccaacacttagtgtcaccaggcttcttaatttttaccaatctggccagtggataatagcattgaaaagttatttttattgtgatttggagtccaatattttttctgtaagaaatgcatgtacaatgttataagaacatgcaaaaatcaaaatactttataaatgttcactttataaaaaatgaatgagaaaaacataatgcattttacataaagaaaatctgtaatgcttttgttattggctgggtattttcacaccttccaagtggtggctgttgataaattcagcaataatacctttatgtttattaatattaaatgataatgtcgaattaattaaatgaagttcaatttattgatagttattcattatatcctgctgttctaactcatcctggaagagaatagagtgaaagagaaattgcctttatatataaatgactcatagaatttcatatactgacctaaatagatttcattgcaaaggtattatagaggtaataacacagtaactcttaggactgttttgagattttcacaatttgaaaaatccttttagatccttggttgacaaatgccctggctgtgctaattatatgacatttcctgacactagtgacgtggcatggcctctcccggcttacattatagattgttttctgcccccatgggatctgatttgttaaggctcattttctattttaatgtggtggaagaattttagaaaccctagaaccccactttcaccctccactgaaacaaatagaagcagtgtattagtcagttttctcactgttatgaagaaatacctgagactgggtaatttatgaagaaaagaggttgaattggctcatggttccacagctgtacaggaagcatggcaacatctgcctctggagaggcctcaggaaacttttactcatggtgggaggcaaagtgggagcaggtgtcttatgtgacagaagcaggaccaagagagagacgggggaggtgctacacactttttttaaaacagagtctcactctgtcccccaggctggagtgcagtgatgtgatctcggttcgctgcaaccttcgcctcccaggttcaagcatttctcatggct

SEQ ID NO: 1053 - DNA, 225 bp, Homo sapiens
agtaggtttaaattcctaatggcagctgatcacagggattacattcaccccagtccctcagccttggcaagtgctggtcccaggaatccaggcttggccataccacaacagttgccatcagcctcccctacatcaagtggaggaccagcagctcagaccctcactctcacataaatgtatacaggttttactggtgaattatacctcaataaaactgcgggaaaa

SEQ ID NO: 1054 - DNA, 2115 bp, Homo sapiens
  misc_feature (2006)..(2006): n equals a,t,g, or c
ccaggtagccccatcccacacactttccactagtgcctatattgggatgaatcttctggcaatcttccttaaaacttcaagagacctctttaagattctgtagttgggtgagcctgtctgtgcccagggtagcctgaagttaaggtgagggcttaacagtggtaccaggcagtttggatcccaactagctagctgtccttgggcaaatgactactttcctactactgttacttcttgtttctattttctcctctgtaaactgtgggtaatgaaaatgttgcgcaaaggtagggtgggtgagtgacagctacaggctcactgttcctgaaaactgcaattcgaaattccacagccccctgaaaataaaaagtctttcagtgaatgttcagcaaactcccttggtggcaaaactgacttgaattaacatgaggctatttatgatattttgtaaatctcagttagtgagactagttgtacattttactgtagaaatatccatgtgtttgatttcagagtactaccctgaaaatacccaggtatttggaagcatagaatatatgaattaaatgacttttttaaaaaattgtggtaaaatacatataacacaacatttactatcttgaccacttttaagggtacagttcaatagtgtttgtatattcacattgttgtgcaaccaatctccagaattctttttacttattaaactgaaactctgtacctatcagacaactccccgttttcccctttccccagcccctggcaaccaccatttgactttccaaatttcttttagaattgcaaaaattccaaattccaaaacacatctggcctcacaagcatttcagataagggattgggaaacttaattagggaaggggaatgcctaacatttgatagagtcaccacctttcgagatgatcctggaagagggagttcttccaatcttacaggggcctgtcaaccacagcacactgcttcccaacatcgatgcccttttgtaaaagatggcacagtaacaagaacaagggccattagattctgaccagagcaaacagaacgcaggtacttgcatgggatgtttgataccttccccttcttttctgtcattcccttgatctcagtttttctcagtaagtagaagtgcacatgttggcagctggttctggcatctactttttatttccattccagggaccatgatggaggatgcttttacagtgaaaaggcatgaaaacctttatgcagactgaactcatggggaagatgctgacagtctgtttagaacttgctggaagccattgaaggccagatttatccattttgcagaactctctaggaatcttcagaaaagcagtagggcttaccctgctgttccccagcagatcacagtatggagaccggttctgagtcatgctccctataactggaataacacagggaattcttcacatgtttcataatgtgtgtgagtgaaaggacaacccagacttgttattgaaaaacccgacagtggtcaggcatcattattggaatgtcttctccacactgcccattctgtaaacatcctggggaaatgtcgaggttactttctgtgtgaggcttgtgctttcttttcctgtttgtaaataccagggatgaaagtggatgccttcagaattggaagcccatgaacacaaaaattctgcagaatacaaaaccctctgatggaccactcctgataaatataaaataaccttagtaccagaacttctacttttgggttatggaaaatatgccaagaattttatgttttaaaaacaaactacaggctgggcgtggtggctcacgcctgtaatctcagcattttgggaggccaagccaggtggatcaactgaggtcaggagttcgagaccagcctggccaatatggtgaaaccccatcactactaaaaatacaaaaattagccaggcatggtggtatacgcatgtgttcccagctacttgggaggctgaggcaggagaatngcttgaacccgggaggcagagtttgcagtgagccgagatcgcaccgttgcaccacagcctgggtgacaagagtgagactctgtgtcaaaaaaaaagaaaaaaaaaaaac

SEQ ID NO: 1055 - DNA, 2115 bp, Homo sapiens
ccaggtagccccatcccacacactttccactagtgcctatattgggatgaatcttctggcaatcttccttaaaacttcaagagacctctttaagattctgtagttgggtgagcctgtctgtgcccagggtagcctgaagttaaggtgagggcttaacagtggtaccaggcagtttggatcccaactagctagctgtccttgggcaaatgactactttcctactactgttacttcttgtttctattttctcctctgtaaactgtgggtaatgaaaatgttgcgcaaaggtagggtgggtgagtgacagctacaggctcactgttcctgaaaactgcaattcgaaattccacagccccctgaaaataaaaagtctttcagtgaatgttcagcaaactcccttggtggcaaaactgacttgaattaacatgaggctatttatgatattttgtaaatctcagttagtgagactagttgtacattttactgtagaaatatccatgtgtttgatttcagagtactaccctgaaaatacccaggtatttggaagcatagaatatatgaattaaatgacttttttaaaaaattgtggtaaaatacatataacacaacatttactatcttgaccacttttaagggtacagttcaatagtgtttgtatattcacattgttgtgcaaccaatctccagaattctttttacttattaaactgaaactctgtacctatcagacaactccccgttttcccctttccccagcccctggcaaccaccatttgactttccaaatttcttttagaattgcaaaaattccaaattccaaaacacatctggcctcacaagcatttcagataagggattgggaaacttaattagggaaggggaatgcctaacatttgatagagtcaccacctttcgagatgatcctggaagagggagttcttccaatcttacaggggcctgtcaaccacagcacactgcttcccaacatcgatgcccttttgtaaaagatggcacagtaacaagaacaagggccattagattctgaccagagcaaacagaacgcaggtacttgcatgggatgtttgataccttccccttcttttctgtcattcccttgatctcagtttttctcagtaagtagaagtgcacatgttggcagctggttctggcatctactttttatttccattccagggaccatgatggaggatgcttttacagtgaaaaggcatgaaaacctttatgcagactgaactcatggggaagatgctgacagtctgtttagaacttgctggaagccattgaaggccagatttatccattttgcagaactctctaggaatcttcagaaaagcagtagggcttaccctgctgttccccagcagatcacagtatggagaccggttctgagtcatgctccctataactggaataacacagggaattcttcacatgtttcataatgtgtgtgagtgaaaggacaacccagacttgttattgaaaaacccgacagtggtcaggcatcattattggaatgtcttctccacactgcccattctgtaaacatcctggggaaatgtcgaggttactttctgtgtgaggcttgtgctttcttttcctgtttgtaaataccagggatgaaagtggatgccttcagaattggaagcccatgaacacaaaaattctgcagaatacaaaaccctctgatggaccactcctgataaatataaaataaccttagtaccagaacttctacttttgggttatggaaaatatgccaagaattttatgttttaaaaacaaactacaggctgggcgtggtggctcacgcctgtaatctcagcattttgggaggccaagccaggtggatcaactgaggtcaggagttcgagaccagcctggccaatatggtgaaaccccatcactactaaaaatacaaaaattagccaggcatggtggtatacgcatgtgttcccagctacttgggaggctgaggcaggagaattgcttgaacccgggaggcagagtttgcagtgagccgagatcgcaccgttgcaccacagcctgggtgacaagagtgagactctgtgtcaaaaaaaaagaaaaaaaaaaaac

SEQ ID NO: 1056 - DNA, 1736 bp, Homo sapiens
tgataaacaactgattgcccagggaccagtgaagaatcttgatgataaaactcctacttgtagtgaaagaatcatgggatcttttgcattttcttacatcaaaaacgaccttgaactgaaagctctctttaaaaaacaaacaaacaaacaacaacaacaaaaaacccaccctaccctgcatactatcacctgctaaactacccagtgtcagaaggacaacttcagagatgctgtggtggcagctgatagtgcctgacatttagtgagtgctcagcacgtgccgggcgttgttctgaatgcttcatgtggattagttcatttccccttccagcagccctgtgagctcaatactgttattatttacatcccacaggtaaagggaaactggggcacagtaggttgaaaaataacggaaattgagtttgtttgaaaaattttaaggctaaaagccttcagtcttatctaatcacatctatcttttgatttcgggttggatttttcttttgggaatcagtcaaaacccactgtgggttattaagagtagaagatgacttataaagggataatgaggatagcctccttttgctgggaagacagaatttttcattccaaattctaatctccagtgtcaccttgcatgtccatttctggatttatattttgtattttagtatttatatcccatgtttcatttgactctgggatacaagcaattgtcagatgcaccattattttccagaccactaagaaaggaaaaaaaaaacctaccgattaaactgtgacacaccattgattgtaagacacaccctgattggtgaggtgtaaaaatgggggaaagtggctctcttagaatgaaatatcttagaatgaatttgtgtgagtcaggggcaggtgaaagtcattttgcaggattctaatggcttctccatacacctctctccgaagaaagaaaggacttggggtgttttgctgactcctggcagcattcttggcccaatgtattctgggtttgctcttccccgttggagagccctttgccagagaacagccactggcttgttgagccaggaagcttaccatgtgagtgcagcttgtgtctgaagaggctgggccagtacagataatacgaatcacatttcactggctttttgatcggctgtttagctcctggcagcttgttcccagcattcatgtttgctgtgagtaggaaacacaaagaacctcgtcttcagaacgagaaagacttggggctggattctagctgtgcccgtggctggcttagtgctcatgattgtggccctgtgcagaccactttgcctccctcagtctcagtttccccatctatcaaaacggatattcattcctgccttgaatgtgttatgtaataatgattaaggaaaataaaatgcaagtgttgaagttgatacaggatctttatttcattccagaaaactctgtaaagtttcctcatttaaaaattccttccttctgtggccgggtgtggtggctcacactgtgatcccagcagtttgggaggccgaggcaggcagatcacttaaggtcaggagttcgagaccagcctggccaacatagtaaaaccctgtctctacaaaaaatacaaaaattagtcggacatactgtcttgaacccaggaggcagaggtttcagtgagctgagattgtgccgctgcactccagcctaggcaacagagcgagactctgtctcaaaaaaaaaaa

SEQ ID NO: 1057 - DNA, 404 bp, Homo sapiens
gggcaaagcctgacggaatggcagggtggggaagcagttgctgcctctcttgagttgcaacccatcagccatttatggtttttgtaggactaattgattcacgcctggtgccattcttccattcataaacatccttgactgctgcagatgagtcctgcaaaacactccagcctccatttattagtttgttctttcattcattcattcaggaaaggggtatgacaagcctcctctgtgctagactctgttagctgctaaggaggtaaaagtagcatctacactcaagctctccccagcacgaagaatgcatttatgttccaacatcaattctctgactgcagctgctgtcctattcagttatgacacacctagtgttagtgtagaccccacaagctaagagttca

SEQ ID NO: 1058 - DNA, 104 bp, Homo sapiens
ccagcactttgggaggccgaggcaggtggatcacttgaggtcaggggttcaagaccagcctggccaacatggtgaaatcctgtctctactaaaaatacaaaaat

SEQ ID NO: 1059 - DNA, 43056 bp, Homo sapiens
aaaatggcggctgccactgtggggcttctgccggccggtagtccctggcgctgctgacccagcatcggcttttctacgtcttgaacctggattcgcctaggggttgggaagggctgtggacggcgttgggggaggcctgacgaggcaagtgagggcgggagaaaggagcgagcctcgggctggggaaggcggcgtcattggccctccgggagcacggggccccgactccgacccggtctcccccgaggactcgcccccgccgcttcggctgcgactgtcccggtcgttcccggcagaagtggtcagcgagggaaagagaagtgacttctccatgggtttcaagctcccagctgttttgcggcagcccgtacggttccctcccgggatcttcttccctcctttctgcttccctctgcttcccctttcatctcttggcgctggaagagttaaaccgacgccagctttagctccttggcttcgtggctacggcgttcttagcctcccctgctcgggctcttcccgtcgttttgggttgagagaccacgaggttgctaagctctggacaccgcttaggcgtccttttagttcttcgactccagagacctttcggttgtttgtaccacactgtactaaaagggtcttgggccttcgcgccctcccgccatcgccctccagcgcttccactatcactgcgaagttctaattcttttttgacttcgtactattttacgtgctctttagaaaagaagaggtcagattgaaccccggcaagtctggcttcctgtgaccaggcgaacctgagctatcatttatacccatcccctaatttttaattttacaacccctttaacccctttcttttttctttctttttttttttttttaataaagacggggtttcactatgttgcccaggccggtgtcgaactcctgggctcaagagatcctcccattttggcctgtgctgggattccaggcgtgagccaccatgcccggccttgcaaccccagtatgaaactggggctctccctcaactgaccgagaagagccttccccactcagtgagctccagggctaacccaaactcctctgttttcccttggattttgcttagttcaccttagttgtcatcaacatgcacggtaattattttttatttttgagaaggaatctcgctctgtcgcccaggctggagtgcagtggcacgattctcggctcactgcaacctctgcctcccgggttcaagtgattctcctgcctcagactcccgagtagctgggactacaggcgcgcaccaccacgcccacctatttttgtagctttagtagagacagggtttcaccttgttggccaggattatccgcctgcctcggcctcccaaagttctgggattacaggcgtgagccaccgcgcctggccgatttattatttgagaccgggtctcgctctgtccacccaggctggagtgcagtggtgccatctcagctcactgcaacttccgcctcctgggctcaagtaatcctcccacctcagcctcccaagtagctggggtcaccagcgcagccaccgcgcccggctacttttttgtgtttttagtagagaaggggttttgtcatattgcccaggctggtctggaactcctgagctcaagtgatctgccctcctcggcctcccaaagtgttgagattaaaggcgcaagccactgcgcccggcaacatgcacgattattattaagagggcaagtaactgtgagatatttgcgatgaagtagtatctgtcaaaaccagtgctctgaaggaatttatgatatgatgaggcttcattccttcttgcagtacccatttatgctgccttgaccactgaagttggtattggatatacaaagatgatcacttttactcctctatacattgaacatccattcaacaaatactttatgtgcctcctttataacaaaataactaactttgcctagggcaacaaaaaggctttataaaggagtaaatatgtgagctgggtcatatagcatcaaaaggaatttgctgagctcaaaaggagaaggtaatttcgggattcagtacaggaatacagagctttgagaagctttagcatacttagggagagtgggataatcaacctgcctgagcatttagtgcacgagtgattggtgaagcaagaggtaggttaagatcagcttgtgaaggatcttggtttccaatagggagtttagatttttttcagtagttaccaggaatccagtggatattttgtgcaaggagtgagcaggaggatatttgtttttttaggatggtctctgacagctatatggaggatcaactgggaacagaaaaactagatgaaaggaaatgggcaatcattcaggtaaggcaatgagggcctccatggaggcaggacataaaggaggtcagagagacactaagtaaatgtcaaatgggattcacctgctgactgctaagttaatggtaagaaggtgacttgagtttttagtctgggagagtaaatggttggcaatactattaaaacttagtctgagacatgtacataaacataggatggtgccaacctgcactttaggggtgacaacatgatgctctatagtgtaaagcattggtttttatggtctggagtctagatctgcactgttatggtagtcactagccacatgtagctattgagcacttcagatgtcgttagtctatttgaaatgtgctgtaaatataaaatacacagtggattttgaagatttaatatgaaaatgtaaaatattcaacatgattacatgttgaaataatattttggttctattgggttaaataaaattcattaaaattcacccgtttctttttcacttttccatgtggccatgaagaaattaaaaagtacatttgtggcacgcattatatgtctgttgacagagctgttctagtctagactagatgtgggaatttgtaaggaggtggaacatgagctgggcctgaagacattgagcagtgatgtcagggtggcttcctggcaacctccattgccagttaaggcatttggtttgtcttttctcaagcagtaagaagccttcagagatttctgagcaaggggtaataggtgcagggtatttctgaagatgaatctggtagcaatgtttaggttggatgaagggaggaaatactggaggcagagaaactgagaaacccaaacataaggtagtgaggcccttcctgtattagggtactggcagtgggatagaaagggaatgatgtgcaaagcgttcctgagggaagaataatcaggaactggtaataatagactgtcccagaagtgaagaatcagcatgtagcatttcaaaccttggttacttagataacaactaatatattcatgtcgcagagctataaaatacaatttgagactgaagaaatttggtcacaagatagaatcagtaacgttaggaaggggtggtccactaaatactttcgctttttatctccctgctttctgtatcatctcatcaatcatacacaccagctaatatccccaaaatacagaattacctgtatcatgccatctttctacttgataatgagtcttaaaatgtttctgttgcctgcaggactaggttcacagtttccaaggcctttcactatctggcccctttctgttcattaggccttatcttttattttttgcttttgtgaatgttttccaggctagttttttcactggtactttaaaacttactcaaaagtgtagagatctgagatgtctggtattcctttactcctgttactcctctgttttgagtaccttctctttgtttctacccatgtcttaccaatccttagtgagtaatcttaaatcccacctcttctatgattctcaataacataaggtaatgtcaacttaaaaaaaaacttcctaaatatttttatgtcttttattatctgttatgtaagcttaagattcctaaaattaatgacagatctcttttttaaaaaaggaccacgtattatactacttgctgctgctcctgatgccttagggcaagatacaaattaaacaccataattataaacagaatgaaatcataataccacattcataaggcttttatttattttttagattaataaagaactcttcagaattcctggtgtttcatcatatatacgactaagatatcagtaagtagtgaatgtttgataaagatatagctttattatgaataattgtagtgaaaatatcttttcatctgttgaaatcttggtctgtctgcaaaacagttttaatatgaacttactcagttctagctgcaagataccttgcatgttacttcataatctaaatgaagaaagtgggaattaaggaagacttaagtagaaaagagtttcccttaggccattaatataattgtggtacagtaagctttttgacagggataatttccaaggtcctttccaaaattgtatttataaacgtttttcatcaaatagagaattaatgtctttgtaccccaaataagaacacatgaaggccaggcgtgctgtctcacacctgtaattccagcatttggggaggccaaggtgggtggatcacttgagcccaggagttaaagaccagcctgggcaacatagtgaaaccctgtctctacaaaaaattagccgagtgtggtggtgcgtgcccgtagtcccagctacccaggaggctgaggtgggaggatcacttgagcccaggaggttgaagctgcaaatgagccatgattgcaccactgcactccagcctgggtaccagagcaagatcctgtttcaggaaacaaaaacaagtcaatatattttaaattttaacttaccaacagttatttattgaacaaccactatgtgcagggatgtgctaatgtactaaggataaaaaaatggatcaagccaactcctgtactcagagagctctcccaagcaagggcaaatacatgtggatgggttctggtttatggtgtggtaaggacagtgagcttatttaatactagccatgccccattccttcctttaagaaacatttatcggctaccactgtatattaggcactgtggaggcgctggaatgtaactgtgatgaaaacagagaaggtctttaccttcatggagtctgcattccagtgtgggcacaggaggggagaaggtgacagacaaagcaagtaaataaataagtagcaattagagagcactaagtattttgagggaaatagaatgatgttgtaatggatgtgaagaaggactttagggtggtcagagaatgactacctctgagaatgactcagaataaattagagacagggaaaatatatataaaagttagaggttttggtcacagtgaagagagaagaaaatttgagaaatataatgagttgttatgaaagtatatcactggaagtgttttataaaggtcattgataaacctctatacaacttaagccaatggacatttctctggcttctcagacttagtgcaaatgggaggtgaggaagtggagatatatctgtggacaaatattctgagaacttttgctgtgaaagggaaacccaaaaatgatgtagtggttgttgggggttgaagggttaagagagggttcttataagttgggaaattctagagtatttttataagcttgtgggaatggtacatcagtgatacgttgatgcaggggaaagagcgaatgactgaagatgtcaagtctttcagaaggtgaataagaatgggatcaacggcacacatagagggattggccttggatgggagcaggactattctatacaacaggagacccaacagtgtacatgcagataggttaatagatgtagtatctggaaaatgagaaattattgtctaattttattttctgattgaagaatgaaatgagattatcagctgagactagggtggagggagggatgggtgatctttgaacaaagaggaggaggtgtggagtagtagtctcagaaactgaaagtcaacctactaagaaaagtcagattgaagggtaatacttacggcctgtttgaggcctttggccatgaatttaaagagcaaatagcgttagccaggtgtggtggcaggtgcctgtaatcccagctactcgggaggctgaggcaggagaaatacttgaacccaggaggtggaggttgcagtgagctgagatcttgccactgtataccagcctgggtgacaagagtgaaactctgtctcaaaaaaaaaagaaaaaaaatgggccaggtggatcatgaggtcaagagatcgagactattgtggccaacatggtgaaactccgtctctaccaaaaagaattagctgggcgtggtggtgcatgcctgtagtcccagctactcaggtggctgaggcaggagaatcacttgaacccgggagatggaggtggcagtgagccaagatcgtgacactgcactccagcctggcaacagagtgagactccgtctcaaaaaaaagcaaatagcacagctgtaattctcctccatatcccatccccccgccggccctgcatgattggagttaatcaggactggggttttgccagcctagtagagagaagtacctagaggagcaagacatttgagtgtttgcaaataatgttaacagatcatgaattgaaggtgaggacctgagtaaaaacaggagggggtcatggatagggaaaaagtagtcagcgaattagagagataccactgaccccagaggatttttgcaatgggaatactagagtaagtaaggtgttagagaatgagatgcttgaagtgaaattttgaaagtagaacagttactggtagtgataaggtctagggtgtaatcgtagtggtgggtggctgaagtgaaatgattattggagttgaggaagtcaaggaaccaacaggtcagtattgaagttactgagaggaacaacgggtcatgtaaaagtcctcagtgaatgaggccaggtgaatagatgccatagtgaagaggaaatgtggaagactaatagtgaactgctgggtggcaagagctttaatgggactagactatttgaaagaggaaagagaagacatggtttagaagctgcagtgaggagcaaggaacacatacctcctgcttttcaagtacagggggtacaagaagttaaaacaacaacaacaaaaaaccttgagaaggccgtaagaggaagagtatgatgagggaacagccaggtacctgggaagacaagcaggtgaagagaattttcagagaagcagttgcagttacaggtgagtatgatcacagttccagagagcatcctgaaaggatttgagagggagaagaggtaggggattaggtcttactgggagacgtacacatcgttgataattgataacctagcagtcttgtgattttggctgtcactcagataaacaaggctgggagatgtggtgggtttagcagcccctgtcagcctcttatgaaaggtggatattcagtttaccttagtttgttgatggccttgagtagtggtaagaaattattaggtaactcggtggccttctctcctacttgcatagttagccaggaaaagctcatttattttagggagctaaaatctgaaatgttgctgtggagttgaactttgctaatgaatattttcataacttctgcttaatagcacacagttccaggttctaaatcccatttttaaaaaatgtatatattttattttatttattttttagatacaaagtctcactttgttgcccagtctagggtacactctagggtctcactctgtgcccagtctagtggcgcactcatagctcacagtaacctcggactcctgggctcaagcaattctctcatcttggccttctgagtagctaggactacaggtacatgccaccagccagttttcttatattttttttttgtagagacagggtctcactacattgcctaggctggtctcaaactcctgaactctagcagtcttcctgcctcggcttcccaaagtgctgggatcacaggcgtgagccaccgtgcctggcctgtagatgtgttcatgttatattttcctgaaatatatgtagtaggcatcccaatttgcatttcatcagatatatgttgaagcgtgcatcaggttctatttagggagttgcaaacatatgccacctatgtttttcagttgctcacattccaatgcaagggttcttaatgttaaactccctgaaaagtttgtgaatttctacgtgtatatgtactcttgttttttgtttgagtgtgttgagagttggtgggggagggggagggtccataggtttttatcagattctcaaggggatctatttaaggaccactggtctaattaatgggagagaaagacatgtaaactaatcattgtaatacagtgaaatcagtgccatcacaaagcaagataaaagaggaagagattcaccttgaaggatgagttcattaattcctaaacatttatttattgaggaacttggatgcagtagtatctgttataggtaatttatacattatttgaaatacttcaacattgtttttacatgtatactaatactaatgttttatagactgagatacataggtgaggaaagtttaattaacttgcttcaaatcacatagaagtagattcatatatgggtctatttgattgcaacattcactaccccactagggagccactaaagggctcattgtgtctaagattatctttgtgcttttaaacttggcagtgacttaataaacttgctttcacttaaaaaaaaaaagtaaacttggcaatgatggaaatgggcctttaaactgcttttcgtgttaatggaatttctatgcacttaaagatttgaaataattttaatcaatttgtttattatatatgccagactgtgcttttatgtttaattatgttttcatttcatttgaaagactcttctagcttgctgtttctggaccaaaaaaaatgacgtctattatcaaattaactaccctttctggggtccaagaagaatctgccctttgctatcttctccaagttgatgagtttagatttttattggactgtggctgggatgagcacttttctatggatattattgattccctgaggaagtaagttacatttcataattctatgtttttattaaatcaacttctcttttctgtactgtaataccatttcgatgtgataaatactgcctttttacactagtttatagcaaaaggcttaattttacttatgccaaaaacctatagtgacattttaacttgtaaagttttgattgacttataagctttgcttgttgaaattcagcaaaatcttaagctaatggatttcagtagaaacttttgcatgctaatttttggaaagaacaagaatacataagaatttgagaagaggaaacattttccatgtgaaagttctgtggtcagatcacattagcttactttctacatcttttgatgcttaacattgtcagctggttctcagaatgaccatgagatactgattcatcaaaaaaaaaatcaattatgggctgggcacagtggctcacgctggcaatcccagtactttaggaggctgaggtgggcagatcacttgagttcaggagttcgagaccagcctggccaacatggtgaaactccaactctactaaaaatacaaaaattagccgggtgtgatggtgtgcacctataatcccagctacttgggaggctgaggcaggagaattgcttgaacccaggaggcagagattgcactgagccgagatcgtaccactacactccagcctgggcgcaaagcaagactctgtttcaaaaaaaaaataagataaaataaaaagtcaatgatgtttgcagtattatactaattttgcaagaaaagaggacttaaatatttaaaaaactttagaacttgagaaaaaaaatccaaaccattttattaatttcttgtgttgatgagaacatatgcttccctgattaactgaagttttactattcaattagcaaaactgtctgtggttactatgcgaaaaagctgggacaaaaatccattataagtatgtggccatataaatatcctctccttaataatttctgaaattcttctcttttattattatttttttttgagatggagtttcacttctgttgcccaagctggagtgcaatggcgtgcttttggctcactgcaacttccgcctccagggttcaagttattctccttcctcagcctcccaagtagctgagattacaggcatgcaccacccggccggctaagtttttgtatttttagtagaaacagggtttcaccatattagccagactggtcccgaactcctgacctcaggcgatccacctacctcggcctcccaaagtgctgggattacaggcctgaaccaccatgcccagccaataataatttctgaaattctaagctgagttcttgaacttaaattaatagtttgcgaccaggcacagtggctaatgccggtaatcccagcactttgggaggccgaggcgggcagatcacttgaggtcaggagttcgagaccagcctgaccaagatggtgaaaccccatctctactaaaattacaaagattagccaggcatggtggtgcatgcctgttatcccagctactcaggaggctgaggcaggagaatcacttgaacctgggaggcggaggttgcagtgagccaagatcgcaccattgcattagagcttgggcaacaagagtgaaactccgtctcaaaaaaaaaacaaaaaaaacaaaaagagttaagtgaggctgggtgcggtggctcatgcctgcaatcccagcactttgggaggtggaggagggcagatcacctgaggtcaggagtttaagaccagcctggccaacatggtgaaagtgtgtctctactaaaaataaaaaaattagccaggtgtggtggtagacacctgtaatcccagctactcaggaggctgaggcaggagagttgcttgaaccgggcggtggaggtcgcagtgagccgaggttgcgccagtgcactccagcctgggcaacagagcgagactacatctccaaaagaaaaaaaatagtatgcaggatagctattaaaaatcaacttatggccgggcgtggtggctcacccctgtaatctcagcactttgggaggccgaggtgggcggatcacctgaggttgggagttcgagaccaccctaaccaacatagagaaaccccatctctaccaaaaatacaaaataagctgggagtggtggcacatgcctgtaatcccagctactcgggaggctgaggcaggagaatcgcttgaacctgggaggcagaggttgtggtgagccggagattgcgtcattgcactccagcctgggcaacaagagcaaaactccatctaaaaaaagaaaatcaagttacttgtgtctactgttcttttttgtttttgttcttgtttttatttttaggcagggtctcactctgtcacccagactggagtgcagtggcatgatctcatcaaggtcaacctcctgtgcccaagtgatcctcccatgtcacccctcaagtagctgggactacaggctcatgccaccacccctggcttttttttttttttgtattttttatagagaacggtgttttgccatgttgcccaggctgatcttgaactcctgagctcaaacgatttgcctgccttggcctccctaagtgctgggattacaggtgtgtgccatcacacatggccttcttttctgtttaaaatgtgtgtacacaccatatatttaagtgtaccttataccacattttttgtagctatggagagcacaggtagtaataattgaaattcataggtaatcataattttagctcttagttttgctcttctgccccagtgtagtcttcaatccagaattggtgaataattttgaatattctgtctttacccttaaaaagattcaagaagtagtcctttggattgtgttcttgtaggcatgttcaccagattgatgcagtgctgttgtctcaccctgatcctctccaccttggtgccctcccgtatgctgtcggaaagttgggtctgaactgtgctatctatgcaaccattcctgtttataaaatgggacagatgttcatgtatgatctttatcaggtaatttaagcaattaaaaaaattttgttagcactccttcagtgattgtttttcacctttatttgtgttattcttttagtctcgacacaatacagaagattttacactctttacattagatgatgtggatgcagcctttgataaaatacagcagctaaaattctctcagattgtgaatttgaaaggtaaaaagaatttccagtagtaagtatttagatgaatggggtttaacttgctggaaaataccgaggagaattcagagagaaaattataggcattataggctgaagaataaaaaagttagcacattctgccttgatacagaactcttaacttccatttgaattttaaaatatttcagaaaaaatgctaacagaatgttaatagctcaggccttttcatatttaacttgggaaaaactcatttagtgtttactgtgtacaataaacaaaagataatgtggccatttcctcttcctcagagcttacagttagattgaggcaacaaagtagctgagatggctaaatgtagtgattggggtaaatgaagtgctatggcagcagagtagataatgaattctagcattggacgttaaaaagtttattattgaattaggaagtcctatactaagtctatatttatcatctacagagataattgtattagatattttcatagatatgaaccctggcattgataaaatggtgcaataatggactctgaagatttagcccagaaataacaacagtctcaacagttttgcttctagttaatttttctgcaggataaattctttagcacaatgagatttaaattattctgttagtttagacgttagcaaaaatggaaacatttggtaactgtatatacaaaatacacattaaaatttgctagttcatactaaataatttaatagtgtactagcttttaaatctaatctctagccttgtacttataagcacaaataactctacaagattacataatatagtaacaagaatgtttgcctctagtgagggagtggagtaggtgggggacaggagagtgaagcctgctttcactatatgcatttttacttttgaaatttgtattattgcatatacagtattacctattaaaatattatagttgagaaataaataacctttctttagggttgtaaaagaaatctgagtattgttatcttgttgacataggtaaaggacatggcctgtctatcacacctctgccagctggtcatatgataggtggaacaatatggaaaatagtcaaagatggagaagaagaaattgtttatgcagttgacttcaaccacaagagggagatgtaggtatatcaagagaaaagctaaaggcaatgcaattggtattattttattctttggagaaaaaataagaaacacagtttttgttttggttaccagaaatttagagcaacttaaaaccgtcaaatagggagtgttttcaaaattaattatttgcatagtaagggggaaagtatggtataagacataagagattttaaaaatttataggttaagtatacactctacaaaacgggtatctccctggagatgttgcaaaggagatgaattttttacgtatcaaattacatgttcttgacctgctatttaacacaactttgtggatgggttgttcttttgttttgtaacgtgatatggtttggctctgtgtccccacccaaatctcatcttatagctcccataattcccacatgttgtgggtgggacccggtgggagatgattgaattatgaggttgggtctttcccgtgctgttcttgtgatagtgaatgggtttcacgagatctgatagttttagaaacaggagttgccttgcacataatgtaattaccatctaatataactgccctgtatgtttaaagttagtccctttgaaagggaactcaattctagttatgattttacacacttcatgtggcactcagagcattactatataatattttggtgtttagtctcttacaggctcgttttgttttatctgtacattaagttcatagctattttgtgttacattacaatagtctcaggatctttatattaagaaatatttaagacaaatagactgaattttagacacttataaccatagattaatgaggaaaggatggctatgttgcagggcaaaagagtgagggtcgtgatcaactcagtataccactggaggctatatgagtaaacagcaaactgttcgcataaacgcagaaaattggcaaactgacaaactgtgtctgccacccagaaggaatgctgagggcagtcaggcctcaggtgcaggtgtttcttgtgattagacacatctgaagcctgttagcagtaatgtgaacctgtgatcaattaagcagctgaccaattgttacctcgtcctccctgctctttctacccaataaatatgaagggctgtagaagctgaaggcagctccctttgctcactagaagcagggagctctcttcttcttctcctgaccccttcctttaaaatagttacttttgttttaagttttcatttctgcattcgtcctccttcgttcagtctcgtagtaaccgtggcaaactgcagcatggctatttgagtaaatggtattgaaggattcaaccattttggaaaaaaatcaatttgtgtccttttaattatataacaaaagaaatttcagatggattagaactaaatagaaatgaagcaatattggtgagtctgatctctgatttggaaaagactttgtaagcataaaaataatgaaccaagttacaaaggaaaagtttgatagatttgatgacatacaggttcaaatgtctgaaacaacaaataaaaaaaaaaatcaaagtaggaaaatatttgcagcaagttgcccaaaaacttacaacatatatataagatcaagtattaatttattaataaaaatataccagttgcaagatggacaaaagttataaagtcaaaagagaaaatttaaatgatctttttttgttagataccattaaaattattattattcttatttatatttttatgtatttttttgaaacagagtctcactctgtcaccgaggctggaggcacaatcacggctcactgtagtgtcgacctcccagcttcaagcaatcttcccattttagcctcccaagtagctaggactacaggtgcgctctaacatgcctggctatttttgtaattttagtagagatgaggttttgccatgctgcccaggctggtcttgaactactgggctccagtgatctgcccacctctgtctcccaaagtgttgggattacaggcatgagccactgcactagtccaaaattatttttaaatggtgattttcttctgggaagtatgtagaattggtcagtctttttgattgaacttttctggatgaggttaaatcttgctggaaagccttttagcagtactatgtattaacagtaaatacatttttaggaatgtgacctaaagaaacaatcagaaatgcaattgaagcttttgtaaaaaatgttctttggaagattataatggcaaaaataagtgaccgaaatatcagtaaagggaaaggatcaaatacagtgtagacacaataaaatgtttttataactgttaaacatttagtttagaaaaaaatttttatgtcctgggtaaaaaccaggatatagaactgagcgtataggaatgtatatgggatatcagctttgtaaaatacatatgtatatcagtacttaccataagacagggcaaaaagaaaaataaaaaaaatacatatgtgcatagaaaaacttatatggttagcaggatgtacaccaaaatattatgtcagttatctctgagtaatggtactctggaagatttttattttcttctttatacttttttgaagttactggatttcttatcaatgagcatgtctacttttatagttagaggagggaacaccttataaatgaagctgcttattttttaagtaagagaagctattattgtttacttgaaatgatataaaatattcctcttcttaaactttcttatagccatttaaatggatgttccctggaaatgctaagcaggccttccctacttatcacagattcattcaatgctacatatgtacagcctagaagaaaacagagagatgagcagcttctgagtacgtattctttcacgtccttattattattattattttgtaactttttgtatatttagggaatataagtacataaaagtacaggtttctttttttttttgagacggactttcgctctttcacccaggctggagtgaagtggcgcgatctcggctcactgtaacttccgcctcctgggttcaagtgattcttgtgcctcagcctcccgagtagctgggattacaggtgtgcaccaccacgcccagctaatttttgtatttttagtggagacagggtttctccatgttggccaggctggtcttgaatttctgacctcaggtgatccacctgccttggcctcccaaagtgctgggattacaggcatgagccaccacgcccggccacaagtataggtttcttaatgcatacgttgcacagtggtgaagtttggccttttactgtatccgtctccagaatcgtgaatgttgtacccaatgtataatgtccttttcaaggagctgtggaaatgcatggtagtgggaatgactgtattctgtttagcacttttcttggtcataagagattggttaactttagtatttttgaaaaaaatattatgtgaccatcagtttttgtataagaagaaacttagctggtttgaatttaacttttgtggaacagtgtgtaaagattggcttctttttgccagtcagtacatagctagctatccctggcactcactggcatatgtctgtatgtaaagacctcgtacaaatctattagaaaaatatactctaaaagaaaaatgaggccaggtgcagtggctcacgcctgtaatcccaccactttgggaggctgaggcaggcggatcatgaggtcaggagattgagaccatcctggctaacacggtgaaaccccgtctctactaaatatacaaaaaattagccgggcgtggtggcgggtgcatgtaatcccagctactcaggaggctgaggcaggagaatggcgtaaacccggaaggcggagcttgcagtgagctgagatctggccactgcactccagcctgggctacagagtgagactccgtctcaaaaaaaaaaagaaaaatgaacaaagagctaagtggataaatgaggctgtaaatattccactaattttgggtgttttacactttaatatagtaggccattgctgcttgcttcatcttacattctttttttttttttttttgagatggtgtcttgctctgttgcccaggctggagtgcagtggcacagtctcggctcactgcaaccttcacttcccgggttgaagtgattctcctgcctcagcctcccaagtagctgggattacagtcatgcgccaccatgcccagctaatttttgtatttttagtggagatggggtttcgccatgttggccaggctggtgttgaactcctgacctcaggtgatcctcctgcctcagcctcccaaagtgttgggattacaggcgtaaaccactgcacctggccttatattctttttaaataagctataagggatttcagcagggaaaattggattccatttttaaacatgttttcaaccattgtttttagttcatctactttaaaagtacaactatttttttttttttttttttttttgagatggagtcttgctctgtcgccaggctggagtgtagtggcacaatcccggttcactgcaacctctgcctcccgggttcaagtgattctcctgcctcagcctcccaggtagctgggattacaggtgtgcgccactacgcccagctaatttttgtacttttaatagagacggggtttcaccatgttggccaggatggtcttgatctcttgaccttgtgatccgcccacctcggcctcccaaagtgctgggattacaggcgtgagccaccgcgccctgccactaaaagtgtaactattaataatataccgtgttgcaccaactttaagaagctcaagccagacactgtggttcacgcctgacattgtggtcaatggtcaacactttgggaggctgaggcaagatgatggcttgaagccagcagttcaagaccagcctgggtaacatagtgagacccccatctctttttttttttttttttgagatgtagtctcgctctgtcgccaggctggagtgcagtggcgcgatctcggctcattgcaacctccacctcctgggttcaggtggttctcctgcctcagcctcccgagtagctgggattacaggcgtgtgcaaccatgcccggctaattttttgtatttttagtagagacggggtttcaccatgttggccaggatggtctcgatctcttgacctcatgatctgcctgccttggcctcccaaagtgctgggattataggtgtgagccaccatgcctggccgcaatccccatctctacaaaaaaaaagaaaatttttgccagacgtggtggtacaggcccgtagttccagctgcttgggaggctggggtgggaggattgcttgaggccaggaggttgaggctgcagtgagctatgatcacaccactgcactccagcctgggtgacagagcgagaccctgtctcaacaaacaaacaaactgaaaaacaaaaaaagtagcggctctttaagtcttagttttgctagagttcagttttaccacatatttccaaggggactttcatctagaggaaggaaatccataaagatatacttgttggaagggaatatgatctatattttattctataggcatacatacatacaaactatgtatcatacatagttggcctttgtagctgctgttccacatctgaggattcaactaactgtggattgaaaatatttgaaaaaacaataaaagaagataatgcaatagtttaaaaaatataagtaaaaaaaaacagtgtaacaaccatttacatagcatgtacactgtattaggtattataagcaatctagagatgatttaaagtatataggaggatgtacgtaggttatatgcagatatattgtttttttgaggcaaagtctttctctgttgtacatgctggagtgtagtggcacaatcacgactctctgcagcctcaaactcctgggctcaagcagtctccctctagcttcccacatagctaagaccacaggcatgtgccaccatgcccggctaatttgtttatttttatagagacgggatctccctatgttgtccaggctggtcttgaactcctggactcaagccatcctcttgccttgacttcccaaactgctgggattacaggtgtgagccattgcgcctggccaccattttatttgagggacctgggcatctgatggttttggtattcgtgggagtcccggggccagtacccatgggtactgagggatggctgtatatataattatgtgagtgtatatatgtatgtatataaatttgggaattcatcataacggagttcactggggtggataggcgagaccagggtagcccggaaacaccaggctggttacatttggcctggtcatacaattttctcagtgatacacacaccattttctatgtgtattatgatgtataaagtgttgaggactactgatttataattttttaatgaagaaagattgagagttaatgacactgaatatatgaagagatattcaacagaatcaaaagcagttgtaatgacctgaacaaaattccttcattttgtacttggcctagtagttgcttatttgtaaattatagtctttctaataaaaacagggagataaaattatctttaattttgtagcatagtattgttacgttctatggggattttacattcttgttttctagcaaatgtcctggaaacacttcgaggtgatggaaatgtgttaatagcagtggacacagcaggcagagttttggaacttgctcaacttcttgatcagatttggaggactaaagatgcaggattgggtgtttactcattggcactcctaaataatgtcagttacaatgtggtggagttttctaagtcccaggtttgttctcatgttgtcacttgtaataagtttgctacagtgattgggtctgtggaagtgggcgtcttaaatgttttttggattttatttttctcttgaagagattgttaataagatgataacttggcattaaccatttactgtcctgtgtgctttaaatgtattatttaatttaatccctatttattctattaagtagtttccattgtgtccctgttttaaagattaggcaaattgcttcccttctaactcttagtatcccagtctgtaaaatggggacaaaaatagaacctacctcatagcattggcatgttagaattcattgttctttcttttaaataagctttttgccttgaaatagcaatctttgggagtaagattttcatttagaacatataccttgccttttcaaaaagatttaaggtgatttatatgtgaaatataatgcaaaattggttttctttgggatgaaagtgagggtgggataatctaatgggaaatggaagcagaaaataagctgcttgtcaaaacagtacaaatttaagcaaccagtgggggtaaaagatagaacttgaattccttgactattagagaatatattgaagttataatatagtatttctaattcttgtcatctttccccccatgttaggtagaatggatgagtgataaattgatgagatgttttgaagacaaaagaaataatccgtttcagtttcgccatctctctttatgtcatggtctttctgacttggcccgtgtacctagccctaaagttgtacttgccagccaacctgacctggaatgcggattttcaagggatctctttattcagtggtgtcaggaccctaaaaactcaatcattctaacctacagaactactcctgggactttagcacgtttcctaattgataatccttctgaaaaaattacagaaatagaggtaagcacttgtatgtgaactttatcttaaaactgtttgggggatacattgtgcatgatgtaaaaaaatagtgaccaaaaataaaacttgaaattgttttaggatttttatcagaattactcttgagagccaggagtggtggtgtgtgctgtagtgccagctactcgggaggctgaggcggaaggaccactcgagcccaggaatttgaggtcagcctgggcaacatgccaagacccaccccccatctcttaaaaaaaaactactgtggaagagagcctttaatagcacaaatttcagagttccttaactggaggttctcattcttctttgagatggggtcttgctttgttacctagtctagagtgcagtggtgctatcatagttccgtgcagcctcaaactcctgggcttaaaggatcctcctccctcagcctcctaagtagctggaaccatagacatgtgccaccatgcctggctatttttttatttttattttttggaaagacgttgtctcattatgttgccatgggtggtctcaaaagaaattctcattcttaaacttttccgtggtaccctctagtttacccagagggtaagcatatacagggttttctcaatctgtgaaaggttcctttcctgtctcttgcttaatttaaatcagactctttcctaaagacgttctttatcctgtagccccctgaagtaattactctttctttcagtgtttcatgtactttgaatggagtacacgtcttccttgttctgtattgcagcttcctagctacttatcttccatttgcagtttttgccttcagacctgctgatatgctgacccctccttgtttctgacatttaatgatctcttggtcattctgttactcattcatcatttgaccctgattcacagtcttcctgtccacttgtgttcaggactttattctcattgactttagcatccatgtgtatgatctgtctggttcttctcagttacttggcaccttatttcttaatcttttccttcgtcttacctcagacatccattcctgctatcatgctatctgctcctgtggtcattgcctgtaaccttcttatggctgaacggtctccagttctccacctcaagcatatcattctgaatttacagctgactttccctattattcccatgacaacaactcttctgttccattgggactttcagttcgtgaacctcaccttttacagtctgtcatccttccagccttaaactcagtggtccacaattaagcaaaattttgcaaatacatttaactctcctacacttctgttttagttgcctggaaaggctttgaccttagttaaaccatttgcttggtttgtgcctgtacttaagcagctttatgtttctgaagttaaacattatggtgtagacagatttgttttcacattcataacttcacatctcaaaaggggaccccataccagtactcagcatttggtaggatgttccctttctcacggtaaggtaattgtatatcttctttctcctcaaacatcctacagctcactctcagccttcattcatagcacatgatcttgtctcaaacttaatgtagaagtcaaagcagtgagtcaggaattcctttatctttccaccactaaatgtactaacttgattctgcatctgcatttgctgccttatctcttgttataggaacaagactattagctcactaaccagtatacccaaagatcatttgcttaataaccagcccatcaaatctatcgatttttcaaaattagtatatcattaaagtttgtagcaattgatatagtgggatggttaataactgccagagttgtacaaaggtttagctgactaaaccttaacatagaactgtaacaaaccttaacataaagcagtatcataaagctgcttctcattttgtctttgtagcactcatataattatttaattagagacagactctcactctgtcacccagcctggagtgcagtggcaccatcatagctcactgtaccctcaaactcttaggctcaagctgtccctacaccaccccctaacccactccaccttccaaagtgctgggattatacatgaaccactgcacctggcccttagcagtcattttaaggaaagtttagtttgttaaaagctatgtggtagagatatctgtctgccaactctacttaagaaaatcataacatcagtaactaaaatctgagatatatgtactataattatagaattgttgagcaaggattctgagcaagtatagcaaagtaaaatggtgtctttggggttatttagtagctcagaaatacaaggttaaaagaactaagaaatacttgaaacaatttcatcagataggaaatactgaatttgaaaattttaattactagaaattcaattaggtctaataaaccatttgaggaattagtaaaagaaaaatggtttaagtttggaaaaaaatagacaatgatgtttagaagcatgctaaagaaatgagaaacagccaaaacatcaaatgttaagtttttgacctttttaataactaatgctgatgctcagggaccttttcttgctcaccttcttagcgatagttcttttgcagttatccctcctatcttcattatctagcagttttccctctacttgatcacatccaaaacaatttttattcttcccctactcccaatactgttctgtcttatctcagacagcacttcccacatattcaagccaaaaatttggaagtttaaaaaatgttcactgaatcgtaatatgtaccaaaacctacgttaagtgtatagcatgatgaacttttacaaaaattgaatgcacctgtctagcctgtaccctgatcgagaaatagaatatttctgtggcatgttgggcagatccaactaaggtaaaaaatagaaatggtaaaaaaagaaatagagggctgggcgtggtggctcacgcctgtaatcccagcactttgggaggcagaggtgggcggatcacgaggtcaggagttcgagaccagcctggccaacaaagtgaaaccctgtctctactaaaaatacaaaaaattagcctggcgtggtggtgggcgcctgtaatcccagctactcgggaggctgaggcaggagaatcgcttgaacctgagaggtggagattgcagtgagccaggatcgcgccactgcactccaacctgggtgacagagcgagactccatctcaaaaaacaaacaaaaacacatacagttcactctcttaaccatttttatgtgtacagtacagtagtgttaactatatgtacattgttgtatgacagatctctaaaactttttcatgtagcaaaactgaaactctgtacctattggataacagctcccagagagagcttttaaacattcatcatttcatgtcattcacttgcttaaatggctccaaagccttccttcttctctttcaataaaatccatgctacttacacaggcttcttagatcccatatgatctaatccccacctaccttctgaccttagcttattccactttctctatgccctacggtgcatcaggatctttgtactagctgttcttctgcctatagtgttctttcctggctttgcgcatggctggctcctggtcattcaggcctcaggtttaaccccctcaggtaggcctttgactacagatttaaaatacctgcctggtttagctgcccatcaccttacttgaagtatttttcctagcactcatcaccatctgatgtatttcttttttgttgtcttcctcttcccaccatcaactagaatatgaattccatgagaaaaaggcccttgttttttggtatccctagcacccagaactgtgcctgacatattggagggcttcagtgagtgcactggttgaattcatgaataatcaaaaaagtgaatatggaataaactagatttctgattatgttagataagaaaagtttaccaagtatggtattttttcatctatatctaatgcccttctaagtcaagtcttactcatttagaaaaagcaaaaatgaacaacgaaggattaataggttggagtagatttggattagaaaaaggagtaagttggaggtaatacggtgaaggagtaggaagaaaaatatttttgagttggttattctagaaatctgtttctgaataagccattaatcttacatattttaaatgaaaaataagatggagataaaaatttattatagcaacaggcataaactaaatcacagaggtaaatactttgttaaagattattggtgggtaaaaggcatctatgtaggttgctaactgtttttaaaaaaaacccactattttctgaatgaaacttattttcaaataagttattaggcaaatgtgagatgccaaatataaacatgtatttatttgtttattttaactttttattttttgagacagggtcatgtcattccctgtcacccaggctggagtgcagttgcatgatcatagctcactgcagtcttgaactcttgggctcaagcgcgcctcctgcttaagcctcccaattagttcgcactgcaggcatgtgccgccatgcccagctaatttaaaaaaaaatttatagagatgggaacttgctgtgttgcccaagctggtcttgaactactggcctcaaacaattctcccaccttggcctcccaaagtgtgggtattataggtgtgagccactgctcctggccttaaacatgtaaatcacccatttattttatacatgaaaataatctgattttggtttaatttttttgtttttacttgtctcccctccccttaccccactgggcagcccctgaactagaatagtttcagagagattcccccttttccattacttttaattttgaaaaaatttcaaacaggaaagttacaaaaatattatacccagattccccaattgtcaacattttactggatttgctttatcacttatatacacataaacacaatattactttttctgaaccatttgaagaaaaattgcaaatattttatcattatctctaaatattgccagtgtgtgttacctaaaaacaagggcaatctccagcaaaactgtgttacatccattgaaatcaggaaatcaacattgataccatcctaccatttcacccattgaccccattcagcattcaccttttaccgatgaccacaatgtcctttataattaccctttccttttttgtccaggttcgcatccatgactacatactgcatttaattgtcataactgttgacatttttgaagcatatatattctgggttttttttttcttattgatatactaatacctggtttttattttatttttttaaagagatgggagcaaggtgtggtggcatgtggctgtagtcccagctattgaggcaagaggattgcttgagcctaggagtttaaggcaagcctgggcgatatagcaaggcctcttctcaaaaaaaaaaaaaaaagaaagaaatgtatatatatatatgtagagagagagagatgggaccaaattatcatgtattccacataccctgagacttgtattttcacttgagtccttcttgaacaatgtaagaagatatgggtctaccttacatagtacctggtatattacaaacatttaaatgtttttggataaataaatgtaagctttttagtaattttataatagtacattgtatatgtgtgctgtgattatttaatctcgtggttctcaaaagtgtggtttgaggacgcctgggagtccctgagaccctttcagggagtccacaaagccaaaactatttttcataatactggtaagatgatatttgccttttcactgtgcctacatttgtactgatgagtaagatcagtggtgcataaagtgcttacaccttggcctaaaactccactagtagccactgcatttttcaccaccgtacatacacgtcattaaaaaaaaaatgctagtttcacttaagaatgtccttgagaggctgggcgtcatggcccatgcctattcctaacactttgcgaggctaagatgggaggttcacctgaggccaggagtttcagaccagcctgggcaacagcaacactctgcctctacgaagtataaaggtatattaaacaaaagaaatttgaaagagaatgtctttgaggggccagacatactggctcatgcttgtaatcccagcactttgggaggctgaggtgagaggattgcttgaggccaggagtttgagaccagtctgggcagcatagcgagaccctgtctctacaaaaaagaaaaaaaagtccttgagggaatagtaaaagttactaatattactaagttctttcagtaaaagtttttttgtttttttttgagatgggtcttgctctgtcgtctaggctggagtgcagtggtacgatctcggctcactgcaacctccgcctcccaggttcaagtgattctcctgcttcagcctcctgagtagctgggactacaggtgtgtgccaccacgcctggctgattttttgtagttttagtagagacattgtttcaccatgttaaccaggatggtcttgatctcctgactttgtgatccgtctgcctcagcatcccaaagtgctgggatcacaggcatgagtcactgcgcctggcctagtaaaagattttttaaaataatttgggtgacaagatgggaagtattaataaagaatttgcgttgtgtactaaagtacaatggctatctccaagaaaaacacttgtatgtttatttgagtcgtgagttaaactagccacttttttctgggaacaccttttttttgttggtattttttttttcttgtgtttgagacggagccttgctctgtcgccaggctggagcgctcggctcactgcaacctctacttcccgggttcaagcgattctcctgcctcagcctcccaagtagctgggactacaggtgtgtgccacgttgcccagctaatttttttttttcatatttttagtagagatggggtttcactatgttggccaggctggtctcgaactcctgacctcaggcgatccacctgcctcggcctcccaaagtgttgggattacaggcgcgagtcaccgcaccaggccctgttttgtgtgtgtgttttttttttttgagtttgggtctctgttgcccaggttggagtgcagaggcacaatcatggctcaccacatccttgaacttctgcgttcatgtgaccctcctgcctcagccttcctaccagctaggactacgggtgtgtttcaccacacctgtaatttttaattcttttttgtagagactgggtcttgctacgctgcccatatggtctcgaactggcctcaagcaatcctctcacctccgactcccaaagtgctagaattacaggcatgaatcactgtgcccagtctggaacaccatttttatgtgaaataatgacagggttattcagatttgggtatttggcagacattttcttgaaaattaatacattgagcctgtcactctaaagaaaacaattgacagcatttgttggcttaaatctgataaaattctaattttcaaatgaaaatttagaattttggaaaacttatacccagcactgtgagattgacaacttaaactgaaaagacttctgataagattggtggtgatatttacaaatgtgattttaaaaatattgtcaacatttgtaagatctggataacttggtgaactagtattttccaaataaccaattaattatgttagaaaataatgcacaaattaaaagatccattcaaaatttaaaatacaggctgggcacagtggctcacacctgtaatcccagcactttgggaggcagaggcaggaggatggcttcagttcaggagttcaagactagtctggataacatagcgagaccttgtctctacaaaaaattaaaaatcagctgggcatggtggtgcacatctgtggtcgcagctattcaggaggctgggaggtagaagggttgcttgaacctgggagttcgaggctgcagtgagcagtgatcatgccactgcactcatcgtaggcaacagagtgagaccctgtctcaaaaacaaaacaaaacaaaacaaaaaacaagagtgtaagatacataaaaaaaaaaaaaaattaacacaacagagtataaaaagtctattagtatggtttcaggttctgcgttaaaactaaccttgaagaaactaccactttctgagttttaatgtagtatcaaagaataatatccatgaaaggactatttacatatttttcccttttcaactatacatgcgtataagcctggattttcttcatatactttaaccaaaacaacatattgcaagagactgaatggagaagcaaatgtgagaatccagctgtcttctgttgagctagacattaaagagatttgcaaaaatatagaataatgctataggccaggtgcggtggctcatgactgtaatcccagcactttgagaggctgaggagggcagattgcttgactccaggagtttgagaccagcttgggcagcatgtcaagactcggtctctacaaaaaaaatacaaaaattagctgggagtggtggatggctgaagtgggaggatcgcttgaggctggaagattgagctgcagtgagctataattgcaccactgcactccagcctgggcaatggagcaagaccctgtctcaaaaaaaaaaaaaaatgccgttcttcccactatcttttttttgctttggaaaatgtaattattttttgtaaaaatctgttaatgttgccatgtggttttatttattatttatttattattattttttcatttttgagatgtagtttcgctcttgttgcccaggctggagcgcaatggtgccatctcggctcactgcaacctccgcctcccaggttcaagtgattctcctgcctcagcctccctagtagctgagattacaggcatgtgccatcacgcccggctaattttgtatttttagtagagatgggctttctccatattgatcaggcttgtctcgaattcccgaccttaggtgatctgcccgcctcgacctcccacagtgctgggattacaggtgtgagccgtcgcgcccggcctattattattattaatttatttatttttgagctggagtctcactctgttgtccaagctggagtgtaatggtgcgattatggctcactgcagtttccgcctcccaggttccagcgattctcctgcctcagcttcctgggtaactgggattacaggcatgtgccaccatgcctggctactttttatatttatagtagagacggggtttcaccatgttggccaggctggtctcggactcctgaccttaggtgatctgcctgcctcgacctcccaaagtactaggattacaggtataagccaccatgccctgctggttttattattttttaaatgaacagataaatattttaaaaattgctcagttttaatttctgataaggtagacattgataaatataacccacaaaaacaaaaagctctttggggttctctaatttttaggagtctaaggtagtcctgagataaatatatgagaactactgatttaatcattccattttgatggattttaaaattttgtccagttttttactactataagcattgctgcaatgtacgaatgtactttttttttacacatttgtgattgtttcagtaggataaattcctagaagtagaaatactgtgtcaaatgtcaaattttatttttagatgttagcaaattgccttttaacatagttgcactaattttccaacagataatggaagaaggtactctttccccatgtatggcattgccaatctcatagatgaaaacaattatgttttttatattttgtgcttttcaaaaattagtaaaattaaggatcttttcatggccagtagttatttgtctttcttattttgtaaattgcctttttaagtatcttgtgctttttcatgtgttgatcatccttttcttaactaatttggaagagctcttaggaaaaaatcatttttattggtcgtagtgctgaaaatatttttctgtttcttttttgtttttcttttcagtttcttattttgagatttaaaatgtcaaagggagtttttctttattcatgttgctgtatttatttatgtttcccattatggcttttgggcctcacctactccaaattataaaaatgcttatctgtattttcttttcctgattggtgatttttaaccagtttgattgtttggttgattgagacagggtcttgctctgtcagactgaagtgatcctcagtctcagactcaagtgatactcagtctctgagtagctgggactacaggtgcatgctaccactactggcttttttttttttttttctgagacagagtattgctttgtcacccaggctggagtacagtggtgtgagcacagctcactgcagccttgacctcccaggctcaagtgatcttccactttaaccacctgagtagcggggacaacaggcacatgccaccactcctggcttttttttttttttttttttatgtggagacaaagtctcattatgttgcccaggctagtctcaaactcaagtgattttcctgccttgcaaagtgctaggattataggtgtgagccaccgtgcccagcctcccagctaatttttaaattattcctagagacagagtcaacctatgttgcccaggctggtcttgaactcctggcctcaagcagtcctcccacagtgctaggattataggtgtgagctactgtgcctggccaaccagtttgatttaaattaaacccattctagatgatgtgtgacagctcaattttaatactaatctaaataggacctataattgtatgtaatggaaacttgattaatttcagaggaaacaatcagtttaaagatgatagagcaatttagagatgtgatgtatctcatatcccactgctttaaccccctaatattaacatattaacatttccttttgtcttttatttttttttagttgaggaaacgtgtgaagcttgaagggaaagaacttgaagaatacttggaaaaagagaaactaaagaaagaagctgccaaaaagcttgagcagtcaaaagagtgagtcattttcagacagattataaatttatggatgcaatttgagaagaatgtgtccttgacttaaatgtttcattgaaaatatttttaaattttcgtaagacttaattttgttacagacatctttcaaatgtctagaataccagatcctgtcagtgctaatattattatgcatttatttgttatgttttataaaatgtcagtccaataaagttgaatgttattccagtcatgcatcacttaatgatggggacagttctgagaaaagtgtcgttaggggatttagtcattgtgcaaacattaggatatatgtttacacaaaccttgatggtatagcctactgtgtatccagagtatatgatatggcccattgttcctaggctacaaacctgtacagcatgttactgtactgaatactgtaggccattgtaacacaatgttaagtatttgtgtatctaaatgtatctaaacatagaaaaggtacagtaatcttatgggacctctgttgtatatgtggtctattgttgttgaccgacataactgtatattatcatttaatattgaattaataatattgagtatggattcagtaataaattgataaatattaatttaaaatatctttgaaactttatgaccttgatctattctaaaatcctcctagggcagatatagattccagtgatgagagtgatattgaggaagatattgaccagccatcagctcataagacgaagcatgacttgatgatgaaaggtgaaggcagtcgtaaaggaagttttttcaaacaggcaaaaaagtcctatcctatgtttcctgccccagaagaaagaattaaatgggatgaatatggagagattatcaagtatgtgagcaaaacaaacttttctctcttacaaattggaggtattaactgtgttatcatttcatttcagtgaatttgatctttcacttgatctttctagtcacatgtatggggttagcttctgagtacctcagcctgaagacacagaagacttgtaacttgaaacataaaaatagagatgctgagaaacatctagagaatattgagagaaaactggcagtttatgacttagttgtgtaaaggtttaaaaacatgatcacgtgatcaagacttttttcccccacttaaaaagagaggaagatgtaggataggaagaactttggggctgtgtgtggtggctcatgcctgtaatcccaacactttgggaggccgagatgggaggatcacttgagctcaggagtttgagaccagcccaggcaatatagtgagacccccatctctatctttaaaaaaaaaaaaagaactttggatggctggtgattgcatttccaatggattatgtcttaagtattatacaagttttatgagattaagaggaatgtgagatagcatgagtgaaatcatggaaaaatctacaaaatctatactgactattagaaaaacaactgcaatcacatgttgtaattgcaaatttgaaaacactactatcctgtgtggaaaataaaaaaagaaaaacatgatacaggccaggtgtggtggctcacgcctgtaatcccagcactttgggaggccgaggcaggtggatcatgaggtcaggagttcaggaccagcctggccaagatggtgaaaccacatctccactaaaaatacaaaaaaattagccgggcgtgatggcaggcacctgtaatcctagctactctgggggctgaggcagagaattgcttgaacagggaggcggaggttgcagtgagccgagatggcgccaccacactccagcctgggtgacagagggagactctacctcaaaaaaaaccaaaaaacgcaatacatacagccatctggtaattgatatgaaattgcatcagctttggatgaaatgtatatttaaatcttgagatatgtgaggactccaaaaattatgccacctactagtcatatatgttatgtagtattagcttgctttttactgcttctaattagagacttattatttagaccagaggatttcttagtgccagagcttcaagctactgaagaagaaaaaagcaaattagaatctggtttgacaaatggagatgaacctatggatcaggatttatctgatgttcctactaaatgtatttctacaacagagtctattgaaataaagtaagtgcttttgtgacattttgaaaatagattataagataaaatttcaagcatttgaattatataatttacattatgtcaagcaaaatttctgaatattctttagtaagtttgtgcttttaaaatttatttttgtatgaagagacttgtgaagtatggtggcatgatattttctcttcattaatggtatttgaatgccaaagtaattgaattggtggtggtggggggtgcttaaattgtaacattaaattgtacatttatatgaagaaaaattatttttggcctttttattctgtaagcaggtgaaagggaataatgtgactcacagtttaatttttctgagtaactgcttgtttcataaaatatactccttaacttaaacatctctaagaccctaatgtctggaaaatactgttgtgatctgaagtagttagaaaccttttttctcccgctttctacttagttaaataataccagtaagtgatcattttggaatttcttttaagtcatcagagaacaaagttttttatttgtccagtaatatcatttagtatatatttttgggtgtagataaaatctaaataatacagatagggccgggcacggtggctgatgcctgtaatcccagcactttggtaggccgagataggctgatcactcgagatcaggagtttgagaccagcctggccaacatggtgaaatctcatctctactgaaaatgcaaaattatccctgcgtggtggtgcatgcctataatcccagttacttgggaggctgagtcaggagaatcacttgaacctgggaggtagaggttgcaatgagcgaagatcatgctactgcactctagcctgggcaaaagagcgagacccaatctcagaaaaataaaaacaaaaataaaataaatcatacagatactataacatgtgtatttctcaaatcctagtgttatatattgtatacatgataaaagccatttttttttagaattatgagaaaagtaatcttgaataatcatatctaattacagagcccgggttacctacatagactatgaaggacgctctgatggggattccattaaaaaaatcattaatcagatgaaaccacgacagttgatcatcgtccatggcccaccagaggccagtcaagatctggcagagtgctgtcgcgcctttggtgggaaagatattaaagtgtacatgccaaagctacatgaaacagttgatgccactagtgaaactcacatctaccaggtaaacatgccaggagttgccattgagtagaaataagtactttttgttgcaggttaggacagataacattagaaataccgagatgtgtgagacagacatggatggtctcctgccctagcagacctcatagggtatggggcttagaacaaggaaataccatttatcatgttgttgtgccactgagagaagaagtacaggatgctatgagagtatcaagaggggaaaccacccacatttagaggtttagaaaaggtttcctacaggaagtgataactaatcctaactgatgtttagatgggttgtcaggacagacagagtaggaaagggggggaagagcgttctaggcagagggaaccatatttgcaaaagtacagaggtgaggaaaatgattaagaattcaaaagttttagaagaattcccggatatcaaggttctactcctaattggaacaaatggagatggataccaaatataggactagcacagtagagagataaattttgtctggtaatgggagatggtgtcagtttaaggccagagtgatgtctatatctggaagaaatggatgtgcacataccaggcaggaaatttattctgggcagagtaagaagaagcaaccttccaagaatatggagatgtgaaattctgtggtatattcaggaaaggacaagcagttcagtacctactgaagtatgccaagtactagaggatgggagtgatcagtggttctcaaccttgactgcacataagaatcatctggggagcttcgtgagggtcagagggactcagtttttctggtcttaatcttaccagttatgttagaaacactggatatgacgctctgatatactttttgttttaattgccatgtgattccattttgtagtcagggttaagaatctctattttggaaagtaggcaggggcccaatgatctgcaggtaatgaggtcattgcaggtcattgtgggactcagatgagtgaaagattttccaattttaacatattaccagaggtagaaaatgataataggttatatttaatttgttaatatgtattctgtgggttttatttctctccccctcctttgcatgtctaggtgaggttaaaagactcacttgtcagctctcttcagttttgtaaggcaaaagatgctgaattagcttggatagatggtgtcttagatatgagagtttccaaagtggacacaggggttattttagaagaaggagaactaaaggatgatggagaagactcagagatgcaagtggaagctccctcagattctagcgttatagcacaacaaaaggccatgaaaagtctgttcggagatgatgaaaaagaaacaggtgaagaaagtgagatcattcctactttggaacccttgccacctcatgaggtaaaaaaagcatgtgcttttttgatttcttcctgaatttgtcatccttctagttttcatgtcttttggtttttttccccccttctaaaactaagtgggtctgtggaaccttttatatttttaaccatttaaaatatatgtcagctgggggcagtgactcacgcctgtaatcccagcactttgggaggctgaggtgggagaattgcttgaggccaggagctctacatcagcctgattatagggacaccctgtcagaaacctagtcggcatggtggcatgcacctgtaatctcagcttagaaggctgaggcaggaggattgcttgagctcaggagttcgagactacagtgagccacaattgtgccactgcatctagcctatatgatagagtgagaccctgtcttgaacataaaatatgtctcacatttgggctgattttggagtttttaaaaaagagaacttgtgacatgcttctgtgtgtatgtctctgtgtatatattaattctatatagctaaggaatgacatatctttagcaaatcttttaaggtacataattgtttcatgattttttttttttggtctggatttttaaattttaagtttgatgattgtgaggatcacctgcctgcttccagtcaggagatttatagttttctaagaaagtcatactgttttttttttgttttgttttgttttttgagatggagtctcgctctgttgcccaggattgagtgcagtggtgtgatcttgtctcactgcaacctccgcctcccgggttcaagcgattctcctgcctcagcctcccaagtagctgggattacaggcatgagccactgggcccggctagtttttgtacttttagtagaaacggggttttgccatgttggccaggctggtcttgaactcctgacctcaggtgatccacccatctcagcctcccaaagtgctgggattacaggcgtgagccaatgcacccagccaatagtcatacctccatttttttatgttattcagttcaaataacttttggttttgatatagttagaaatctttaagtatagatataatttagtctagcatttacatattcttgagaggtatctagttaactagcaagattctaggtaattaaacttggaaaaatattaaaactatgaatcctacatgcatgtcaagtgatgtcttcagccctactatgaaattaagaatagagagacagcctctgttgttggattcccttctagtacaaccctcaaaattgggaggaggaataagaatatttttttcttctgtgctaaagctaatgctcttcaaagtaatgtcaaagcagaaagcagcagcattaggcaagaaccactttcgttactgattgtagaacctatggcatccattacatttgctctgaggaaggagggacagggaaaatgggattggggaggaaacgtcttttgaagtaagcaaatgactgggatctagaaaatgaatttttggttcagtcctgcccatggcacgctagttgaccccattatgcaagtgggtgagtgaagagcctaacattaccaaacgtctctgttatgatgaggcatgactaacaaaactgattgtgaaacagaaaatgtgaagggctttgttaaataatgttaaataatggggtaaaatttagaataacaacttggaatgtgatttacagtcttgaaatgatctgtcaaaggacttcagggaataatagaaaatctcttagagataatgtagtattttactttattcagtacagttgtatgtctggtgttttacttgaagttattctttcccctttgaccttatctaaggttcctggacatcagtcagtttttatgaatgaaccaaggctgtcagacttcaagcaagttctcttacgggaggggattcaagctgaatttgtaggaggtgtacttgtttgcaacaatcaagtagcagtccgcagagtaagtgtgttttcaataagggctgaattgaacacatacgtctgatgttttgtcattttgaaattctgtaattcttgtttggtattttcacaaaactgaagatcagtaatttatattcatgatcatgacctcaaaggcttacagaagtcttattgacttgaaggcttatgaaagactcttgaagaaatgatatataattttattgtaaattttaattatttgaatcttctgacatttatgtctatgtaaaattcatgacttcaatattatatccatatgctgtgaatcagagcaacccatgtcctgaccaatcataaagtaatctatttcatatatttcggttattatgtctgcatattaatgaatagaaaatgtactaaagaattttttttatttggtttctagacggaaactggacgcattggattagaaggctgcctttgtcaagatttttataggataagagaccttttatatgaacaatatgccattgtataaaggacatgatgtcaagaagtatctgcttgacctttctaagaaaaagggattcttatcttactctgagcttttgatgttttgttttgtaacatacaaaaagaatctgccagaaaaacttacatgtatcagatttttaaaaatataaatagagaacattttgcaaatgctcaaatgagcattctatcttttggctttcagagtgatagagctcctaacaggtgtacaggcccaagagttgaaggtgattggttttctttacagactccttgttctctagaagggctttttacttgaataaaacaatgcaacttagcaaaccaatttatggccttagagaaacatttttgcatgagttcttacaaactgtttgttatattttctggaatgataagtgagaattatttagaaaagacatgctccaaaaaaaaaacaaaactgataaaacagtttttcgaaacttacttttaaaagcatacgtgctatgactctctccagtttgaatatgcaattgttttcacaggcaggatgtctgttttctgcctgtatttcccagtgatttactctagggtaaggtagtacacatttggttcagaaattaatttttatttctcctatatcttgttttatcaagattttgttgtggcatttcaatgtaaattataacaccatcatttgagtatacataattcaaaagaactacttgatgcagtatagtcttaagggttctgcatacattttagaaacatcttagccgtaagttaggtcctgtgttaaactgtttagtgctctgtttttaagaaaacaaatgttgaacctcacacttttatgtggtgacagtgtaatttaattaaaaggtgtaaatgttttcatctcttaggcttgctgtctcctaaggtcacccaagcagtggttggattttatacacattactactaaaataatactgaagttggataaggttatcctttctgtatttgcgtctttcttgtgactaaccaccctgatatagtattaaccactgtgttcaagagtaaaaacaatatatgcaattttcattgaacttaaagagtgaaaaccatgtaaactattgaaactattgtaatccattaatgcttttttagaatggcagaccttgatgtttatttctcaaatggttaagccctcttctttactcttaatttttttttgagacagagtcacccaggctggagtgcagtggtgagattttggctcactataacctcttcctccagggttcaagtgattctcccacctcagcctcccaagtagctgggactacgggcacatgccactgcacctggctaatttttatatttttggtagagacagggtttcaccatgttggccaggctggtctcaaactcctgacctcaagcgatccacccacctaggcctcccaaagtgctgggattacaggcatgaatcaccacaactagcctacccttagatttttggaaggatcgatcttatttaactatgtgtggaacaacccagtaatatcagactcgaattactatttcattctatttcaaatgcttataaagctactattgtagattatagtgttaatgcaaagtttacagacttttgatatggaaaaccagataaaacaatgttacaaaaggcaaatataaagagtatgttttctttttagtgctttggaaaaatttcacttaaactcttattactgtatagattaagccctataatgctatttatattccaggggaacgaaaatctgaatttgttttatgatttaaagcatctggtttgcatattgtattgtaatactgatacagtttggctgtgtccccaccaaattgaattgtgttaatagttcccataatccctacgtgttgtgggagggacccagtgggcagtaatttaatcatggtggtggttaccctcatgctgttcttgtgatggtgagttctcatgagatctgatgggtgtttttttttgttttgttttttgttttttgagatggagttttgctcttgttgcccagactggagtgcaatggcacacgatctcggctcaccgcaacctctgcctcctgggttcaagcgattctcctgcctcagcatctcgagtagctgggattacaggcatgcaccaccacgcccagctaattttgtatttttagtagagacggggtttctccatgttggttaggctggcctcaaactcccgacctcaggtgatccgcccgcctgggcctcccaaagtgctgggattacaggcgtgagccactgctcctggcccaagatctgatggttttgtaagggaattttccccctttgcttggcacttcttcctgctgccatgtgaagaaggatgtgtttgcttccccttccaccatgattgtaagtttcatgaggcctccccagcctgtgggactgtgagtcaattaaacgtgtttactttataaattacccagtctcaggcaattctttatagcagtgtgagaacagactaatatgaataccaatactgaaaaattgtttcttgcctcaccttgtcctatgaacaggaattaaattttaaagtattgccttaagatggctgtgctaaataataatcattgcaagagcaatacttttacctgtttctagatgacaatattactaaaatttctcaaatgaagactttgttttagcttcaattacttcagaaaatataaattttaaagatgactatgagataaatcatgaactcagtggaattttcagatgagatggggcgcgttcagggtggtatgactgtagacggaattttcagatctttgttatttagaagcaagtataggtataacgtggactatcaactgatatctgcaaataatttggttaaaatgaaatttgattgtagtatttgttgctgtaggattataaatgtcaaatatcattgtaaacatttctatatttttagaaatatcttgggtggcctgaaacagaagtgaggaaatcaattttttaaggtgagccatttggcttttttaaaaaattgagattcaacttacataccataaagttcactcttctaaagtgtacaattcattggtgttagtatatttacagagttgtacaactattaccactatataatcccagaacactttcatcactccaaaaagaaacaccatacccactaccagtcactcctcatgcccccttcctatgacccctggcagccattaatctactttctgtctccttgaatttggattttctggacacttcataaaaattgaataatacaatatatgaactttta

SEQ ID NO: 1060 - DNA, 43053 bp, Homo sapiens
aaaatggcggctgccactgtggggcttctgccggccggtagtccctggcgctgctgacccagcatcggcttttctacgtcttgaacctggattcgcctaggggttgggaagggctgtggacggcgttgggggaggcctgacgaggcaagtgagggcgggagaaaggagcgagcctcgggctggggaaggcggcgtcattggccctccgggagcacggggccccgactccgacccggtctcccccgaggactcgcccccgccgcttcggctgcgactgtcccggtcgttcccggcagaagtggtcagcgagggaaagagaagtgacttctccatgggtttcaagctcccagctgttttgcggcagcccgtacggttccctcccgggatcttcttccctcctttctgcttccctctgcttcccctttcatctcttggcgctggaagagttaaaccgacgccagctttagctccttggcttcgtggctacggcgttcttagcctcccctgctcgggctcttcccgtcgttttgggttgagagaccacgaggttgctaagctctggacaccgcttaggcgtccttttagttcttcgactccagagacctttcggttgtttgtaccacactgtactaaaagggtcttgggccttcgcgccctcccgccatcgccctccagcgcttccactatcactgcgaagttctaattcttttttgacttcgtactattttacgtgctctttagaaaagaagaggtcagattgaaccccggcaagtctggcttcctgtgaccaggcgaacctgagctatcatttatacccatcccctaatttttaattttacaacccctttaacccctttcttttttctttctttttttttttttttaataaagacggggtttcactatgttgcccaggccggtgtcgaactcctgggctcaagagatcctcccattttggcctgtgctgggattccaggcgtgagccaccatgcccggccttgcaaccccagtatgaaactggggctctccctcaactgaccgagaagagccttccccactcagtgagctccagggctaacccaaactcctctgttttcccttggattttgcttagttcaccttagttgtcatcaacatgcacggtaattattttttatttttgagaaggaatctcgctctgtcgcccaggctggagtgcagtggcacgattctcggctcactgcaacctctgcctcccgggttcaagtgattctcctgcctcagactcccgagtagctgggactacaggcgcgcaccaccacgcccacctatttttgtagctttagtagagacagggtttcaccttgttggccaggattatccgcctgcctcggcctcccaaagttctgggattacaggcgtgagccaccgcgcctggccgatttattatttgagaccgggtctcgctctgtccacccaggctggagtgcagtggtgccatctcagctcactgcaacttccgcctcctgggctcaagtaatcctcccacctcagcctcccaagtagctggggtcaccagcgcagccaccgcgcccggctacttttttgtgtttttagtagagaaggggttttgtcatattgcccaggctggtctggaactcctgagctcaagtgatctgccctcctcggcctcccaaagtgttgagattaaaggcgcaagccactgcgcccggcaacatgcacgattattattaagagggcaagtaactgtgagatatttgcgatgaagtagtatctgtcaaaaccagtgctctgaaggaatttatgatatgatgaggcttcattccttcttgcagtacccatttatgctgccttgaccactgaagttggtattggatatacaaagatgatcacttttactcctctatacattgaacatccattcaacaaatactttatgtgcctcctttataacaaaataactaactttgcctagggcaacaaaaaggctttataaaggagtaaatatgtgagctgggtcatatagcatcaaaaggaatttgctgagctcaaaaggagaaggtaatttcgggattcagtacaggaatacagagctttgagaagctttagcatacttagggagagtgggataatcaacctgcctgagcatttagtgcacgagtgattggtgaagcaagaggtaggttaagatcagcttgtgaaggatcttggtttccaatagggagtttagatttttttcagtagttaccaggaatccagtggatattttgtgcaaggagtgagcaggaggatatttgtttttttaggatggtctctgacagctatatggaggatcaactgggaacagaaaaactagatgaaaggaaatgggcaatcattcaggtaaggcaatgagggcctccatggaggcaggacataaaggaggtcagagagacactaagtaaatgtcaaatgggattcacctgctgactgctaagttaatggtaagaaggtgacttgagtttttagtctgggagagtaaatggttggcaatactattaaaacttagtctgagacatgtacataaacataggatggtgccaacctgcactttaggggtgacaacatgatgctctatagtgtaaagcattggtttttatggtctggagtctagatctgcactgttatggtagtcactagccacatgtagctattgagcacttcagatgtcgttagtctatttgaaatgtgctgtaaatataaaatacacagtggattttgaagatttaatatgaaaatgtaaaatattcaacatgattacatgttgaaataatattttggttctattgggttaaataaaattcattaaaattcacccgtttctttttcacttttccatgtggccatgaagaaattaaaaagtacatttgtggcacgcattatatgtctgttgacagagctgttctagtctagactagatgtgggaatttgtaaggaggtggaacatgagctgggcctgaagacattgagcagtgatgtcagggtggcttcctggcaacctccattgccagttaaggcatttggtttgtcttttctcaagcagtaagaagccttcagagatttctgagcaaggggtaataggtgcagggtatttctgaagatgaatctggtagcaatgtttaggttggatgaagggaggaaatactggaggcagagaaactgagaaacccaaacataaggtagtgaggcccttcctgtattagggtactggcagtgggatagaaagggaatgatgtgcaaagcgttcctgagggaagaataatcaggaactggtaataatagactgtcccagaagtgaagaatcagcatgtagcatttcaaaccttggttacttagataacaactaatatattcatgtcgcagagctataaaatacaatttgagactgaagaaatttggtcacaagatagaatcagtaacgttaggaaggggtggtccactaaatactttcgctttttatctccctgctttctgtatcatctcatcaatcatacacaccagctaatatccccaaaatacagaattacctgtatcatgccatctttctacttgataatgagtcttaaaatgtttctgttgcctgcaggactaggttcacagtttccaaggcctttcactatctggcccctttctgttcattaggccttatcttttattttttgcttttgtgaatgttttccaggctagttttttcactggtactttaaaacttactcaaaagtgtagagatctgagatgtctggtattcctttactcctgttactcctctgttttgagtaccttctctttgtttctacccatgtcttaccaatccttagtgagtaatcttaaatcccacctcttctatgattctcaataacataaggtaatgtcaacttaaaaaaaaacttcctaaatatttttatgtcttttattatctgttatgtaagcttaagattcctaaaattaatgacagatctcttttttaaaaaaggaccacgtattatactacttgctgctgctcctgatgccttagggcaagatacaaattaaacaccataattataaacagaatgaaatcataataccacattcataaggcttttatttattttttagattaataaagaactcttcagaattcctggtgtttcatcatatatacgactaagatatcagtaagtagtgaatgtttgataaagatatagctttattatgaataattgtagtgaaaatatcttttcatctgttgaaatcttggtctgtctgcaaaacagttttaatatgaacttactcagttctagctgcaagataccttgcatgttacttcataatctaaatgaagaaagtgggaattaaggaagacttaagtagaaaagagtttcccttaggccattaatataattgtggtacagtaagctttttgacagggataatttccaaggtcctttccaaaattgtatttataaacgtttttcatcaaatagagaattaatgtctttgtaccccaaataagaacacatgaaggccaggcgtgctgtctcacacctgtaattccagcatttggggaggccaaggtgggtggatcacttgagcccaggagttaaagaccagcctgggcaacatagtgaaaccctgtctctacaaaaaattagccgagtgtggtggtgcgtgcccgtagtcccagctacccaggaggctgaggtgggaggatcacttgagcccaggaggttgaagctgcaaatgagccatgattgcaccactgcactccagcctgggtaccagagcaagatcctgtttcaggaaacaaaaacaagtcaatatattttaaattttaacttaccaacagttatttattgaacaaccactatgtgcagggatgtgctaatgtactaaggataaaaaaatggatcaagccaactcctgtactcagagagctctcccaagcaagggcaaatacatgtggatgggttctggtttatggtgtggtaaggacagtgagcttatttaatactagccatgccccattccttcctttaagaaacatttatcggctaccactgtatattaggcactgtggaggcgctggaatgtaactgtgatgaaaacagagaaggtctttaccttcatggagtctgcattccagtgtgggcacaggaggggagaaggtgacagacaaagcaagtaaataaataagtagcaattagagagcactaagtattttgagggaaatagaatgatgttgtaatggatgtgaagaaggactttagggtggtcagagaatgactacctctgagaatgactcagaataaattagagacagggaaaatatatataaaagttagaggttttggtcacagtgaagagagaagaaaatttgagaaatataatgagttgttatgaaagtatatcactggaagtgttttataaaggtcattgataaacctctatacaacttaagccaatggacatttctctggcttctcagacttagtgcaaatgggaggtgaggaagtggagatatatctgtggacaaatattctgagaacttttgctgtgaaagggaaacccaaaaatgatgtagtggttgttgggggttgaagggttaagagagggttcttataagttgggaaattctagagtatttttataagcttgtgggaatggtacatcagtgatacgttgatgcaggggaaagagcgaatgactgaagatgtcaagtctttcagaaggtgaataagaatgggatcaacggcacacatagagggattggccttggatgggagcaggactattctatacaacaggagacccaacagtgtacatgcagataggttaatagatgtagtatctggaaaatgagaaattattgtctaattttattttctgattgaagaatgaaatgagattatcagctgagactagggtggagggagggatgggtgatctttgaacaaagaggaggaggtgtggagtagtagtctcagaaactgaaagtcaacctactaagaaaagtcagattgaagggtaatacttacggcctgtttgaggcctttggccatgaatttaaagagcaaatagcgttagccaggtgtggtggcaggtgcctgtaatcccagctactcgggaggctgaggcaggagaaatacttgaacccaggaggtggaggttgcagtgagctgagatcttgccactgtataccagcctgggtgacaagagtgaaactctgtctcaaaaaaaaaagaaaaaaaatgggccaggtggatcatgaggtcaagagatcgagactattgtggccaacatggtgaaactccgtctctaccaaaaagaattagctgggcgtggtggtgcatgcctgtagtcccagctactcaggtggctgaggcaggagaatcacttgaacccgggagatggaggtggcagtgagccaagatcgtgacactgcactccagcctggcaacagagtgagactccgtctcaaaaaaaagcaaatagcacagctgtaattctcctccatatcccatccccccgccggccctgcatgattggagttaatcaggactggggttttgccagcctagtagagagaagtacctagaggagcaagacatttgagtgtttgcaaataatgttaacagatcatgaattgaaggtgaggacctgagtaaaaacaggagggggtcatggatagggaaaaagtagtcagcgaattagagagataccactgaccccagaggatttttgcaatgggaatactagagtaagtaaggtgttagagaatgagatgcttgaagtgaaattttgaaagtagaacagttactggtagtgataaggtctagggtgtaatcgtagtggtgggtggctgaagtgaaatgattattggagttgaggaagtcaaggaaccaacaggtcagtattgaagttactgagaggaacaacgggtcatgtaaaagtcctcagtgaatgaggccaggtgaatagatgccatagtgaagaggaaatgtggaagactaatagtgaactgctgggtggcaagagctttaatgggactagactatttgaaagaggaaagagaagacatggtttagaagctgcagtgaggagcaaggaacacatacctcctgcttttcaagtacagggggtacaagaagttaaaacaacaacaacaaaaaaccttgagaaggccgtaagaggaagagtatgatgagggaacagccaggtacctgggaagacaagcaggtgaagagaattttcagagaagcagttgcagttacaggtgagtatgatcacagttccagagagcatcctgaaaggatttgagagggagaagaggtaggggattaggtcttactgggagacgtacacatcgttgataattgataacctagcagtcttgtgattttggctgtcactcagataaacaaggctgggagatgtggtgggtttagcagcccctgtcagcctcttatgaaaggtggatattcagtttaccttagtttgttgatggccttgagtagtggtaagaaattattaggtaactcggtggccttctctcctacttgcatagttagccaggaaaagctcatttattttagggagctaaaatctgaaatgttgctgtggagttgaactttgctaatgaatattttcataacttctgcttaatagcacacagttccaggttctaaatcccatttttaaaaaatgtatatattttattttatttattttttagatacaaagtctcactttgttgcccagtctagggtacactctagggtctcactctgtgcccagtctagtggcgcactcatagctcacagtaacctcggactcctgggctcaagcaattctctcatcttggccttctgagtagctaggactacaggtacatgccaccagccagttttcttatattttttttttgtagagacagggtctcactacattgcctaggctggtctcaaactcctgaactctagcagtcttcctgcctcggcttcccaaagtgctgggatcacaggcgtgagccaccgtgcctggcctgtagatgtgttcatgttatattttcctgaaatatatgtagtaggcatcccaatttgcatttcatcagatatatgttgaagcgtgcatcaggttctatttagggagttgcaaacatatgccacctatgtttttcagttgctcacattccaatgcaagggttcttaatgttaaactccctgaaaagtttgtgaatttctacgtgtatatgtactcttgttttttgtttgagtgtgttgagagttggtgggggagggggagggtccataggtttttatcagattctcaaggggatctatttaaggaccactggtctaattaatgggagagaaagacatgtaaactaatcattgtaatacagtgaaatcagtgccatcacaaagcaagataaaagaggaagagattcaccttgaaggatgagttcattaattcctaaacatttatttattgaggaacttggatgcagtagtatctgttataggtaatttatacattatttgaaatacttcaacattgtttttacatgtatactaatactaatgttttatagactgagatacataggtgaggaaagtttaattaacttgcttcaaatcacatagaagtagattcatatatgggtctatttgattgcaacattcactaccccactagggagccactaaagggctcattgtgtctaagattatctttgtgcttttaaacttggcagtgacttaataaacttgctttcacttaaaaaaaaaaagtaaacttggcaatgatggaaatgggcctttaaactgcttttcgtgttaatggaatttctatgcacttaaagatttgaaataattttaatcaatttgtttattatatatgccagactgtgcttttatgtttaattatgttttcatttcatttgaaagactcttctagcttgctgtttctggaccaaaaaaaatgacgtctattatcaaattaactaccctttctggggtccaagaagaatctgccctttgctatcttctccaagttgatgagtttagatttttattggactgtggctgggatgagcacttttctatggatattattgattccctgaggaagtaagttacatttcataattctatgtttttattaaatcaacttctcttttctgtactgtaataccatttcgatgtgataaatactgcctttttacactagtttatagcaaaaggcttaattttacttatgccaaaaacctatagtgacattttaacttgtaaagttttgattgacttataagctttgcttgttgaaattcagcaaaatcttaagctaatggatttcagtagaaacttttgcatgctaatttttggaaagaacaagaatacataagaatttgagaagaggaaacattttccatgtgaaagttctgtggtcagatcacattagcttactttctacatcttttgatgcttaacattgtcagctggttctcagaatgaccatgagatactgattcatcaaaaaaaaaatcaattatgggctgggcacagtggctcacgctggcaatcccagtactttaggaggctgaggtgggcagatcacttgagttcaggagttcgagaccagcctggccaacatggtgaaactccaactctactaaaaatacaaaaattagccgggtgtgatggtgtgcacctataatcccagctacttgggaggctgaggcaggagaattgcttgaacccaggaggcagagattgcactgagccgagatcgtaccactacactccagcctgggcgcaaagcaagactctgtttcaaaaaaaaaataagataaaataaaaagtcaatgatgtttgcagtattatactaattttgcaagaaaagaggacttaaatatttaaaaaactttagaacttgagaaaaaaaatccaaaccattttattaatttcttgtgttgatgagaacatatgcttccctgattaactgaagttttactattcaattagcaaaactgtctgtggttactatgcgaaaaagctgggacaaaaatccattataagtatgtggccatataaatatcctctccttaataatttctgaaattcttctcttttattattatttttttttgagatggagtttcacttctgttgcccaagctggagtgcaatggcgtgcttttggctcactgcaacttccgcctccagggttcaagttattctccttcctcagcctcccaagtagctgagattacaggcatgcaccacccggccggctaagtttttgtatttttagtagaaacagggtttcaccatattagccagactggtcccgaactcctgacctcaggcgatccacctacctcggcctcccaaagtgctgggattacaggcctgaaccaccatgcccagccaataataatttctgaaattctaagctgagttcttgaacttaaattaatagtttgcgaccaggcacagtggctaatgccggtaatcccagcactttgggaggccgagggggcagatacttgaggtcaggagtttgatctcagcctgaccaagatggtggtcccccatctctactaaaattacaaagattagccaggcatggtggtgcatgcctgtaatcccagctactcaggaggctgaggcaggagaatcacttgaacctgggaggcggaggttgcagtgagccaagatcgcaccattgcattagagcttgggcaacaagagtgaaactccgtctcaaaaaaaaaacaaaaaaaacaaaaagagttaagtgaggctgggtgcggtggctcatgcctgcaatcccagcactttgggaggtgaggagggcagatcacctgaggtcaggagtttaagaccagcctggccaacatggtgaaagtgtgtctctactaaaaataaaaaaattagccaggtgtggtggtagacacctgtaatcccagctactcaggaggctgaggcaggagagttgcttgaaccgggcggtggaggtcgcagtgagccgaggttgcgccagtgcactccagcctgggcaacagagcgagactacatctccaaaagaaaaaaaatagtatgcaggatagctattaaaaatcaacttatggccgggcgtggtggctcacccctgtaatctcagcactttgggaggccgaggtgggcggatcacctgaggttgggagttcgagaccaccctaaccaacatagagaaaccccatctctaccaaaaatacaaaataagctgggagtggtggcacatgcctgtaatcccagctactcgggaggctgaggcaggagaatcgcttgaacctgggaggcagaggttgtggtgagccggagattgcgtcattgcactccagcctgggcaacaagagcaaaactccatctaaaaaaagaaaatcaagttacttgtgtctactgttcttttttgtttttgttcttgtttttatttttaggcagggtctcactctgtcacccagactggagtgcagtggcatgatctcatcaaggtcaacctcctgtgcccaagtgatcctcccatgtcacccctcaagtagctgggactacaggctcatgccaccacccctggcttttttttttttttgtattttttatagagaacggtgttttgccatgttgcccaggctgatcttgaactcctgagctcaaacgatttgcctgccttggcctccctaagtgctgggattacaggtgtgtgccatcacacatggccttcttttctgtttaaaatgtgtgtacacaccatatatttaagtgtaccttataccacattttttgtagctatggagagcacaggtagtaataattgaaattcataggtaatcataattttagctcttagttttgctcttctgccccagtgtagtcttcaatccagaattggtgaataattttgaatattctgtctttacccttaaaaagattcaagaagtagtcctttggattgtgttcttgtaggcatgttcaccagattgatgcagtgctgttgtctcaccctgatcctctccaccttggtgccctcccgtatgctgtcggaaagttgggtctgaactgtgctatctatgcaaccattcctgtttataaaatgggacagatgttcatgtatgatctttatcaggtaatttaagcaattaaaaaaattttgttagcactccttcagtgattgtttttcacctttatttgtgttattcttttagtctcgacacaatacagaagattttacactctttacattagatgatgtggatgcagcctttgataaaatacagcagctaaaattctctcagattgtgaatttgaaaggtaaaaagaatttccagtagtaagtatttagatgaatggggtttaacttgctggaaaataccgaggagaattcagagagaaaattataggcattataggctgaagaataaaaaagttagcacattctgccttgatacagaactcttaacttccatttgaattttaaaatatttcagaaaaaatgctaacagaatgttaatagctcaggccttttcatatttaacttgggaaaaactcatttagtgtttactgtgtacaataaacaaaagataatgtggccatttcctcttcctcagagcttacagttagattgaggcaacaaagtagctgagatggctaaatgtagtgattggggtaaatgaagtgctatggcagcagagtagataatgaattctagcattggacgttaaaaagtttattattgaattaggaagtcctatactaagtctatatttatcatctacagagataattgtattagatattttcatagatatgaaccctggcattgataaaatggtgcaataatggactctgaagatttagcccagaaataacaacagtctcaacagttttgcttctagttaatttttctgcaggataaattctttagcacaatgagatttaaattattctgttagtttagacgttagcaaaaatggaaacatttggtaactgtatatacaaaatacacattaaaatttgctagttcatactaaataatttaatagtgtactagcttttaaatctaatctctagccttgtacttataagcacaaataactctacaagattacataatatagtaacaagaatgtttgcctctagtgagggagtggagtaggtgggggacaggagagtgaagcctgctttcactatatgcatttttacttttgaaatttgtattattgcatatacagtattacctattaaaatattatagttgagaaataaataacctttctttagggttgtaaaagaaatctgagtattgttatcttgttgacataggtaaaggacatggcctgtctatcacacctctgccagctggtcatatgataggtggaacaatatggaaaatagtcaaagatggagaagaagaaattgtttatgcagttgacttcaaccacaagagggagatgtaggtatatcaagagaaaagctaaaggcaatgcaattggtattattttattctttggagaaaaaataagaaacacagtttttgttttggttaccagaaatttagagcaacttaaaaccgtcaaatagggagtgttttcaaaattaattatttgcatagtaagggggaaagtatggtataagacataagagattttaaaaatttataggttaagtatacactctacaaaacgggtatctccctggagatgttgcaaaggagatgaattttttacgtatcaaattacatgttcttgacctgctatttaacacaactttgtggatgggttgttcttttgttttgtaacgtgatatggtttggctctgtgtccccacccaaatctcatcttatagctcccataattcccacatgttgtgggtgggacccggtgggagatgattgaattatgaggttgggtctttcccgtgctgttcttgtgatagtgaatgggtttcacgagatctgatagttttagaaacaggagttgccttgcacataatgtaattaccatctaatataactgccctgtatgtttaaagttagtccctttgaaagggaactcaattctagttatgattttacacacttcatgtggcactcagagcattactatataatattttggtgtttagtctcttacaggctcgttttgttttatctgtacattaagttcatagctattttgtgttacattacaatagtctcaggatctttatattaagaaatatttaagacaaatagactgaattttagacacttataaccatagattaatgaggaaaggatggctatgttgcagggcaaaagagtgagggtcgtgatcaactcagtataccactggaggctatatgagtaaacagcaaactgttcgcataaacgcagaaaattggcaaactgacaaactgtgtctgccacccagaaggaatgctgagggcagtcaggcctcaggtgcaggtgtttcttgtgattagacacatctgaagcctgttagcagtaatgtgaacctgtgatcaattaagcagctgaccaattgttacctcgtcctccctgctctttctacccaataaatatgaagggctgtagaagctgaaggcagctccctttgctcactagaagcagggagctctcttcttcttctcctgaccccttcctttaaaatagttacttttgttttaagttttcatttctgcattcgtcctccttcgttcagtctcgtagtaaccgtggcaaactgcagcatggctatttgagtaaatggtattgaaggattcaaccattttggaaaaaaatcaatttgtgtccttttaattatataacaaaagaaatttcagatggattagaactaaatagaaatgaagcaatattggtgagtctgatctctgatttggaaaagactttgtaagcataaaaataatgaaccaagttacaaagtaaaagtttgatagatttgatgacatacaggttcaaatgtctgaaacaacaaataaaaaaaaaaatcaaagtaggaaaatatttgcagcaagttgcccaaaaacttacaacatatatataagatcaagtattaatttattaataaaaatataccagttgcaagatggacaaaagttataaagtcaaaagagaaaatttaaatgatctttttttgttagataccattaaaattattattattcttatttatatttttatgtatttttttgaaacagagtctcactctgtcaccgaggctggaggcacaatcacggctcactgtagtgtcgacctcccagcttcaagcaatcttcccattttagcctcccaagtagctaggactacaggtgcgctctaacatgcctggctatttttgtaattttagtagagatgaggttttgccatgctgcccaggctggtcttgaactactgggctccagtgatctgcccacctctgtctcccaaagtgttgggattacaggcatgagccactgcactagtccaaaattatttttaaatggtgattttcttctgggaagtatgtagaattggtcagtctttttgattgaacttttctggatgaggttaaatcttgctggaaagccttttagcagtactatgtattaacagtaaatacatttttaggaatgtgacctaaagaaacaatcagaaatgcaattgaagcttttgtaaaaaatgttctttggaagattataatggcaaaaataagtgaccgaaatatcagtaaagggaaaggatcaaatacagtgtagacacaataaaatgtttttataactgttaaacatttagtttagaaaaaaatttttatgtcctgggtaaaaaccaggatatagaactgagcgtataggaatgtatatgggatatcagctttgtaaaatacatatgtatatcagtacttaccataagacagggcaaaaagaaaaataaaaaaaatacatatgtgcatagaaaaacttatatggttagcaggatgtacaccaaaatattatgtcagttatctctgagtaatggtactctggaagatttttattttcttctttatacttttttgaagttactggatttcttatcaatgagcatgtctacttttatagttagaggagggaacaccttataaatgaagctgcttattttttaagtaagagaagctattattgtttacttgaaatgatataaaatattcctcttcttaaactttcttatagccatttaaatggatgttccctggaaatgctaagcaggccttccctacttatcacagattcattcaatgctacatatgtacagcctagaagaaaacagagagatgagcagcttctgagtacgtattctttcacgtccttattattattattattttgtaactttttgtatatttagggaatataagtacataaaagtacaggtttctttttttttttgagacggactttcgctctttcacccaggctggagtgaagtggcgcgatctcggctcactgtaacttccgcctcctgggttcaagtgattcttgtgcctcagcctcccgagtagctgggattacaggtgtgcaccaccacgcccagctaatttttgtatttttagtggagacagggtttctccatgttggccaggctggtcttgaatttctgacctcaggtgatccacctgccttggcctcccaaagtgctgggattacaggcatgagccaccacgcccggccacaagtataggtttcttaatgcatacgttgcacagtggtgaagtttggccttttactgtatccgtctccagaatcgtgaatgttgtacccaatgtataatgtccttttcaaggagctgtggaaatgcatggtagtgggaatgactgtattctgtttagcacttttcttggtcataagagattggttaactttagtatttttgaaaaaaatattatgtgaccatcagtttttgtataagaagaaacttagctggtttgaatttaacttttgtggaacagtgtgtaaagattggcttctttttgccagtcagtacatagctagctatccctggcactcactggcatatgtctgtatgtaaagacctcgtacaaatctattagaaaaatatactctaaaagaaaaatgaggccaggtgcagtggctcacgcctgtaatcccaccactttgggaggctgaggcaggcggatcatgaggtcaggagattgagaccatcctggctaacacggtgaaaccccgtctctactaaatatacaaaaaattagccgggcgtggtggcgggtgcatgtaatcccagctactcaggaggctgaggcaggagaatggcgtaaacccggaaggcggacttgcagtgagctgagatctggccactgcactccagcctgggctacagagtgagactccgtctcaaaaaaaaaaagaaaaatgaacaaagagctaagtggataaatgaggctgtaaatattccactaattttgggtgttttacactttaatatagtaggccattgctgcttgcttcatcttacattctttttttttttttttttgagatggtgtcttgctctgttgcccaggctggagtgcagtggcacagtctcggctcactgcaaccttcacttcccgggttgaagtgattcttctgcctcagcctcccaagtagctgggattacaggcatgcgccaccatgcccagctaatttttatatttttagtggagatggggtttcgccatgttggccaggctggtgttgaactcctgacctcaggtgatcctcctgcctcagcctcccaaagtgttgggattacaggcgtaaaccactgcacctggccttatattctttttaaataagctataagggatttcagcagggaaaattggattccatttttaaacatgttttcaaccattgtttttagttcatctactttaaaagtacaactattttttttttttttttttttttgagatggagtcttgctctgtcgccaggctggagtgtagtggcacaatcccggttcactgcaacctctgcctcccgggttcaagtgattctcctgcctcagcctcccaggtagctgggattacaggtgtgcgccactacgcccagctaatttttgtacttttaatagagacggggtttcaccatgttggccaggatggtcttgatctcttgaccttgtgatccgcccacctcggcctcccaaagtgctgggattacaggcgtgagccaccgcgccctgccactaaaagtgtaactattaataatataccgtgttgcaccaactttaagaagctcaagccagacactgtggttcacgcctgacattgtggtcaatggtcaacactttgggaggctgaggcaagatgatggcttgaagccagcagttcaagaccagcctgggtaacatagtgagacccccatctctttttttttttttttttgagatgtagtctcgctctgtcgccaggctggagtgcagtggcgcgatctcggctcattgcaacctccacctcctgggttcaggtggttctcctgcctcagcctcccgagtagctgggattacaggcgtgtgcaaccatgcccggctaattttttgtatttttagtagagacggggtttcaccatgttggccaggatggtctcgatctcttgacctcatgatctgcctgccttggcctcccaaagtgctgggattataggtgtgagccaccatgcctggccgcaatccccatctctacaaaaaaaaagaaaatttttgccagacgtggtggtacaggcccgtagttccagctgcttgggaggctggggtgggaggattgcttgaggccaggaggttgaggctgcagtgagctatgatcacaccactgcactccagcctgggtgacagagcgagaccctgtctcaacaaacaaacaaactgaaaaacaaaaaaagtagcggctctttaagtcttagttttgctagagttcagttttaccacatatttccaaggggactttcatctagaggaaggaaatccataaagatatacttgttggaagggaatatgatctatattttattctataggcatacatacatacaaactatgtatcatacatagttggcctttgtagctgctgttccacatctgaggattcaactaactgtggattgaaaatatttgaaaaaacaataaaagaagataatgcaatagtttaaaaaatataagtaaaaaaaaacagtgtaacaaccatttacatagcatgtacactgtattaggtattataagcaatctagagatgatttaaagtatataggaggatgtacgtaggttatatgcagatatattgtttttttgaggcaaagtctttctctgttgtacatgctggagtgtagtggcacaatcacgactctctgcagcctcaaactcctgggctcaagcagtctccctctagcttcccacatagctaagaccacaggcatgtgccaccatgcccggctaatttgtttatttttatagagacgggatctccctatgttgtccaggctggtcttgaactcctggactcaagccatcctcttgccttgacttcccaaactgctgggattacaggtgtgagccattgcgcctggccaccattttatttgagggacctgggcatctgatggttttggtattcgtgggagtcccggggccagtacccatgggtactgagggatggctgtatatataattatgtgagtgtatatatgtatgtatataaatttgggaattcatcataacggagttcactggggtggataggcgagaccagggtagcccggaaacaccaggctggttacatttggcctggtcatacaattttctcagtgatacacacaccattttctatgtgtattatgatgtataaagtgttgaggactactgatttataattttttaatgaagaaagattgagagttaatgacactgaatatatgaagagatattcaacagaatcaaaagcagttgtaatgacctgaacaaaattccttcattttgtacttggcctagtagttgcttatttgtaaattatagtctttctaataaaaacagggagataaaattatctttaattttgtagcatagtattgttacgttctatggggattttacattcttgttttctagcaaatgtcctggaaacacttcgaggtgatggaaatgtgttaatagcagtggacacagcaggcagagttttggaacttgctcaacttcttgatcagatttggaggactaaagatgcaggattgggtgtttactcattggcactcctaaataatgtcagttacaatgtggtggagttttctaagtcccaggtttgttctcatgttgtcacttgtaataagtttgctacagtgattgggtctgtggaagtgggcgtcttaaatgttttttggattttatttttctcttgaagagattgttaataagatgataacttggcattaaccatttactgtcctgtgtgctttaaatgtattatttaatttaatccctatttattctattaagtagtttccattgtgtccctgttttaaagattaggcaaattgcttcccttctaactcttagtatcccagtctgtaaaatggggacaaaaatagaacctacctcatagcattggcatgttagaattcattgttctttcttttaaataagctttttgccttgaaatagcaatctttgggagtaagattttcatttagaacatataccttgccttttcaaaaagatttaaggtgatttatatgtgaaatataatgcaaaattggttttctttgggatgaaagtgagggtgggataatctaatgggaaatggaagcagaaaataagctgcttgtcaaaacagtacaaatttaagcaaccagtgggggtaaaagatagaacttgaattccttgactattagagaatatattgaagttataatatagtatttctaattcttgtcatctttccccccatgttaggtagaatggatgagtgataaattgatgagatgttttgaagacaaaagaaataatccgtttcagtttcgccatctctctttatgtcatggtctttctgacttggcccgtgtacctagccctaaagttgtacttgccagccaacctgacctggaatgcggattttcaagggatctctttattcagtggtgtcaggaccctaaaaactcaatcattctaacctacagaactactcctgggactttagcacgtttcctaattgataatccttctgaaaaaattacagaaatagaggtaagcacttgtatgtgaactttatcttaaaactgtttgggggatacattgtgcatgatgtaaaaaaatagtgaccaaaaataaaacttgaaattgttttaggatttttatcagaattactcttgagagccaggagtggtggtgtgtgctgtagtgccagctactcgggaggctgaggcggaaggaccactcgagcccaggaatttgaggtcagcctgggcaacatgccaagacccaccccccatctcttaaaaaaaaactactgtggaagagagcctttaatagcacaaatttcagagttccttaactggaggttctcattcttctttgagatggggtcttgctttgttacctagtctagagtgcagtggtgctatcatagttccgtgcagcctcaaactcctgggcttaaaggatcctcctccctcagcctcctaagtagctggaaccatagacatgtgccaccatgcctggctatttttttatttttattttttggaaagacgttgtctcattatgttgccatgggtggtctcaaaagaaattctcattcttaaacttttccgtggtaccctctagtttacccagagggtaagcatatacagggttttctcaatctgtgaaaggttcctttcctgtctcttgcttaatttaaatcagactctttcctaaagacgttctttatcctgtagccccctgaagtaattactctttctttcagtgtttcatgtactttgaatggagtacacgtcttccttgttctgtattgcagcttcctagctacttatcttccatttgcagtttttgccttcagacctgctgatatgctgacccctccttgtttctgacatttaatgatctcttggtcattctgttactcattcatcatttgaccctgattcacagtcttcctgtccacttgtgttcaggactttattctcattgactttagcatccatgtgtatgatctgtctggttcttctcagttacttggcaccttatttcttaatcttttccttcgtcttacctcagacatccattcctgctatcatgctatctgctcctgtggtcattgcctgtaaccttcttatggctgaacggtctccagttctccacctcaagcatatcattctgaatttacagctgactttccctattattcccatgacaacaactcttctgttccattgggactttcagttcgtgaacctcaccttttacagtctgtcatccttccagccttaaactcagtggtccacaattaagcaaaattttgcaaatacatttaactctcctacacttctgttttagttgcctggaaaggctttgaccttagttaaaccatttgcttggtttgtgcctgtacttaagcagctttatgtttctgaagttaaacattatggtgtagacagatttgttttcacattcataacttcacatctcaaaaggggaccccataccagtactcagcatttggtaggatgttccctttctcacggtaaggtaattgtatatcttctttctcctcaaacatcctacagctcactctcagccttcattcatagcacatgatcttgtctcaaacttaatgtagaagtcaaagcagtgagtcaggaattcctttatctttccaccactaaatgtactaacttgattctgcatctgcatttgctgccttatctcttgttataggaacaagactattagctcactaaccagtatacccaaagatcatttgcttaataaccagcccatcaaatctatcgatttttcaaaattagtatatcattaaagtttgtagcaattgatatagtgggatggttaataactgccagagttgtacaaaggtttagctgactaaaccttaacatagaactgtaacaaaccttaacataaagcagtatcataaagctgcttctcattttgtctttgtagcactcatataattatttaattagagacagactctcactctgtcacccagcctggagtgcagtggcaccatcatagctcactgtaccctcaaactcttaggctcaagctgtccctacaccaccccctaacccactccaccttccaaagtgctgggattatacatgaaccactgcacctggcccttagcagtcattttaaggaaagtttagtttgttaaaagctatgtggtagagatatctgtctgccaactctacttaagaaaatcataacatcagtaactaaaatctgagatatatgtactataattatagaattgttgagcaaggattctgagcaagtatagcaaagtaaaatggtgtctttggggttatttagtagctcagaaatacaaggttaaaagaactaagaaatacttgaaacaatttcatcagataggaaatactgaatttgaaaattttaattactagaaattcaattaggtctaataaaccatttgaggaattagtaaaagaaaaatggtttaagtttggaaaaaaatagacaatgatgtttagaagcatgctaaagaaatgagaaacagccaaaacatcaaatgttaagtttttgacctttttaataactaatgctgatgctcagggaccttttcttgctcaccttcttagcgatagttcttttgcagttatccctcctatcttcattatctagcagttttccctctacttgatcacatccaaaacaatttttattcttcccctactcccaatactgttctgtcttatctcagacagcacttcccacatattcaagccaaaaatttggaagtttaaaaaatgttcactgaatcgtaatatgtaccaaaacctacgttaagtgtatagcatgatgaacttttacaaaaattgaatgcacctgtctagcctgtaccctgatcgagaaatagaatatttctgtggcatgttgggcagatccaactaaggtaaaaaatagaaatggtaaaaaaagaaatagagggctgggcgtggtggctcacgcctgtaatcccagcactttgggaggcagaggtgggcggatcacgaggtcaggagttcgagaccagcctggccaacaaagtgaaaccctgtctctactaaaaatacaaaaaattagcctggcgtggtggtgggcgcctgtaatcccagctactcgggaggctgaggcaggagaatcgcttgaacctgagaggtggagattgcagtgagccaggatcgcgccactgcactccaacctgggtgacagagcgagactccatctcaaaaaacaaacaaaaacacatacagttcactctcttaaccatttttatgtgtacagtacagtagtgttaactatatgtacattgttgtatgacagatctctaaaactttttcatgtagcaaaactgaaactctgtacctattggataacagctcccagagagagcttttaaacattcatcatttcatgtcattcacttgcttaaatggctccaaagccttccttcttctctttcaataaaatccatgctacttacacaggcttcttagatcccatatgatctaatccccacctaccttctgaccttagcttattccactttctctatgccctacggtgcatcaggatctttgtactagctgttcttctgcctatagtgttctttcctggctttgcgcatggctggctcctggtcattcaggcctcaggtttaaccccctcaggtaggcctttgactacagatttaaaatacctgcctggtttagctgcccatcaccttacttgaagtatttttcctagcactcatcaccatctgatgtatttcttttttgttgtcttcctcttcccaccatcaactagaatatgaattccatgagaaaaaggcccttgttttttggtatccctagcacccagaactgtgcctgacatattggagggcttcagtgagtgcactggttgaattcatgaataatcaaaaaagtgaatatggaataaactagatttctgattatgttagataagaaaagtttaccaagtatggtattttttcatctatatctaatgcccttctaagtcaagtcttactcatttagaaaaagcaaaaatgaacaacgaaggattaataggttggagtagatttggattagaaaaaggagtaagttggaggtaatacggtgaaggagtaggaagaaaaatatttttgagttggttattctagaaatctgtttctgaataagccattaatcttacatattttaaatgaaaaataagatggagataaaaatttattatagcaacaggcataaactaaatcacagaggtaaatactttgttaaagattattggtgggtaaaaggcatctatgtaggttgctaactgtttttaaaaaaaacccactattttctgaatgaaacttattttcaaataagttattaggcaaatgtgagatgccaaatataaacatgtatttatttgtttattttaactttttattttttgagacagggtcatgtcattccctgtcacccaggctggagtgcagttgcatgatcatagctcactgcagtcttgaactcttgggctcaagcgcgcctcctgcttaagcctcccaattagttcgcactgcaggcatgtgccgccatgcccagctaatttaaaaaaaaatttatagagatgggaacttgctgtgttgcccaagctggtcttgaactactggcctcaaacaattctcccaccttggcctcccaaagtgtgggtattataggtgtgagccactgctcctggccttaaacatgtaaatcacccatttattttatacatgaaaataatctgattttggtttaatttttttgtttttacttgtctcccctccccttaccccactgggcagcccctgaactagaatagtttcagagagattcccccttttccattacttttaattttgaaaaaatttcaaacaggaaagttacaaaaatattatacccagattccccaattgtcaacattttactggatttgctttatcacttatatacacataaacacaatattactttttctgaaccatttgaagaaaaattgcaaatattttatcattatctctaaatattgccagtgtgtgttacctaaaaacaagggcaatctccagcaaaactgtgttacatccattgaaatcaggaaatcaacattgataccatcctaccatttcacccattgaccccattcagcattcaccttttaccgatgaccacaatgtcctttataattaccctttccttttttgtccaggttcgcatccatgactacatactgcatttaattgtcataactgttgacatttttgaagcatatatattctgggttttttttttcttattgatatactaatacctggtttttattttatttttttaaagagatgggagcaaggtgtggtggcatgtggctgtagtcccagctattgaggcaagaggattgcttgagcctaggagtttaaggcaagcctgggcgatatagcaaggcctcttctcaaaaaaaaaaaaaaaagaaagaaatgtatatatatatatgtagagagagagagatgggaccaaattatcatgtattccacataccctgagacttgtattttcacttgagtccttcttgaacaatgtaagaagatatgggtctaccttacatagtacctggtatattacaaacatttaaatgtttttggataaataaatgtaagctttttagtaattttataatagtacattgtatatgtgtgctgtgattatttaatctcgtggttctcaaaagtgtggtttgaggacgcctgggagtccctgagaccctttcagggagtccacaaagccaaaactatttttcataatactggtaagatgatatttgccttttcactgtgcctacatttgtactgatgagtaagatcagtggtgcataaagtgcttacaccttggcctaaaactccactagtagccactgcatttttcaccaccgtacatacacgtcattaaaaaaaaaatgctagtttcacttaagaatgtccttgagaggctgggcgtcatggcccatgcctattcctaacactttgcgaggctaagatgggaggttcacctgaggccaggagtttcagaccagcctgggcaacagcaacactctgcctctacgaagtataaaggtatattaaacaaaagaaatttgaaagagaatgtctttgaggggccagacatactggctcatgcttgtaatcccagcactttgggaggctgaggtgagaggattgcttgaggccaggagtttgagaccagtctgggcagcatagcgagaccctgtctctacaaaaaagaaaaaaaagtccttgagggaatagtaaaagttactaatattactaagttctttcagtaaaagtttttttgtttttttttgagatgggtcttgctctgtcgtctaggctggagtgcagtggtacgatctcggctcactgcaacctccgcctcccaggttcaagtgattctcctgcttcagcctcctgagtagctgggactacaggtgtgtgccaccacgcctggctgattttttgtagttttagtagagacattgtttcaccatgttaaccaggatggtcttgatctcctgactttgtgatccgtctgcctcagcatcccaaagtgctgggatcacaggcatgagtcactgcgcctggcctagtaaaagattttttaaaataatttgggtgacaagatgggaagtattaataaagaatttgcgttgtgtactaaagtacaatggctatctccaagaaaaacacttgtatgtttatttgagtcgtgagttaaactagccacttttttctgggaacaccttttttttgttggtattttttttttcttgtgtttgagacggagccttgctctgtcgccaggctggagcgctcggctcactgcaacctctacttcccgggttcaagcgattctcctgcctcagcctcccaagtagctgggactacaggtgtgtgccacgttgcccagctaatttttttttttcatatttttagtagagatggggtttcactatgttggccaggctggtctcgaactcctgacctcaggcgatccacctgcctcggcctcccaaagtgttgggattacaggcgcgagtcaccgcaccaggccctgttttgtgtgtgtgttttttttttttgagtttgggtctctgttgcccaggttggagtgcagaggcacaatcatggctcaccacatccttgaacttctgcgttcatgtgaccctcctgcctcagccttcctaccagctaggactacgggtgtgtttcaccacacctgtaatttttaattcttttttgtagagactgggtcttgctacgctgcccatatggtctcgaactggcctcaagcaatcctctcacctccgactcccaaagtgctagaattacaggcatgaatcactgtgcccagtctggaacaccatttttatgtgaaataatgacagggttattcagatttgggtatttggcagacattttcttgaaaattaatacattgagcctgtcactctaaagaaaacaattgacagcatttgttggcttaaatctgataaaattctaattttcaaatgaaaatttagaattttggaaaacttatacccagcactgtgagattgacaacttaaactgaaaagacttctgataagattggtggtgatatttacaaatgtgattttaaaaatattgtcaacatttgtaagatctggataacttggtgaactagtattttccaaataaccaattaattatgttagaaaataatgcacaaattaaaagatccattcaaaatttaaaatacaggctgggcacagtggctcacacctgtaatcccagcactttgggaggcagaggcaggaggatggcttcagttcaggagttcaagactagtctggataacatagcgagaccttgtctctacaaaaaattaaaaatcagctgggcatggtggtgcacatctgtggtcgcagctattcaggaggctgggaggtagaagggttgcttgaacctgggagttcgaggctgcagtgagcagtgatcatgccactgcactcatcgtaggcaacagagtgagaccctgtctcaaaaacaaaacaaaacaaaacaaaaaacaagagtgtaagatacataaaaaaaaaaaaaaattaacacaacagagtataaaaagtctattagtatggtttcaggttctgcgttaaaactaaccttgaagaaactaccactttctgagttttaatgtagtatcaaagaataatatccatgaaaggactatttacatatttttcccttttcaactatacatgcgtataagcctggattttcttcatatactttaaccaaaacaacatattgcaagagactgaatggagaagcaaatgtgagaatccagctgtcttctgttgagctagacattaaagagatttgcaaaaatatagaataatgctataggccaggtgcggtggctcatgactgtaatcccagcactttgagaggctgaggagggcagattgcttgactccaggagtttgagaccagcttgggcagcatgtcaagactcggtctctacaaaaaaaatacaaaaattagctgggagtggtggatggctgaagtgggaggatcgcttgaggctggaagattgagctgcagtgagctataattgcaccactgcactccagcctgggcaatggagcaagaccctgtctcaaaaaaaaaaaaaaaaatgccgttcttcccactatcttttttttgctttggaaaatgtaattattttttgtaaaaatctgttaatgttgccatgtggttttatttattatttatttattattattttttcatttttgagatgtagtttcgctcttgttgcccaggctggagcgcaatggtgccatctcggctcactgcaacctccgcctcccaggttcaagtgattctcctgcctcagcctccctagtagctgagattacaggcatgtgccatcacgcccggctaattttgtatttttagtagagatgggctttctccatattgatcaggcttgtctcgaattcccgaccttaggtgatctgcccgcctcgacctcccacagtgctgggattacaggtgtgagccgtcgcgcccggcctattattattattaatttatttatttttgagctggagtctcactctgttgtccaagctggagtgtaatggtgcgattatggctcactgcagtttccgcctcccaggttccagcgattctcctgcctcagcttcctgggtaactgggattacaggcatgtgccaccatgcctggctactttttatatttatagtagagacggggtttcaccatgttggccaggctggtctcggactcctgaccttaggtgatctgcctgcctcgacctcccaaagtactaggattacaggtataagccaccatgccctgctggttttattattttttaaatgaacagataaatattttaaaaattgctcagttttaatttctgataaggtagacattgataaatataacccacaaaaacaaaaagctctttggggttctctaatttttaggagtctaaggtagtcctgagataaatatatgagaactactgatttaatcattccattttgatggattttaaaattttgtccagttttttactactataagcattgctgcaatgtacgaatgtactttttttttacacatttgtgattgtttcagtaggataaattcctagaagtagaaatactgtgtcaaatgtcaaattttatttttagatgttagcaaattgccttttaacatagttgcactaattttccaacagataatggaagaaggtactctttccccatgtatggcattgccaatctcatagatgaaaacaattatgttttttatattttgtgcttttcaaaaattagtaaaattaaggatcttttcatggccagtagttatttgtctttcttattttgtaaattgcctttttaagtatcttgtgctttttcatgtgttgatcatccttttcttaactaatttggaagagctcttaggaaaaaatcatttttattggtcgtagtgctgaaaatatttttctgtttcttttttgtttttcttttcagtttcttattttgagatttaaaatgtcaaagggagtttttctttattcatgttgctgtatttatttatgtttcccattatggcttttgggcctcacctactccaaattataaaaatgcttatctgtattttcttttcctgattggtgatttttaaccagtttgattgtttggttgattgagacagggtcttgctctgtcagactgaagtgatcctcagtctcagactcaagtgatactcagtctctgagtagctgggactacaggtgcatgctaccactactggcttttttttttttttttctgagacagagtattgctttgtcacccaggctggagtacagtggtgtgagcacagctcactgcagccttgacctcccaggctcaagtgatcttccactttaaccacctgagtagcggggacaacaggcacatgccaccactcctggcttttttttttttttttttttatgtggagacaaagtctcattatgttgcccaggctagtctcaaactcaagtgattttcctgccttgcaaagtgctaggattataggtgtgagccaccgtgcccagcctcccagctaatttttaaattattcctagagacagagtcaacctatgttgcccaggctggtcttgaactcctggcctcaagcagtcctcccacagtgctaggattataggtgtgagctactgtgcctggccaaccagtttgatttaaattaaacccattctagatgatgtgtgacagctcaattttaatactaatctaaataggacctataattgtatgtaatggaaacttgattaatttcagaggaaacaatcagtttaaagatgatagagcaatttagagatgtgatgtatctcatatcccactgctttaaccccctaatattaacatattaacatttccttttgtcttttatttttttttagttgaggaaacgtgtgaagcttgaagggaaagaacttgaagaatacttggaaaaagagaaactaaagaaagaagctgccaaaaagcttgagcagtcaaaagagtgagtcattttcagacagattataaatttatggatgcaatttgagaagaatgtgtccttgacttaaatgtttcattgaaaatatttttaaattttcgtaagacttaattttgttacagacatctttcaaatgtctagaataccagatcctgtcagtgctaatattattatgcatttatttgttatgttttataaaatgtcagtccaataaagttgaatgttattccagtcatgcatcacttaatgatggggacagttctgagaaaagtgtcgttaggggatttagtcattgtgcaaacattaggatatatgtttacacaaaccttgatggtatagcctactgtgtatccagagtatatgatatggcccattgttcctaggctacaaacctgtacagcatgttactgtactgaatactgtaggccattgtaacacaatgttaagtatttgtgtatctaaatgtatctaaacatagaaaaggtacagtaatcttatgggacctctgttgtatatgtggtctattgttgttgaccgacataactgtatattatcatttaatattgaattaataatattgagtatggattcagtaataaattgataaatattaatttaaaatatctttgaaactttatgaccttgatctattctaaaatcctcctagggcagatatagattccagtgatgagagtgatattgaggaagatattgaccagccatcagctcataagacgaagcatgacttgatgatgaaaggtgaaggcagtcgtaaaggaagttttttcaaacaggcaaaaaagtcctatcctatgtttcctgccccagaagaaagaattaaatgggatgaatatggagagattatcaagtatgtgagcaaaacaaacttttctctcttacaaattggaggtattaactgtgttatcatttcatttcagtgaatttgatctttcacttgatctttctagtcacatgtatggggttagcttctgagtacctcagcctgaagacacagaagacttgtaacttgaaacataaaaatagagatgctgagaaacatctagagaatattgagagaaaactggcagtttatgacttagttgtgtaaaggtttaaaaacatgatcacgtgatcaagacttttttcccccacttaaaaagagaggaagatgtaggataggaagaactttggggctgtgtgtggtggctcatgcctgtaatcccaacactttgggaggccgagatgggaggatcacttgagctcaggagtttgagaccagcccaggcaatatagtgagacccccatctctatctttaaaaaaaaaaaaagaactttggatggctggtgattgcatttccaatggattatgtcttaagtattatacaagttttatgagattaagaggaatgtgagatagcatgagtgaaatcatggaaaaatctacaaaatctatactgactattagaaaaacaactgcaatcacatgttgtaattgcaaatttgaaaacactactatcctgtgtggaaaataaaaaaagaaaaacatgatacaggccaggtgtggtggctcacgcctgtaatcccagcactttgggaggccgaggcaggtggatcatgaggtcaggagttcaggaccagcctggccaagatggtgaaaccacatctccactaaaaatacaaaaaaattagccgggcgtgatggcaggcacctgtaatcctagctactctgggggctgaggcagagaattgcttgaacagggaggcggaggttgcagtgagccgagatggcgccaccacactccagcctgggtgacagagggagactctacctcaaaaaaaaccaaaaaacgcaatacatacagccatctggtaattgatatgaaattgcatcagctttggatgaaatgtatatttaaatcttgagatatgtgaggactccaaaaattatgccacctactagtcatatatgttatgtagtattagcttgctttttactgcttctaattagagacttattatttagaccagaggatttcttagtgccagagcttcaagctactgaagaagaaaaaagcaaattagaatctggtttgacaaatggagatgaacctatggatcaggatttatctgatgttcctactaaatgtatttctacaacagagtctattgaaataaagtaagtgcttttgtgacattttgaaaatagattataagataaaatttcaagcatttgaattatataatttacattatgtcaagcaaaatttctgaatattctttagtaagtttgtgcttttaaaatttatttttgtatgaagagacttgtgaagtatggtggcatgatattttctcttcattaatggtatttgaatgccaaagtaattgaattggtggtggtggggggtgcttaaattgtaacattaaattgtacatttatatgaagaaaaattatttttggcctttttattctgtaagcaggtgaaagggaataatgtgactcacagtttaatttttctgagtaactgcttgtttcataaaatatactccttaacttaaacatctctaagaccctaatgtctggaaaatactgttgtgatctgaagtagttagaaaccttttttctcccgctttctacttagttaaataataccagtaagtgatcattttggaatttcttttaagtcatcagagaacaaagttttttatttgtccagtaatatcatttagtatatatttttgggtgtagataaaatctaaataatacagatagggccgggcacggtggctgatgcctgtaatcccagcactttggtaggccgagataggctgatcactcgagatcaggagtttgagaccagcctggccaacatggtgaaatctcatctctactgaaaatgcaaaattatccctgcgtggtggtgcatgcctataatcccagttacttgggaggctgagtcaggagaatcacttgaacctgggaggtagaggttgcaatgagcgaagatcatgctactgcactctagcctgggcaaaagagcgagacccaatctcagaaaaataaaaacaaaaataaaataaatcatacagatactataacatgtgtatttctcaaatcctagtgttatatattgtatacatgataaaagccatttttttttagaattatgagaaaagtaatcttgaataatcatatctaattacagagcccgggttacctacatagactatgaaggacgctctgatggggattccattaaaaaaatcattaatcagatgaaaccacgacagttgatcatcgtccatggcccaccagaggccagtcaagatctggcagagtgctgtcgcgcctttggtgggaaagatattaaagtgtacatgccaaagctacatgaaacagttgatgccactagtgaaactcacatctaccaggtaaacatgccaggagttgccattgagtagaaataagtactttttgttgcaggttaggacagataacattagaaataccgagatgtgtgagacagacatggatggtctcctgccctagcagacctcatagggtatggggcttagaacaaggaaataccatttatcatgttgttgtgccactgagagaagaagtacaggatgctatgagagtatcaagaggggaaaccacccacatttagaggtttagaaaaggtttcctacaggaagtgataactaatcctaactgatgtttagatgggttgtcaggacagacagagtaggaaagggggggaagagcgttctaggcagagggaaccatatttgcaaaagtacagaggtgaggaaaatgattaagaattcaaaagttttagaagaattcccggatatcaaggttctactcctaattggaacaaatggagatggataccaaatataggactagcacagtagagagataaattttgtctggtaatgggagatggtgtcagtttaaggccagagtgatgtctatatctggaagaaatggatgtgcacataccaggcaggaaatttattctgggcagagtaagaagaagcaaccttccaagaatatggagatgtgaaattctgtggtatattcaggaaaggacaagcagttcagtacctactgaagtatgccaagtactagaggatgggagtgatcagtggttctcaaccttgactgcacataagaatcatctggggagcttcgtgagggtcagagggactcagtttttctggtcttaatcttaccagttatgttagaaacactggatatgacgctctgatatactttttgttttaattgccatgtgattccattttgtagtcagggttaagaatctctattttggaaagtaggcaggggcccaatgatctgcaggtaatgaggtcattgcaggtcattgtgggactcagatgagtgaaagattttccaattttaacatattaccagaggtagaaaatgataataggttatatttaatttgttaatatgtattctgtgggttttatttctctccccctcctttgcatgtctaggtgaggttaaaagactcacttgtcagctctcttcagttttgtaaggcaaaagatgctgaattagcttggatagatggtgtcttagatatgagagtttccaaagtggacacaggggttattttagaagaaggagaactaaaggatgatggagaagactcagagatgcaagtggaagctccctcagattctagcgttatagcacaacaaaaggccatgaaaagtctgttcggagatgatgaaaaagaaacaggtgaagaaagtgagatcattcctactttggaacccttgccacctcatgaggtaaaaaaagcatgtgcttttttgatttcttcctgaatttgtcatccttctagttttcatgtcttttggtttttttccccccttctaaaactaagtgggtctgtggaaccttttatatttttaaccatttaaaatatatgtcagctgggggcagtgactcacgcctgtaatcccagcactttgggaggctgaggtgggagaattgcttgaggccaggagctctacatcagcctgattatagggacaccctgtcagaaacctagtcggcatggtggcatgcacctgtaatctcagcttagaaggctgaggcaggaggattgcttgagctcaggagttcgagactacagtgagccacaattgtgccactgcatctagcctatatgatagagtgagaccctgtcttgaacataaaatatgtctcacatttgggctgattttggagtttttaaaaaagagaacttgtgacatgcttctgtgtgtatgtctctgtgtatatattaattctatatagctaaggaatgacatatctttagcaaatcttttaaggtacataattgtttcatgattttttttttttggtctggatttttaaattttaagtttgatgattgtgaggatcacctgcctgcttccagtcaggagatttatagttttctaagaaagtcatactgttttttttttgttttgttttgttttttgagatggagtctcgctctgttgcccaggattgagtgcagtggtgtgatcttgtctcactgcaacctccgcctcccgggttcaagcgattctcctgcctcagcctcccaagtagctgggattacaggcatgagccactgggcccggctagtttttgtacttttagtagaaacggggttttgccatgttggccaggctggtcttgaactcctgacctcaggtgatccacccatctcagcctcccaaagtgctgggattacaggcgtgagccaatgcacccagccaatagtcatacctccatttttttatgttattcagttcaaataacttttggttttgatatagttagaaatctttaagtatagatataatttagtctagcatttacatattcttgagaggtatctagttaactagcaagattctaggtaattaaacttggaaaaatattaaaactatgaatcctacatgcatgtcaagtgatgtcttcagccctactatgaaattaagaatagagagacagcctctgttgttggattcccttctagtacaaccctcaaaattgggaggaggaataagaatatttttttcttctgtgctaaagctaatgctcttcaaagtaatgtcaaagcagaaagcagcagcattaggcaagaaccactttcgttactgattgtagaacctatggcatccattacatttgctctgaggaaggagggacagggaaaatgggattggggaggaaacgtcttttgaagtaagcaaatgactgggatctagaaaatgaatttttggttcagtcctgcccatggcacgctagttgaccccattatgcaagtgggtgagtgaagagcctaacattaccaaacgtctctgttatgatgaggcatgactaacaaaactgattgtgaaacagaaaatgtgaagggctttgttaaataatgttaaataatggggtaaaatttagaataacaacttggaatgtgatttacagtcttgaaatgatctgtcaaaggacttcagggaataatagaaaatctcttagagataatgtagtattttactttattcagtacagttgtatgtctggtgttttacttgaagttattctttcccctttgaccttatctaaggttcctggacatcagtcagtttttatgaatgaaccaaggctgtcagacttcaagcaagttctcttacgggaggggattcaagctgaatttgtaggaggtgtacttgtttgcaacaatcaagtagcagtccgcagagtaagtgtgttttcaataagggctgaattgaacacatacgtctgatgttttgtcattttgaaattctgtaattcttgtttggtattttcacaaaactgaagatcagtaatttatattcatgatcatgacctcaaaggcttacagaagtcttattgacttgaaggcttatgaaagactcttgaagaaatgatatataattttattgtaaattttaattatttgaatcttctgacatttatgtctatgtaaaattcatgacttcaatattatatccatatgctgtgaatcagagcaacccatgtcctgaccaatcataaagtaatctatttcatatatttcggttattatgtctgcatattaatgaatagaaaatgtactaaagaattttttttatttggtttctagacggaaactggacgcattggattagaaggctgcctttgtcaagatttttataggataagagaccttttatatgaacaatatgccattgtataaaggacatgatgtcaagaagtatctgcttgacctttctaagaaaaagggattcttatcttactctgagcttttgatgttttgttttgtaacatacaaaaagaatctgccagaaaaacttacatgtatcagatttttaaaaatataaatagagaacattttgcaaatgctcaaatgagcattctatcttttggctttcagagtgatagagctcctaacaggtgtacaggcccaagagttgaaggtgattggttttctttacagactccttgttctctagaagggctttttacttgaataaaacaatgcaacttagcaaaccaatttatggccttagagaaacatttttgcatgagttcttacaaactgtttgttatattttctggaatgataagtgagaattatttagaaaagacatgctccaaaaaaaaaacaaaactgataaaacagtttttcgaaacttacttttaaaagcatacgtgctatgactctctccagtttgaatatgcaattgttttcacaggcaggatgtctgttttctgcctgtatttcccagtgatttactctagggtaaggtagtacacatttggttcagaaattaatttttatttctcctatatcttgttttatcaagattttgttgtggcatttcaatgtaaattataacaccatcatttgagtatacataattcaaaagaactacttgatgcagtatagtcttaagggttctgcatacattttagaaacatcttagccgtaagttaggtcctgtgttaaactgtttagtgctctgtttttaagaaaacaaatgttgaacctcacacttttatgtggtgacagtgtaatttaattaaaaggtgtaaatgttttcatctcttaggcttgctgtctcctaaggtcacccaagcagtggttggattttatacacattactactaaaataatactgaagttggataaggttatcctttctgtatttgcgtctttcttgtgactaaccaccctgatatagtattaaccactgtgttcaagagtaaaaacaatatatgcaattttcattgaacttaaagagtgaaaaccatgtaaactattgaaactattgtaatccattaatgcttttttagaatggcagaccttgatgtttatttctcaaatggttaagccctcttctttactcttaatttttttttgagacagagtcacccaggctggagtgcagtggtgagattttggctcactataacctcttcctccagggttcaagtgattctcccacctcagcctcccaagtagctgggactacgggcacatgccactgcacctggctaatttttatatttttggtagagacagggtttcaccatgttggccaggctggtctcaaactcctgacctcaagcgatccacccacctaggcctcccaaagtgctgggattacaggcatgaatcaccacaactagcctacccttagatttttggaaggatcgatcttatttaactatgtgtggaacaacccagtaatatcagactcgaattactatttcattctatttcaaatgcttataaagctactattgtagattatagtgttaatgcaaagtttacagacttttgatatggaaaaccagataaaacaatgttacaaaaggcaaatataaagagtatgttttctttttagtgctttggaaaaatttcacttaaactcttattactgtatagattaagccctataatgctatttatattccaggggaacgaaaatctgaatttgttttatgatttaaagcatctggtttgcatattgtattgtaatactgatacagtttggctgtgtccccaccaaattgaattgtgttaatagttcccataatccctacgtgttgtgggagggacccagtgggcagtaatttaatcatggtggtggttaccctcatgctgttcttgtgatggtgagttctcatgagatctgatgggtgtttttttttgttttgttttttgttttttgagatggagttttgctcttgttgcccagactggagtgcaatggcacacgatctcggctcaccgcaacctctgcctcctgggttcaagcgattctcctgcctcagcatctcgagtagctgggattacaggcatgcaccaccacgcccagctaattttgtatttttagtagagacggggtttctccatgttggttaggctggcctcaaactcccgacctcaggtgatccgcccgcctgggcctcccaaagtgctgggattacaggcgtgagccactgctcctggcccaagatctgatggttttgtaagggaattttccccctttgcttggcacttcttcctgctgccatgtgaagaaggatgtgtttgcttccccttccaccatgattgtaagtttcatgaggcctccccagcctgtgggactgtgagtcaattaaacgtgtttactttataaattacccagtctcaggcaattctttatagcagtgtgagaacagactaatatgaataccaatactgaaaaattgtttcttgcctcaccttgtcctatgaacaggaattaaattttaaagtattgccttaagatggctgtgctaaataataatcattgcaagagcaatacttttacctgtttctagatgacaatattactaaaatttctcaaatgaagactttgttttagcttcaattacttcagaaaatataaattttaaagatgactatgagataaatcatgaactcagtggaattttcagatgagatggggcgcgttcagggtggtatgactgtagacggaattttcagatctttgttatttagaagcaagtataggtataacgtggactatcaactgatatctgcaaataatttggttaaaatgaaatttgattgtagtatttgttgctgtaggattataaatgtcaaatatcattgtaaacatttctatatttttagaaatatcttgggtggcctgaaacagaagtgaggaaatcaattttttaaggtgagccatttggcttttttaaaaaattgagattcaacttacataccataaagttcactcttctaaagtgtacaattcattggtgttagtatatttacagagttgtacaactattaccactatataatcccagaacactttcatcactccaaaaagaaacaccatacccactaccagtcactcctcatgcccccttcctatgacccctggcagccattaatctactttctgtctccttgaatttggattttctggacacttcataaaaattgaataatacaatatatgaactttta

SEQ ID NO: 1061 - DNA, 667 bp, Homo sapiens
tttcagagtgcatcactgttgtaacatgtatcagtaccctttttgtgactgaatattattccaccgaatggatataccacattttacttatccattcaaccgttgatgtacatttgagttgattccaaattttggctattaagaatgctgctctgaacattcatgtgcaagtttttttttttttgtatgtacatatgttttcaattttcttggatatatatctaagaattagaattgctggatcatacagtaattctgcttaaccttttgaggagctgccaggctgttttccaaagtggctacaacattttgcatttccaccagcatgtgtttgagggttccattttctcctcattcttgacaacatttattactccctttttaaattttagtcatcatagtgtgggtgaagaagtgtctcactgaggttttgatttgcatttccttaatgactgatgatgtggagcctctttccatgtgtttattgactttttatatattttggagtaatatctgttcatatcctttgtccattttcaatttgtttatgttcatatcctttgtccattttcaatttgtttatctttactgttgagatgtaagagtttttttatatattttctggatactaaaccattatatattgatttgcaagtattttattcca

SEQ ID NO: 1062 - DNA, 5825 bp, Homo sapiens
tttcagattcttcatgtttttatttctctcagaactttaaaatgtgaacattcgataatctagccagtctttacttccaggtaacttcttcactgggttgcaattccctgtgtggaaagcaaaaaaggaagaaatggaaaaactgtaaataaaactgtgatacgagataaaaggggaagtcagaagaatgattgcaatatttcattttctttttttttttttttttttttgagacgaagtctggctttgtagcccaggctggagtgcagtggcacgatcttggctcactgcaaactccacctcctggcttcaagcgattatcctgcctcaccctcccaagtagctgggattacagctgtgtgccaccacaccgagctaattttttatatttttggtagagacggggtttcaccatgttggccaggctggtctcgaactcctgacctcaaggaatccacctgcctcggcctcccaaagtgctaggattacaggtgtgagccaccgcgcccggtcaatattttattttctattacaccgatccatttaaaaaatttacatattagattcatcatatgtattcttttcattcatgattttaacttttaccatattgttagcttcatttttctgggttaaagaattgtaattacttagtttatctttatatgaaagctattatctctgctcagtgagttcattcgaaatgttttctaaaccctttccagcttattttctttcttgaaatccctgatttgtgaatcacttctaccatctctccatacccactgtggatgctgctcagttctcttgcccctcaggcttcctcctacccagctgtatgcccactggcaggcatcctgtcttgctaactggaactctctgctgccagaggagccatctctagaggcacaatgggaccaggcagctgccagttgctatcactctaccaccaggtctaaagctctcaggtagtgctgctaagaacacagcacctagctgctgttattactatttatctcagctatagcatgtcttaagtaagataatatatgacaatatatgtggaagctgtatataagctaggttttggccagctacttttaaactgtttctatattaaaatgcactttgaattaaaaaaagacgatactttcaaagacctgaaacagcctattcattaaatgaagactttaaattctagaggtaatcatactgttttatccaaggattcaataacaaacaagactaaaaacagtatcatttgaatctaagtcctcaagggggaaaaattaccccttctgtttatttttggcacatatcaaaaagaatattccccaaatttggccaattgctggtttaaaaaaatgcagactaaccttttaaataacatactcttgttccggaaggcagttagccgttcatcactctttctgtctaaataacatccaatgacaaatcccatagggacaagaacatgaacccagtggtcccgcacaatctgaagtaagttcaccatgatagctaaaagaaaaaaaaattatcagaaatacaactgctttgttttttttttgaaatagcttttaaattgcatctgggccaggtgcggtggttcatgcctgtaatcctagcactttgggatgctgaggtgggcagatcacttgagattaggagttcgagaccagcctggccaacatggcaaaaccccatttctactaaaagcacaaaaattagccgggtgtggtggtgcgcgtctgttatcccagctactggagaggctgaggcaggagaattgcttgaacccaggaggcggaggttgcagtgagccaagatcgtgccactgtacttcagcctgggcgacagagcaagactccatctcaataaaataaataaattgcatctgaaacaagaagatgatagacatagatgtaatagatgttaaaagcctaatacgcctctttgtttgcctggcatcagaatgtagtataatactttaaaatctaattgatgaagattacatacgggacaatgattaatataaaattacaccacactgggtctatttattacattttactactagcttcaatagtgatgtgatacgatacagagcagagaaacagagatggtatgtaaaaaaattctacctgcaacagctgattgtttgcaccctcctcatgttgttttggaacttttttttgtaaaagagacaaggtcttgctatgttgcccaggctggagggcagtggctattcacaggcactacagctctcaactcccgggctcaagcattcctcctgcctcagcctcccaagtagctgggactacaggcatacaccactgcacctggctctcatttaggacttttacttgtgtaaaacatatttagaacctctcacaatgcaaaaacaaatttaatacaattttgccagaaatggaattctttaggtaaagctgtaattactgaaaactaaatttagaaaggaaattaaaagatatgagagaaaaaagaaaactatattcaataatgtcactgtagatatgaatataaattactctaaaaaaggtaaaggggccgggtgtagtggctcacgcctgtaatcccagcactttgggaggctgaggcgggtggacgacaacaaggtcaggagttcgagaccagcctggccaacatggtgaaactccatctctactaaaaatacaaaaattaggtgggcgtagtggcacatgcctgtagtcccagttactcaggaggctgaggcaggagaattgcttgaactcgggaggcagaggttgcagtgagctgagatgacgccactacactccagcctgggggatacagcgagtctctgtctcagaaaaaaaagaaagaaaaaaaaaggcaaagggagaagaaaatttacttttatagagtgactactaggtggctcatgcctgtaaccacagcactttgggagactaaggcggatggatcgcttgagcctaggagcttgagactagcctggttaacatggcaaaaccctgtctctacaaaaaatcaaaaaattagctgggtgtggtagtatatgcctgtagtcccagctacttcggaggctgaggtgggaggattgcttgagcccaagagacggaggttgcaatgacctgagatcacaccactgtactctagcctggacgacagagcgtgatgctgtctcaaaaaaaaaaaaaagactactaggttactaggtaccagagccatcatctatttctatacgtaatgtgaaataactattatttacattttacagataagaaaacagcttaatccaaatagctattaagtacagagctggagttcaaattcagcttcactctacagctctggctgctattatagcccatgcctaagaaaccccttcctgaattgatgtttatggtacttaaaagcttttaaatgctgagtttccagaaggtagatgaggaggaatagaactataggtttttccttatccgaaatgcttgggacccgaagtgttttcgattttttgattttgaaatatttgcatgcacataatgagctatcttggggataggaccgaattaaaacataaaattcatttgtgttttatatataccttatacacatagcctgaaggtaatcttatatgaaacttttttttttttttaaatagtctcgctctgtcacctaggatggagtgcagtggagttataatagtccactgcagtcttgaactcctgagctcaagtgatcttcccacctcaatcttctgagaagctggagctacgggtgctaatttaaaaaaattctttaaacatttttttttgtagagacaagatcttgctatgttgcccaggctggtctcaaacttgtggccccaagtttcacatatgggggcattttggatttccaacattctgatcagggatactgaacctgtaatagacatcatgtggaaaataaattgcacaattcaataaaaacatagttggattgccaattttctgtaaaaattcgtgcatacagatgaattcaaaatacacctgtgtgcgtttggactaaactaataaatcatgtacaatgactaagaagacatatgacaacatcctagaaagacaatacattattgccaacaaaagtgcttagcactaagctgtgctaggactatgtagactgaatttctgcctctcctcttacactggcatgcttatacaattcatacttttttctttcctttttttttttttattttgagacgaagtttcgctcttgttgcctaggccggagtgcaatggcgcaatcttggctcacagcaacctctgcctctcggattcaagggattctcctacctcagcctcccaagtagctgggattacaggtatgcgccaccatgcccagctaattttgtatttttggtagagacgaggtttctccatgttggtcaggctggtcttgaattcccaacctcaggtggtccgcccgcctaggcctcccaaagtgctgggattacaggcgtgagccaccgcgcccggccgttcaagtgattttcttgcctcagccttccgagtagctgggactataggcaggtgccaccacgcccggctaatttttgtatttttaagtagagatggggtttcactgttggccgggctggtctcaaactcctgacctcttgatccggccacctcggccttccaaagtgttgggataacaggcgtgagccactaagcctggccatacttttgtcttttaaaaggcaaggtgggccaggtgcagtggctcacgcctgttatcccagcactttgggatgctgaggcgggtggatcacgagatcaggagttcgagaccagcctggccaacatagtgaaaccctcgtctctactaaatatacaaaaaattagccgggtgtggtggcgggcgcctgtaatcccagctacttgggctgctgagacgggagaatcgcttgaacccgggaggcggaggttggagtgagccgagattgcaccattgcactccagcctgggtgacaagagtgaatctctgtctcaaaaataaaaaagcaaagtaaaagggtaagcacatcatttaggcgcaacggtgtcggctcaagaggatttgcgatttggaagagagcgaggttagcgagaagacagaaggctggaacttggacgaatgtaagctgctcgcggaggggaggcagcgtcttccctgcttcaggccaggcgtgggatccgggccggtcttctctccagtccggttagcgggcggtcactgggtcacatctctacggacgttttcctgttatgacagcctcagaaaaccctttccaaaagctccggcccggaaatcccatcctccacccgaagaaaaccccattttcctttcccgtcaccttcgttcggaagccccggggaagcccagaccacccctccacacatgcacagcaccgagggcttgcctagaaccctccccgccaccgtcgccgtgatcctcgtcgcggcggccccccgggctccccaaacccacctgcagcctcagcgcctacagcgaccccgagaccaagggcaacagggaactcaacccgcgccagtggaagctgcgacctcgggacctgccattcgccgcgcccgcacggagcagaggggtgacgccagcaaatcatactactttttcctcctcagggttgactcctctcattttttttttttttagcttccaaacattaccaataatttctgaataaaatttcgctccagacagacgaggcgtgcaggcgtgaccgccgtcgccttccgacagcaccgtgcccaccccccggagatggtctcgcc

SEQ ID NO: 1063 - DNA, 5824 bp, Homo sapiens
tttcagattcttcatgtttttatttctctcagaactttaaaatgtgaacattcgataatctagccagtctttacttccaggtaacttcttcactgggttgcaattccctgtgtggaaagcaaaaaaggaagaaatggaaaaactgtaaataaaactgtgatacgagataaaaggggaagtcagaagaatgattgcaatatttcattttcttttttttttttttttttttgagacgaagtctggctttgtagcccaggctggagtgcagtggcacgatcttggctcactgcaaactccacctcctggcttcaagcgattatcctgcctcaccctcccaagtagctgggattacagctgtgtgccaccacaccgagctaattttttatatttttggtagagacggggtttcaccatgttggccaggctggtctcgaactcctgacctcaaggaatccacctgcctcggcctcccaaagtgctaggattacaggtgtgagccaccgcgcccggtcaatattttattttctattacaccgatccatttaaaaaatttacatattagattcatcatatgtattcttttcattcatgattttaacttttaccatattgttagcttcatttttctgggttaaagaattgtaattacttagtttatctttatatgaaagctattatctctgctcagtgagttcattcgaaatgttttctaaaccctttccagcttattttctttcttgaaatccctgatttgtgaatcacttctaccatctctccatacccactgtggatgctgctcagttctcttgcccctcaggcttcctcctacccagctgtatgcccactggcaggcatcctgtcttgctaactggaactctctgctgccagaggagccatctctagaggcacaatgggaccaggcagctgccagttgctatcactctaccaccaggtctaaagctctcaggtagtgctgctaagaacacagcacctagctgctgttattactatttatctcagctatagcatgtcttaagtaagataatatatgacaatatatgtggaagctgtatataagctaggttttggccagctacttttaaactgtttctatattaaaatgcactttgaattaaaaaaagacgatactttcaaagacctgaaacagcctattcattaaatgaagactttaaattctagaggtaatcatactgttttatccaaggattcaataacaaacaagactaaaaacagtatcatttgaatctaagtcctcaagggggaaaaattaccccttctgtttatttttggcacatatcaaaaagaatattccccaaatttggccaattgctggtttaaaaaaatgcagactaaccttttaaataacatactcttgttccggaaggcagttagccgttcatcactctttctgtctaaataacatccaatgacaaatcccatagggacaagaacatgaacccagtggtcccgcacaatctgaagtaagttcaccatgatagctaaaagaaaaaaaaattatcagaaatacaactgctttgttttttttttgaaatagcttttaaattgcatctgggccaggtgcggtggttcatgcctgtaatcctagcactttgggatgctgaggtgggcagatcacttgagattaggagttcgagaccagcctggccaacatggcaaaaccccatttctactaaaagcacaaaaattagccgggtgtggtggtgcgcgtctgttatcccagctactggagaggctgaggcaggagaattgcttgaacccaggaggcggaggttgcagtgagccaagatcgtgccactgtacttcagcctgggcgacagagcaagactccatctcaataaaataaataaattgcatctgaaacaagaagatgatagacatagatgtaatagatgttaaaagcctaatacgcctctttgtttgcctggcatcagaatgtagtataatactttaaaatctaattgatgaagattacatacgggacaatgattaatataaaattacaccacactgggtctatttattacattttactactagcttcaatagtgatgtgatacgatacagagcagagaaacagagatggtatgtaaaaaaattctacctgcaacagctgattgtttgcaccctcctcatgttgttttggaacttttttttgtaaaagagacaaggtcttgctatgttgcccaggctggagggcagtggctattcacaggcactacagctctcaactcccgggctcaagcattcctcctgcctcagcctcccaagtagctgggactacaggcatacaccactgcacctggctctcatttaggacttttacttgtgtaaaacatatttagaacctctcacaatgcaaaaacaaatttaatacaattttgccagaaatggaattctttaggtaaagctgtaattactgaaaactaaatttagaaaggaaattaaaagatatgagagaaaaaagaaaactatattcaataatgtcactgtagatatgaatataaattactctaaaaaaggtaaaggggccgggtgtagtggctcacgcctgtaatcccagcactttgggaggctgaggcgggtggacgacaacaaggtcaggagttcgagaccagcctggccaacatggtgaaactccatctctactaaaaatacaaaaattaggtgggcgtagtggcacatgcctgtagtcccagttactcaggaggctgaggcaggagaattgcttgaactcgggaggcagaggttgcagtgagctgagatgacgccactacactccagcctgggggatacagcgagtctctgtctcagaaaaaaaagaaagaaaaaaaaaggcaaagggagaagaaaatttacttttatagagtgactactaggtggctcatgcctgtaaccacagcactttgggagactaaggcggatggatcgcttgagcctaggagcttgagactagcctggttaacatggcaaaaccctgtctctacaaaaaatcaaaaaattagctgggtgtggtagtatatgcctgtagtcccagctacttcggaggctgaggtgggaggattgcttgagcccaagagacggaggttgcaatgacctgagatcacaccactgtactctagcctggacgacagagcgtgatgctgtctcaaaaaaaaaaaaaagactactaggttactaggtaccagagccatcatctatttctatacgtaatgtgaaataactattatttacattttacagataagaaaacagcttaatccaaatagctattaagtacagagctggagttcaaattcagcttcactctacagctctggctgctattatagcccatgcctaagaaaccccttcctgaattgatgtttatggtacttaaaagcttttaaatgctgagtttccagaaggtagatgaggaggaatagaactataggtttttccttatccgaaatgcttgggacccgaagtgttttcgattttttgattttgaaatatttgcatgcacataatgagctatcttggggataggaccgaattaaaacataaaattcatttgtgttttatatataccttatacacatagcctgaaggtaatcttatatgaaacttttttttttttttaaatagtctcgctctgtcacctaggatggagtgcagtggagttataatagtccactgcagtcttgaactcctgagctcaagtgatcttcccacctcaatcttctgagaagctggagctacgggtgctaatttaaaaaaattctttaaacatttttttttgtagagacaagatcttgctatgttgcccaggctggtctcaaacttgtggccccaagtttcacatatgggggcattttggatttccaacattctgatcagggatactgaacctgtaatagacatcatgtggaaaataaattgcacaattcaataaaaacatagttggattgccaattttctgtaaaaattcgtgcatacagatgaattcaaaatacacctgtgtgcgtttggactaaactaataaatcatgtacaatgactaagaagacatatgacaacatcctagaaagacaatacattattgccaacaaaagtgcttagcactaagctgtgctaggactatgtagactgaatttctgcctctcctcttacactggcatgcttatacaattcatacttttttctttcctttttttttttttattttgagacgaagtttcgctcttgttgcctaggccggagtgcaatggcgcaatcttggctcacagcaacctctgcctctcggattcaagggattctcctacctcagcctcccaagtagctgggattacaggtatgcgccaccatgcccagctaattttgtatttttggtagagacgaggtttctccatgttggtcaggctggtcttgaattcccaacctcaggtggtccgcccgcctaggcctcccaaagtgctgggattacaggcgtgagccaccgcgcccggccgttcaagtgattttcttgcctcagccttccgagtagctgggactataggcaggtgccaccacgcccggctaatttttgtatttttaagtagagatggggtttcactgttggccgggctggtctcaaactcctgacctcttgatccggccacctcggccttccaaagtgttgggattacaggcgtgagccactaagcctggccatacttttgtcttttaaaaggcaaggtgggccaggtgcagtggctcacgcctgtaatcccagcactttgggatgctgaggcgggtggatcacgagatcaggagttcgagaccagcctggccaacatagtgaaaccctcgtctctactaaatatacaaaaaattagccgggtgtggtggcgggcgcctgtaatcccagctacttgggctgctgagacgggagaatcgcttgaacccgggaggcggaggttggagtgagccgagattgcaccattgcactccagcctgggtgacaagagtgaatctctgtctcaaaaataaaaaagcaaagtaaaagggtaagcacatcatttaggcgcaacggtgtcggctcaagaggatttgcgatttggaagagagcgaggttagcgagaagacagaaggctggaacttggacgaatgtaagctgctcgcggaggggaggcagcgtcttccctgcttcaggccaggcgtgggatccgggccggtcttctctccagtccggttagcgggcggtcactgggtcacatctctacggacgttttcctgttatgacagcctcagaaaaccctttccaaaagctccggcccggaaatcccatcctccacccgaagaaaaccccattttcctttcccgtcaccttcgttcggaagccccggggaagcccagaccacccctccacacatgcacagcaccgagggcttgcctagaaccctccccgccaccgtcgccgtgatcctcgtcgcggcggccccccgggctccccaaacccacctgcagcctcagcgcctacagcgaccccgagaccaagggcaacagggaactcaacccgcgccagtggaagctgcgacctcgggacctgccattcgccgcgcccgcacggagcagaggggtgacgccagcaaatcatactactttttcctcctcagggttgactcctctcattttttttttttttagcttccaaacattaccaataatttctgaataaaatttcgctccagacagacgaggcgtgcaggcgtgaccgccgtcgccttccgacagcaccgtgcccaccccccggagatggtctcgcc

SEQ ID NO: 1064 - DNA, 667 bp, Homo sapiens; identical to SEQ ID NO: 1061

SEQ ID NO: 1065 - DNA, 1716 bp, Homo sapiens
ctgatgatgtaaaaggaaatacagagaaaagcaagcatccttctcccactcctgagcctgtaatcatagggcctagggcttctctgcagacagaacccagccaagacttttcgtaaatgccatgtgcacttcagggcttggtttgttctattatatttagggatgcggtgctgagatgcttgcctgcagaacagcaaaaacctctgacttcattattgttattcagagtaaccagggtcattgctctctggcttgccttaaagccagcaaaggcaattgcccatccctgggcttttggtctggaagagaccgttggcatcattattcagccccctcacttttcaggtaaggagctaatgaagacaacattcccagtgacacacggcaagttactgtggtgttggggtttcagtgtcaggagtctcctctcttcctctggcatttctgctactatgccaggctggctcctttcagtagacataacatcattgaaaaataccacaagtgcccctgtggagagcagagcagatagccattaaaattacaaaagcttatgctttttggcccaacatttccacttcaaggcattcaattcttcctatagatacactcatgtgagggtaaaatgatctctgtataaccttattctttgcaacactgattgtaataaggaaatattggaagcaacccagatgcctatgggtgggaggtgagttacataaattagggaccatccacacaaacagaatatgtgcagctgtgaaaagactgggccacctctccatgtgcaataggaacagctccatcttgccaggcgtggtggctcacacctgtaatcccagtactttgggaggtgaaggtggggcggatcccttgagcctaggcattccagaccagcctgggcaatgcagtgatatgctctcattgtgtaaataaaacaaaataatacattatttgctttgcagatgccactgccgccaggagccctgtaacatcagccatcgtcaaccccaccgtgttcttcaacatcaccgttgacggcaagcctttagacctgcgtctccttcaagctgtttgcagacaaggttccaaagccagcagaaaacttttgtgctctgagcactggagagaaaggatttggttataagagttcctgctttcacagaattattccagggtttatgtgtcagggtggtgacttcatacgccataatggcactggtggcaagtccatctatggggagaaatttgatgatgagaacttcatcctaaagcatacaggtcctggcatgttgtccatggcaaatgctggacccaatacaaatggttcccagtttttaatctgcactgccaagactgagtggttggatggcaagcttgtggtctttggcaaggtgaaggcatgaatattgtggaggccatggagtgctttgtgtccaggaatggcaagaccggccagaagatcaccattgctgactgtggacagctcttataagtttgacttgtgttttatcttaaccaccagaccattccttctgtagctcaggggagcaccctccaccccatttgctcccagtatcctagaatctttgtgctctcgctgcggttccctttgggttccatgttttccttgttcccttccatgcctagctggattgcagagttaagtttatgattatgaaataaaaactaaataacaaaataataataatagta

SEQ ID NO: 1066 - DNA, 491 bp, Homo sapiens
ggccccagacaggaaacatgagaaaagatgatcctttgggaccagctgacagataaaatgccacatgcacaaggaactaaataagggccgactctgctgaggcccggaagttctgctgcaggaagagggaagggaggctcacggggatcctctcctgatgcccaggtggctgcctctctctaggctgcactttttccagctgtgaaatgaggttgttgggatggggggggtcctttgtaaggtccgcggtgtaactcatttcttgcagagaattttgaatgcctttgcctcttcacagcatcctgcttcagacacttgacctgtggcgtgggtgttattatttcccacctcccagatgaagaaacagaggcacagagaagtaacttcccaaggtcacacagtggatctgtagaggacccaggatgtaggcccagttctgtctgacccaaagtctatttcttttagacacttttatactcactctggtaccc

SEQ ID NO: 1067 - DNA, 4333 bp, Homo sapiens
tccagattggaagtggtttttctgactcttattttggttttgtttgctttctgaaagttgttactgacctgaaagtgtagcgtcgtgaactggggaaggagagaagagaggcaggatgagaatcgtggagtgcggaggcaggtagcccgtggggtgcctcctgtgctcggtggagctggaagccgcttaggtgccagagctttttctgtgaccaaattctggcttttgaaataacccagtaacagttctctatcttttcattctgcccgctcctcccacagcctggtccctcagaggaaaggaaggacaaggagtgctttgcagcacgtgcccctggcggcgtcatggtactttcctggccctgctgcccctgcccgtccgtcttttatgatttttatttactcgtattggtttttttaaatttctattttttgcagaactgagcctttttctgccctgcctttctcctgtttgtctttcctttgtggttgatattgtgttgtcttctccaaagtatttgtcattagaaacttacagcaagcgtatactttttagcatgtcagtatttttattatgttgccctccttgtctttgataactgcctgtggacgctgtgtaaactttctggtaaaaatccttttttttccccctgtagtctctccatttcaaggactaaaacagtcttgcgttaagtaaaaacctgtgaccagagctgaaggaagactctaggactgaaaactgcaacagaaattagcacaatttgaaaacaaaacaaaattgcaaaagccttagttgctttttccacctaagaagttgatcaatggagaaaatgtccactggagtttgaataatgaactttgagtttgggtgcaagcaaatgactcagagaagggtccagctctcaagctgaatgacaaacatgctgttgtaaatttagtctcaggtgtaaatacccaagccctctggtacccagggagctggctggtctgtggtgcatgtgtgtccctgtgatggcaatcattgtagttgctggccttcagaagaattgaggatctgatggaggttttttatgtatttattttctgttcaccttgtgaccctgtgtcaaaatttataaagatacaaaaggcattactgaaatggtactttctgtaatttgatactatttggcttaatcatcttcacttgactatttgtaatactgttgtaatgttaactctgttaagtacccaagctgcttgtcttccaccaaagagtgctttattaacaagaatctgtgaaaatcacatttaaacactgttgcatgttgtaagaccaggtggtaccttagtaacctaaaacttgcaagagaatattaatggtagctttagaagactcaggaggagaaactgacttcagagttggaagatgttgcaagtcgttcctttttctgtccttcagggactgaagaactgggaggctgcccattgtttggttgccagtcatacaaattaaaatcatatttccttccatgaatggaagaaacacactattggtttttccccttggaaacagcaatcccaaataatgtcggcttacaaaaaaaaaaagttaccacttttttagagtccttccctgtaacattggattttttttttcccttatgagatccacctaaggccattgacgtggcctgcgatctcagtgacaatgatctgcttctggatctcactgttgcctttggttagggaacacaactagtaactctgcagagtgccttctcccgcagccctactggaacacagcagagtctgtgccatgaagcagttacagaaacagaattgatgtgctgctaaaaaaaaaaaaaaaaatggggcccgaaataaaagaatatatagtactcacctcagttccttccataagaagtgggtggtttaatgattgttaagccatttttgcctgtgccgggagcatggagggctgagatgtcgacaggcagtgggaaacaaatgccctcctaagccacaaggcgtgcgccagattagtaggcaactccattttaagaagctgcctttttcacaaaactggaagaaataaaagcggttggaataaacaagttaaaagtctttaatgcaaaaagtaattgaaaggcagtgcctccattttggtgtactttcttggaagaaagtataaaattgaccggcatcatgagagacggaagatgccgtgttctcagccaaacaagcaactctttccccgccaggcactgtcgggtggggtcaggccagcttttaaacactggggactggatcacagaaaaacagtggttttctgtccctggaaatgaataggcacaaagacccacttggctgtgggcagactactcttcaataagatttgggtgggaggaggaacattccttttgctattttgagctgagacaatataaatattcaaactgtgccatgcataaagcattgaattctcagggcacctcttcttccccttaccccttttaaggccatcccctccattaataataatccaggtagttgtgaaaatcgtgcttctatctgatcccttcttagtttggcttttcatcccatcagaacaagtaaacgtaggcgccacagctcttgtgagtactgtctccctcacggtgaatgagcctcctggtgtttcgtccaagaaaagaaagggtgtcactggaaccacagccctttttcattttataaactgcctcttcatgttgcctgctcaagtttccacctagaattgctatcactgtggctctttctaaaaatctttctatttaactggttcactgaaattagtcatagaaaacttgtgatttggtgaagaggcattccttgtaataaccaaatgacttgggatggtgtgcatagcaagggcagtgttacacttatgaggactgtctctagcatccaggaagtctctgggtctgagggatggaaagttcttcctgctatgaatgagagtggactcttcccctcacccccaactgaaaccacaaacaaccagaatcttctggaattctgacttagagtcgttgttatagaagaccttgttgctatggaacatgaaactgtgtgtcagatggagagatccccttaacctaagagccttaaatagccctgaaagtacactgggacggtttgcgatggaattaaaattggaagtgaatatttttaggtgctcttgaagctttctggggactcaaaattatcaaaagtcagggacagtccggaggaagagcgtctgcaaaactgggttcctagaagtatagacggacttagctttttgtagaatttggtgaggagcagcgcctcgtgagagcagaatggcctggcgtggccagtgcttcccggcagcacgcagctctgcggcctccagaattcccctgttctgagcttgatgcccctagcctgtcccctacctacttcctcccctcctctctagccctctcacaggggtgattgctacctctctgttttcttgggcctaggcaagttttagaggagttcccaagcattgttatgaggccagtgtgctcgctgggctgggcgggatggcctgggcttgtgtgtggcctgagggctctcctggggccttctcttttcccagtcacctttggagccacagaagcagtgcactcattggatgtctgttcttaacacagcttctctttctacattaaaaaaaatcattattgcattttggaaagcagtgctcatcaaaagcaacttttaaaacctattttattgttcctttaaatgttctctcccgctgaaactgccctggagaggctatctgctgctcttccatttacccacatcaggttattctccatgtcactcagtggagatgactccagatgtgtttaaagactggacaattcacctatactgtgtaggaaattacctccttaattacctggtagaattgtcagcagacatgttcatccgatgatagtactgcagttttctattaataatttgcagacttttatctaacctgcactcatgtacagattattaaaagttttaaaatgtaactgatcagtattgatcaatcattgtcttgatttttttttacagcgtatatttctaatcatattttttaaagccaagagaactggttgaatgaatgtttattttcctgaaggtatttttaagataaagcttcctaatggcgtgtaaactttgcatatgtatgtagtttgatacatattgtcacatttgaaaatcttgtgggttgtaactggttttatacaaaatatcgaatagtggaaattgtataattacaatcatgtaattaaaagtattaacccaac

SEQ ID NO: 1068 - DNA, 2184 bp, Homo sapiens
tccagattggaagtggtttttctgactcttattttggttttgtttgctttctgaaagttgttactgacctgaaagtgtagcgtcgtgaactggggaaggagagaagagaggcaggatgagaatcgtggagtgcggaggcaggtagcccgtggggtgcctcctgtgctcggtggagctggaagccgcttaggtgccagagctttttctgtgaccaaattctggcttttgaaataacccagtaacagttctctatcttttcattctgcccgctcctcccacagcctggtccctcagaggaaaggaaggacaaggagtgctttgcagcacgtgcccctggcggcgtcatggtactttcctggccctgctgcccctgcccgtccgtcttttatgatttttatttactcgtattggtttttttaaatttctattttttgcagaactgagcctttttctgccctgcctttctcctgtttgtctttcctttgtggttgatattgtgttgtcttctccaaagtatttgtcattagaaacttacagcaagcgtatactttttagcatgtcagtatttttattatgttgccctccttgtctttgataactgcctgtggacgctgtgtaaactttctggtaaaaatccttttttttccccctgtagtctctccatttcaaggactaaaacagtcttgcgttaagtaaaaacctgtgaccagagctgaaggaagactctaggactgaaaactgcaacagaaattagcacaatttgaaaacaaaacaaaattgcaaaagccttagttgctttttccacctaagaagttgatcaatggagaaaatgtccactggagtttgaataatgaactttgagtttgggtgcaagcaaatgactcagagaagggtccagctctcaagctgaatgacaaacatgctgttgtaaatttagtctcaggtgtaaatacccaagccctctggtacccacggagctggctggtctgtggtgcatgtgtgtccctgtgatggcaatcattgtagttgctggccttcagaagaattgaggatctgatggaggttttttatgtatttattttctgttcaccttgtgaccctgtgtcaaaatttataaagatacaaaaggcattactgaaatggtactttctgtaatttgatactatttggcttaatcatcttcacttgactatttgtaatactgttgtaatgttaactctgttaagtacccaagctgcttgtcttccaccaaagagtgctttattaacaagaatctgtgaaaatcacatttaaacactgttgcatgttgtaagaccaggtggtaccttagtaacctaaaacttgcaagagaatattaatggtagctttagaagactcaggaggagaaactgacttcagagttggaagatgttgcaagtcgttcctttttctgtccttcagggactgaagaactgggaggctgcccattgtttggttgccagtcatacaaattaaaatcatatttccttccatgaatggaagaaacacactattggtttttccccttggaaacagcaatcccaaataatgtcggcttacaaaaaaaaaaagttaccacttttttagagtccttccctgtaacattggattttttttttcccttatgagatccacctaaggccattgacgtggcctgcgatctcagtgacaatgatctgcttctggatctcactgttgcctttggttagggaacacaactagtaactctgcagagtgccttctcccgcagccctactggaacacagcagagtctgtgccatgaagcagttacagaaacagaattgatgtgctgctaaaaaaaaaaaaaaaatggggcccgaaataaaagaatatatagtactcacctcagttccttccataagaagtgggtggtttaatgattgttaagccatttttgcctgtgccgggagcatggagggctgagatgtcgacaggcagtgggaaacaaatgccctcctaagccacaaggcgtgcgccagattagtaggcaactccattttaagaagctgcctttttcacaaaactggaagaaataaaagcggttggaataaacaagttaaaagtctttaatgcaaaaagtaattgaaaggcagtgcctccattttggtgtactttcttggaagagaagtataaaattgaccggca

SEQ ID NO: 1069 - DNA, 3652 bp, Homo sapiens
aatgggctcaagattgttacattatgccaaatgaattgggagtcatacatttagtttagtacacgaagcagtaagtgaaaagagccatgcataacaattctgaagtatgggccgggtgcggtggctcgcgcctgtaatcccagcactttgggaggcggaggcaggtggaccacttgaggtcaggagtttgagaccagcctggccaacatagtgaaaccccgtctctactaaaaatacaaaaattagccaggtgtggtggcaggcacctgtggtcccagctactcgggaggctgaggcaggagaatcgcttaaacatgggaggcggaggtttcagtgagtcatgatcacaccactgtactccagcctgggcgacagagtgagactctgtctcaaaaaagaaaaaaaaaaaattctgaagtatgactctaattttgtaagcgtaagtatactatatatgtatagaaatatagagatgtataaatatttatatacctacaatacatctgtatttatagatgagtaagtttctatatatgcatagaaataagacaggaaaaatatgctatgatactaataaaagttctggttggtgggacagttgggatttttttcttttttatcgtcttattttccaatttttctacaataaatgaagggaaatgggagtgttttaactgacactttttggtgagccaagctattaaaaattcaggctgggcgcggtggctcacgcctgtaatcccaggactttgggaggccgaggcaggtagattatgaggtcaggagttcaagaccagcctggccaagatggtgaaactctgtctctactaaaaatacaaaaattagctgggtgcagtggcgggtgcctgtaatcccagctactcgggaggctgaggctggagaatcacttgaactttggaggcggaggttgcagtgagctgagatcgcgccattgcactctagcctgggcaacagagcaagactctgtctcaaaaaaaaaaaaatcaaataaaaagcctatcgttgatgacagttaattgttaattttgacatgtcttgaaggggcatattctttttaggtagagtgctcaggctttttttttttttttcctccttacatggagttgcacaggctggagagcagtagtgttttctcggctcactgcaaacttcgtcttccaggttcaaaccattctcctgcctcatcctcccgcctcatcctcccaagtagctgggattactacttgtgggtggcatgtgccaccacacctggctaatttttgtatttttagtagagacggggtttcaccattttggccaggctgatcttgaactcctgacctcaagtggtccacctgcctcagccccccaaagtgctgggattacaggcgtgagccacggcgcccggccgctcaggcttttgttaacagcgtagtgtgtcttgcacatttaattctgctgtttgcttttttagattatgctttttaggttacagaagagtagagtccgggagcctggctggcacttgccaggtcatatcgtcttcctgtgaggaaggaagggctggccttgcctctgtttttctatctaggtctcgttgcgttttcatgtcactctagtaacctgaactcctgcctctctggagaagtggttcctggttgcagcaagcatctgcctcaggtccctggcagggatgctttgagggtcctaaggtagatttcagagtcagtaatctggactgaatgttgaaatgacccaaagcagcttccaggaatttgggatagttctgaaaaccaaaaagacttcttttaaattccaaaatggactttcagagatgatgtggagagcaaaaggagtctaacagtgaggattaactgggactcacagtttatttccccaccttcctctaagtgggttctttctttgtgcctcttttgggactttgtcctgtgttcacatcaccctacctgttatccacctacagcttacaaaagaaaggcaaattatgtataggttttaagaattggagttagccaagctgtagcctggagcttttatcctactgaatattattcataatatcatactaaatagtattcatttctgtttggagggcaagagggaattagtatattggtgcacggtctgattctggacaaaatagtatgagctaagattgttgagtaaatttaaagtattgagttgaaatctttaaacagcagtagaaaaaaaaatagagcacccttttggggtcctttcatccctacctgcaacgtagcaggtttaccagttcctactggtttgtcatcatctctgcggcacatgggaacttgaccttccattttcatgttccttggcatccaggatgaagactccacccaaactcgctttgcgcttaattggtgcttttgatttttggttttactgagaggctcttcagctttggggaactttttcaaaaacgtcaaaagagcaattacttggggcagctgaaaaaataggagtgatgtcttaactatttgtctttgggaaaaggtgccactgtttctcacagaagatgactatcccctcgtgtatccatttgaagctgtgccacatcgaaacctaaatctcatgtggccacaggtctgggacggcggccaggcagcctgtgtggccctcggtcctgccagggctctgtgtggcaccttctcattcccttccctgagtctggagagggaggtgagtgggcttctctacctcccacttcctgttagagctataaatccatgctaacctttctcttttaagaattaataaatccagtgaataattggctccgttgaatcggcctgttttcagtgttctcacatgacctctctgaagagctctcttagaacagtcttggaaatttcatcatgccccgagtgagagcctgcagccacctcatttgctcgcattcactcatgtcttcacgcagcccttccgctggtgcgtgtttgttagcttatgctgtttcttttgggcaggctcttctttttttaaaatgataacttcattcattttctaagaaactggcatgtacaagttactttaattctgagttgtatcactaggaaccatcactttctgctgcagctgccaaaccaaacctaaggtccggggctctggagtgctttgtacctaattcttcatattgtgggggctggggagagaaatgctcaggttctttccttagcatcttttttttttttttttaaatgagacagagtctcactctgttacccaggctggagtgctgtggtgcgatcttggctcactacaacctccacctcccaggttgaagtgattctcctgcctcagcctcctgcatagctgggaatacaggcgtgcatcaccacgcctggctaaaaattttcttctgtatttttagtagagatgaggtttcaccatgttggccaggctggtcttgactcctaaccttaggtgatctgcctgcctcggcctctcaaagtgctgggattacaggtgtgagccacggcgcccggcctctttccttagcttctaaaaccacgagtgttttcaggagcccttcagttgggagcagctgcatctaggacctctaacttcttcagtgttctcgggtggctttgctggtgtcacacctgccact

SEQ ID NO: 1070 - DNA, 152 bp, Homo sapiens
attacaggtgtgagccacggcgcccggcctctttccttagcttctaaaaccacgagtgttttcaggagcccttcagttgggagcagctgcatctaggacctctaacttcttcagtgttctcgggtggctttgctggtgtcacacctgccact

SEQ ID NO: 1071 - DNA, 3484 bp, Homo sapiens
cataacaactctgttctttcctcctggcaggtgacagagctgaatgagccactgtcgaatgaggaacgaaaccttctgtctgtggcctacaagaacgttgtgggggcacgccgctcttcctggagggtcatcagtagcattgagcagaagacatctgcagacggcaatgagaagaagattgagatggtccgtgcgtaccgggagaagatagagaaggagttggaggctgtgtgccaggatgtgctgagcctgctggataactacctgatcaagaattgcagcgagacccagtacgagagcaaagtgttctacctgaagatgaaaggggactactaccgctacctggctgaagtggccaccggagagaaaagggcgacggtggtggagtcctccgagaaggcctacagcgaagcccacgagatcagcaaagagcacatgcagcccacccaccccatccgattaggcctggctcttaactactccgtcttctactatgagatccagaacgccccagagcaagcgtgccacttggccaagaccgcgttcgacgacgccatcgccgagcttgacaccctcaacgaggactcctacaaggactccacgctcatcatgcagctcctccgcgacaacctcacgctctggacgagcgaccagcaggacgacgatggcggcgaaggcaacaattaaggccccaggggaactggcagcgcacgcggatgctactactgcagtctttatttttttcccatgagttgggggtcgggtgggggagggaaagggagggatgaccttcccagggagaaacccacgacctgtcctgtctttgatcgcctctttgacatttttgccaaaataccactagtggaaagtcaggctagctgtgctggtattggaatagcagcctcacactggcgtctggactgttctgtagattcatgcaagtggagctgtctgtctctaatttaacttattgctagataatagggttttcagatgaaaagaaaacttaaagaggaatggccctcattcagtaagttctgtggttccagtaaggatttttatgtacatacgctctcgtctctcgttttgggtactttctatctcatctgtctcggctctgcatgttttccagggtgtagcctacagacatggaacagtgtaaatcccagactgacagacttagaacctgaggtctcattcatccttatggtttaggccttgccagttttccgaagtctctgattagttgacagtattaacactaaattgcagtttacagtatttctacattacagccatatgtaacatcaagccatcgattgtgtacttttcctttgctagttgtttgggctttaacatccttattcagccttatccaggttggttttgctgttgatcggtctcctaggctaaatgagaatgaaagcgacttcaggtcaggtggctgtgggattttttttttttggtccttctttcctcttaacgtaaatccaccaccaaaattattaatcctcttgagagaaacgtgaaacgccacaaaaatagagaaaattcaggtctgtatgtcatggatcgtgttggtattttcagagaacatcccgcttctgaagctgctgcagctccctcctcagggatcacactgccgtcacccactctgcactggggcgtttcctactgcgcctcgtgctggcggacgcagctgggtgcagaagctgtggggtcggagaggcgtttggagaaggtctgtggtgcagtgtgtgaaaattcaggtgctagaagcctactggtagaaaaacccaaaaggaagagctatatccttaaccattctgtccaatttcgggagccttgtcagtgtgtcagtttttcctccccgaagacactccttccccaagtaattgtaggaagataaaaaaactgttaccagataacaaacactgaactcctatttgaccagaactttttcctctcgagatagttttttctttttaatgaaaaaagcataggaattggagattggcttgtctcacgcagccagtgcacatttggaattgacggaaacaacgttgctatttccacccatttgttttcggcagccttaaggccctcattctcatttcgggtgaatctgtctatctgtgaacgtggcccgcatgtgcattcttttttttatatatataaagtcagtgacgaggaactcccgagacgtgtaatgacaccacacttgttttctttgtttctttgttttatttaggcaagaagaggtgtgagtaattgaggaaaaactgacagatgcttttgctaataccaaaattgagcttacaattaggaactgagtatgtgtaacaggatacaggtgacagtgaagatagaagaaccacgatgaccacagactcaatgtgctctgtaacatcgcacagtttacccagcatgactttccttaggaggccccctcctcacgctagagtaaaagtcccagttaagtgaagcctaccagaagaactagtagaagaagctttgccgcttttgtgcctctcacaggcgcctaaagtcattgccatgggaggaagacgatttggggggggaggggggggggggcagggtaggtggggctttccctaatttatcttcatgtccagtgagcagtgttgcgtttttccttgtagcatttggaaatgatttactggaattacaaaacctatttttcctttaaatttcagctttggctctggctgctttttagaataatgcaagataaaaatcacacctgagggctgaaaacggagagggaatgggagacttgatatttaagcagcttgaatggtttttcttttctttatttttaaagaaatgcacttgcctatgatactgtctctccagtgaaatgattactcctccattactctattgatacaatattgtgcatgctagtgttgtatttctatacagtagcttgaaattgattaacttatactgtaggtgttatgtattcctatgacaaaaaaaattaagtcttcaaattttttaaaggttttttttttttaatttaatttttccttttgggggtaaagtttgctctaccaaatagtgattgtaacaaattgatctgttttggatgttgctatagtgacatgcagttatatattttgtttttaaaagggggggagcaaaagaaacaccagtgttagcttaatcttaatgtctggtgtttgtcatggtgaaattataactattacagtgttggagaacaacaaatatgttctctgaatgagcctttgtgctttttgtcatgttatgcagtgaactatttttaaggtctaatcagtgattatttttccagctccgtgtttctctaaggaattatttcacacacggaccatctttagcagtttcctcagtgatggaatatcatgaatgtgagtcattatgtagctgtcgtacattgagcaaataaacttacagatctgacgccagtgctccttagctt

SEQ ID NO: 1072 - DNA, 1218 bp, Homo sapiens
catcatgccattgcactccagcctgggcaacagagtgagaccaggtctttttgaaactctgtctccaaaaaaaaaaaaaaaagaaatcagccatgcatggtggtgcacacctgtagtcccaggtactctggagattgaggtgggaggattgcttgagcccagtagtttgaggctgcagtgaggtgtgatcatgcctctgcacttcagcttgggaaacagagtaagaccatgtctcaaaaagaacaaaaaaagactttcttatttgtctgatatacctgtatattaccttatgaaagaagcagaaatccccattttgcagataagaaaaccaaagcccagagaaatgaagcggcttgtccccaagattgcttagcgaatgatggagctgggaaaagcccaatcttccgttatttgtggacacatcagaattcagcatgagtgacagcggtctgctggatgacagatcgtcagtgcagaatgagacacgaggtgcctgtgtttattcatgcaggaggagtgtttgcagaagtgccgggaacaagaggtggtggagcaaagcatctctttcctggtttccttctgctctgaactcaagtagtacccaccccctattcttcccctcttttgagtctgtttcactgagggcacggctggtaggagtaacgttgtccagcattaaaacagagcatcagtaatgtctaggaaaatgttaactttaacaacaccactaatcagtttagagaatatttgagcgtgtagcacttgctgatcattcattcagaaaatgaattgcctgccataaactaataagcatgatttggtttatgttttgatttaattatctctgagtagatgctgcttgaagtaatgactgtaatcacttttgccaagcataccccccgtttataatttaagaaaaaaaatttttttttttttgagatggggccttgttatgttggccaggctggtcttgaactcctggcctcaagcagtcctccccacctggtgtctcaaagcactgggattacaggcatgggccaacatactgaacataatgattcaaacatagaaaaaaaagtctcctggtagttcagttcccccatgccccaggagtttagtacaggggtgtccagtcttttggcttccctgggccacattcccttgggccacacataaaatacactaacactaacaatagttgatgagctaaaaaaaaaa

SEQ ID NO: 1073 - DNA, 158 bp, Homo sapiens
ggcatggtgctgggtgtctgtaggaccagctactcgggaggctgaggcaggagaatcacttgagcccaagaggtggaggttgcagtgagccaagattgcaccactgccttccagcctgggcaacagagtgagactccgtctccaaaaaaaaaaaaaaa

SEQ ID NO: 1074 - DNA, 7442 bp, Homo sapiens
cagagcatcaccgcagaaacaaaggctccagcctccggacaccatgtctgtgcgcttttcttctacctccaggagacttggctcttgcgggggcactggctctgtgaggctctctagtgggggagcaggctttggggctggaaacacatgcggtgtgccaggcattggaagtggcttctcttgtgcttttgggggcacctcatctgcaggaggctatggcggaggtctgggcgggggaagtgcttcctgtgctgccttcacagggaatgagcacggcctcctctctggcaatgagaaggtgaccatgcagaacctcaacgaccgcttggcctcctacctggagaatgttcgagccctagaggaggccaacgctgacttggagcagaagatcaaggggtggtatgagaaatttggacctggttcttgccgtggccttgatcatgattacagcagatatttcccaattattgacgaacttaagaaccaggtaagaaacgccatggcgtgagtgttagcactcctgagagtgtttagccactcacagatgcacaaatgtataagctatcacaataacagggctttgccctcagcttctaaattttaggagttcattttcaatattaaaaataatttctaataaattctaatatttgaacatggcacgtccatcatgtagtattaggtatatgcttttggtaatattaaaatatcaaaagctgtccagtgtctccagttatatatttataggctttcccatagaaagagctttttttaatgcttggggtgggaaatacaagagaccatacccagccaggcacagtggttcagcctgtaatcccagcactttgggaggccaaggcaggtggatcacttgagattaggggttcaagaccagcctggccaacatggtgaaaccctgtttctactaaaactacaaaagttagccgagcgtggtggcacatgcctgtaatcccagctacttgggaggctgaggcaggagaatcacttgaatctgggaggtggaggttgcagtgagccaagatcgtgccactgcactccagcctgggcaacagagcgagactcggtctcaaaataaaagacagagagagagaccatacttaaattacccatcttcaaaagaatggtctgattattagagacagatgccagaaatattactataatttcatgggtaattttatttcaaggaactttgaaatgcatcttaaatatttcctcaatcttaactaacttttcatttgtcagataatttctgcaactaccagtaatgcccatgttgtcctgcaaaatgataatgcaagactaacagctgatgacttcagactaaagtaagtagagctgaagataaatgggaaaaaaaagttgtctaagcattttttctcctttattcttctaagttatttgacgttgtctcaagcctttgttcttgtttattcatgtatttgttttaaacaaaatgcctgttagaatgagtaactagctgagcaacaaattttacttgggaaatttcgggactaacaaaaacgagtgtcaaagtcatatgagaaagaattttggctattcccattctcttgcttcaatgaaatgtatttattgcatgatagatgacctaactgaaatgtgtttttttaattaattaattaatttatttatttatttattttttggagacggagtctcgctctgtcgcccaggctggagtgcagtggcgcaatctcggctcactgcaagctccgcctcctaggttcacgccattctcccgcctcagcctcccgagtagctgggactacaggcgcccaccactgcgcccggctaattttttgtattttttaatagagacggggtttcaccgtgatctcgatctcctgacctcgtgatccgcccgcctctgcctcccaaagtgctaggattacaggcgtgagccaccgcgcccggcctgaagttttaagtattatcttagtagttttacctcaaagcttagtctgagttgtatgatgatctaaaaagtgatgtgccatgtctaatgactaatgatgaaacttccaaatacttttctaaggtttgaaaacgagctagcgcttcaccagagcgtggaggcggacatcaatggtttgcgaagagtcctggatgagctgaccttgtgcagaacggacctggagatccagctggaaactctcagtgaggagctcgcttacctcaagaagaatcatgaggaggtagaagctccacccggctggctctcacaatcgcctccctaccaaattttaaaactaatttcagatgataaatataatgtcttaaattaacattcaagaaggaacctgtcagtttctccataaggcttagattgtttgagacgcttctattcattcttctcaaaagaaacaaacctcccaaaaagtttctaaccctatagatcttgtccatctgactcctttaaaaatattcaggccagaagcggtggctcatgcctataatcccaacactgtaggagacccagaatggaggatcgcttgaggccaggatttcgaggctgcagtgagtcataattgcaccactgcatttcagcctaggcatcagagcgagaccctaactcaaaaagtgcaataaataaaatattcagatcctaattccgttaaacaaatatctttcaggaaatgaaagctcttcagtgcgcggctggaggcaacgtgaacgtggagatgaacgcggcccccggggtagacctcacggttctgctgaacaatatgcgagctgagtacgaagccctcgcagagcagaaccgcagggacgcggaggcctggttcaacgaaaaggtaaaaccacgcttgggtgcgcccgggcgcggactcagccccagcgccctaacgcggcccctgccgttccagagcgcctcgctgcagcagcagatctctgacgacgctggcgccaccacctcagcccggaatgagcttatcgagatgaaacgcactcttcaaacccttgagattgaacttcagtccctcttagcaacggtaagcgaaaagttacaaaacagatttgctttagaaattgagaaaaaaataatcgaagagaattttcttccaacataattacatattttagtttttaaccattaattacagtgcttgacataagacatatttgcattttgcacatgacaatcctctttgcctacaaagtatagctggatgccaataattatgaaatattagaaattagcaaatacagtcaagatactggaaaaagaaaatcgttttgactttgaatcttctatcataagtcaaaatatcaaaaaccactcatatgtggaggctaaaaaagttgatctcagaagtagagagtgggataagtgcttactagagcctgggaaggggatggggggataggaagaggttggttaaaggatacaaaattacagagaaatagggagaatcagttcaagtgttctatagtactgtagaatgactacagttaagaataatttattctataatttctaatagttcaaggagaggattttgaatgttcccaacacacacaaaaaagataaatgtttgggaccatggatatgctaactgccctgattctatcactacacattgtgtgttttgaaatataattatggaaccccataaatatatacaattcttatgtgtccatttaaaaaaaaagaaaaaaaatcctactgcttaaagagagcaaaaatacatttgcaccactcctagcttcatctagcattccttttggccactcaattaagagcacttacaagttcctttgtaagtggcatagacagaggaaaagtcgaggcatgaaggctgactataaaactaaacatgtgtaatgataatcataactgctttcattaagggtttgcccagcacttccgcccacatgtgagtccacaacaaccccggggcatgggcagggcagacgttataactcatgtcattatttccaaaagaggactctgagattcgaagaagttaagcaattcccacagtcccacagttgggtatgaaggaatccagaagttctctccaaattttctaactcccaagtctatacttttcccactatggctagtaaaccaccagagtttatccacagatgaggctatgaatgtatataaaatcaagactttatataaaaaatacttgcaggtgaaaggataagacactctcatcttcattccatgtaaaattgcagtgagtgttccctctgagtatatctgtaaacccattcagattcacaagccaatgaattgaactactgtatttaaagtctaagaaggtaattattttctgtggtttattctactcatggaacgtttatgcggtttactgcaggatgactttttaatagaagagctacaatcctcataagacaagactgtcacatggctagaaatgagtagcaaagtataggcggacttctagttgtgggtaaagtagcaaattgtgccacactctacaagcataggctatattggtgcaggggagggatctttcagtctgtgccctatgaagagacaatttcatcttttttagcacacctgggcatctgagggacattcagcaccagctgtgtcattctcaaatagaaaagtagtaggacatttaataaaggcaacaattaatattgaagaagtggaatcttttgggtaaatataattatttgcatgatgtaaggataattctcttaattatctcttaaatgctttggcttattctaaaacaccgtgaccttttctattaaaccatgtcttaccaaactacagaaacactccctggagtgctccttgacagagaccgagagtaactactgtgcacagctggcacagatccaggctcagatcggggccctggaggagcagctgcaccaggtcagaaccgagaccgagggccagaagctcgagtatgagcagctccttgacatcaaggtccacctggaaaaagaaattgagacctactgcctcctgatagatggagaagatgggtcagtattgccgccattgagaaaacaattcatttttaaggttactaaagatgatttgaaatcaagtacaaaatatctatgatctagatcacgcatagataatactcttttagtgttatttcagaatgcagtgaattcccaccttaaatcattatttttcagtttcctcagtaaaacagaataattaatataagcgctctatacttttacagctcctgttctaaatcaaaaggctatggaggcccaggaaatcaaacaaaaggtaaacaaaagctgtgttaggcattcagtgtttatttgtatgtgtttcaaatgatgttttatttcctatttatgaatttgataaattctaaacagtttatatgtggcattttagattcatctaaaaccaccattgtcaaaacagttgttgaagagatagatcctcgtggcaaagttctctcatccagagttcacactgtggaagagaaatccaccaaagtcaacaacaagaatgaacagagggtgtcttcctgaactccagcctctgagacagaatggcccccaaattaaaataccaaaatgaagctagtttcctaaataagggtccccttatttttctgcttttcttccaatgaattaagacaagttatttttagaatagtaccatttctttggctttttctctatggtggtgtttcaataaaagttcttcctgttgcaagtcatcttccctggttctggccaatctttgcattttagatataccctcccaaatggaagctgaattttgtctttaatttcttctgtttaattcaacagtcttcacaagttggaagtaagtttaatgtgaaaactagttggagtctttttgacttctctgtaaaattttgtctcctttgtctcagtacgaaaagtacttactgagaacacgctatgtgccagataacgaggataaaacagttaataagatccagtccctgaagtcaatatgctcatagatgtagaaataagaacctgaagaatcagaaacaaacttaaacataaaggaaaggctataagtagtgatatttgaaggtagaaggggaaaaagagagctgtgaggacaagggtaagaggagaattccagcaggcatctaattcataatcttgatcactccaccataacggtaggaattcacaagttctctccttcgtttttgccatccaagactgcagagccatgtggctctcaagtcaaaggtaacttttagtgcaataatttcagcacctaccattaatgaatctatttcaaggctgggagtgggaggaggttaaactcagcagaaaaccctccagaggtttatttgtgggtgagagatttggctccccctcaccaatcccgtaacagaaacagcctgtttttctctggaaccagtgtcctattactgaactctgtagaattggctcagcacagttgaaacacagtcactttcaagctgtctttcctcctctttttcccacacgcatgtaataatacctaagcgaatgtaaggcagataccctctcacttaactttttaattaaccagtcctcacatcatataccctcatatcaaaattaggaaaaggaaacatcctaccacgtaagagttgaaaagttacattcacgcaaaaacctgtgcacagatgtttataacagctttattcgtaattgccaaaacttggaagcaaccaagatgtcctcttggttgacgaatggataaataactgtggtacctctagacaacaaaatattatttagtgctaaaaagctatgagctatcaagccatgaaaagacacagaggaaccttaaatgtatattactaagtgaaagaagccaatctgaaaaggctacatactgtatgaccccaactatatgacattctgtacaaggcgaaactatggagatagtaaaaagataattggctgccagaaattggaggtgagggatgcacaggcagaacacagaggatttttaaggctgtgaaaatactctggataatatcataagaacggatacgtgtcattatacattttccaaacccgtagaatatacaacactaagagtaaacggtaatactaaaaagtctttaatttttttttttttttttttttttttgagacagtctcgctctgtcgcccaggctggagtgcagtggcgccatcttggctcactgcaagctccgcctcctgggttcaagccattctcctgcctcagcctcccgagtagctgggactacaggcgcctgccatcacgcccgtctaatttttttgtattttcagtagagacggggtttcaccgtgttagccaggatggtctcgatttcctgacctcgtgatccacctgcctcggcctcccaaagtgctgggattacaggcgtgagccaccgaatacttagctcagatttcacagtatttga

SEQ ID NO: 1075 - DNA, 155 bp, Homo sapiens
gggcatggtggcaggcacctgtaatcccacctacttgggaggctgaggcaggagaatcacttgaactcgggaggcagaggttgcagtgagccgagatggcaccactgcactccagcctgggcgacagagcgagactccatctcaaaaaaaaaaaa

SEQ ID NO: 1076 - DNA, 23917 bp, Homo sapiens
ggggcggggccggggctgctgtgggagagttctgttgctgcggcggggcctgcacgttgactgtgggaaactcggtgagcgggctccgcgcgccgggctgggctccgggaccgcggaggctccccggcccatcgacgagggagagaggcgagcggcgcggggaggcccgggggccggggaatctcggggcccgcagcctacctgcgtgtgagaggcaggggcgaggggaaaccgggcggcgcctctagaagctggtctcgggggcggggcggggggcggtgaagccccacctggaggagcggccgggatgggcctccgggacggtgtgccaggccggggccaagtcggaggcccctcgctctgggtgggcgctggggcccgcgagggctactgtaaggacccctggcttctgaggatactgcgtctagaactttctccgtatggggccttgaggtgcttggtcgagacctgcctttgcgcttggtcccgaatcctgccctctaggagtcgctcttgcgggcctccagcccaccggaggcgaagcggccccgggcggaaggccgctggatcctcgagggaggtgccggtttctctccgcgggcgccgtggggacggtgggaggcgggggcgtcggcagcgcttggactaggtgcggccttgggcctgcctggtagcggggatttgggcccgcagagcgcccgcctctgcggctgagttctgcctggcggggaagggagcgcccgatgggtgccgaggcgtcctcctcttggtgccctggcactgctcttcccgaagaacgcctttcagttaaacgggcgtcggaaatctcgggcttcctggggcagggatcgtcgggagaggccgctctggacgtgttgacacacgtgctggagggggcaggtaattgaccagcgaacggaagtttgtggggcctgtgaacgctgctggccaagaggccctgccgagtggagccctgcttccgccagcgcatcagagactttgaagcaaagtgcagggggtcagggtggagagtggcggccccagcctcgcagggtaactgaactggatgttcttggctgcccagcgcttacaagtcccgtaccttttgtgccctgccaggaaacaagctcacatcttcctgtgggaaaccttctagcaacaggatgagtctgcagtggactgcagttgccaccttcctctatgcggaggtctttgttgtgttgcttctctgcattcccttcatttctcctaaaaggtatggcctatggagcaagcaggcgagttaggcaggagggtgcctgtgccctagccctgggactggtgtgtgcagctggtggaccctggaattgggacccgatggaacaggtagaacctgtctggggtgggggtggcaggggttgtgtttgttattgccaacccttcccagggttctgcttcgtcatgacttgctcagttccttttcctgtgtcccctgccttctggtcttcagaatgcccccgagaggcaggaagatctatgttacagttctggaaatgatgccctcccacccactcttggtccacggggtgctgggatggtagcgtgggattcggaagacttgcaccactgggtcacgttgttgctgatttggtgactcttgtcctcctaactagtctcactggtattgcgcagtggctgcatgaacattactcagcctgtggaggatgaagccatattcccttttaatgaacagaggacctgttaaaagtgaattggagattaattttaattatgtataatacctgaacacatccctatttaaattacgatattacaaataaggccaaatctccacaggtatttttaaaagccgttttttcgtgaaaaattatctttgatgtgataccatagaaagtatgcagtgctgtctgaggaggattcttgtagaaaaccacaccttcgtacagttgacaagacgtgcagagatagagggccccggggagctttaatctgggaagctttagaggacagacaatctgatttctacacaaaggaaactggaaaagcaaatgaaagagggagagggaagggggagcttccagaataagctggatttaagacgtttatctaccgaatgccaaatcggtaccttgttgggtccggattcaaacaaatatcattgccttcagtgattggcatattcaactctagccctgatgatgagggcttcttgttgatttgaacaatatgtaaacacttctgaagtctcttcttagagctgcatcccaaagcatttgtggatggaaatgatgtgaggtctggggtccatctcatcataacagggtcgggggatatagacaaaccaaggtttatcatgtggaaagacagtttaaagaaataacgtgtatggggcaaacatttgaatattacaaaggggagtacaatgaaaagtaagtttcccttttcagagactaccagtatgttttctttttgttgttgtggtttttttgtttgtttttgtttttattttgagacagagtcttgctctgtcacccaggctggagtgcagtggtgtggtgctcggctgacagcagcctccacctcccgggttcaagcaattctcctgcctcagcctcacgagtagctgggactacaggtgcctgccaacatgcccagctaatttttttttatatatatatttttagtagagatgggagttcaccatgttggccaggccggtcttgaacttctgacctcaggtgatctgcccatctcagcctcccaaagtgctgggtttacagacgtgagccagtgcgcccagccaactgcccacgtttaagattagttttccaggctgggcgcggtggcttacacctctgcactccagcctgggcaacagagcaagactctgtctcaaaaaaaaaaaaaaaagattagttttccagacattttgatctatacgtggaccagcatctttttttttttttttttttgagacaaggtctcgctctgtcacccaggctggagtgcagtggcgcgatctcggctcactgcaacttccgcctcccaggttcaagtgattctcctgcctcaccctcctgagtagctgggattacaggtgcccaccaccacgcctggctaattttcgtacttttagtagagacagggtttcgccatgttggccagtttggtcttgcactcctgacctcaagtgatccacccaccttggtctcccaaagtgctgagattacaggtgtgagccattgcacctggccttttttccaatagtcttgaatggatgtcaaattagagaattgcaagccactgaggctgactttgcatgggctattcggccattggagaagagtacaaagctggatttccattttgctcagggccctagagctcgtgtgtgtgctttctcttcaactcctgtcctttttgtcttcttcacagatggcagaagattttcaagtcccggctggtggagttgttagtgtcctatggcaacaccttctttgtggttctcattgtcatccttgtgctgttggtcatcggtgagtgagctatggctgagggcagctacctgacctagaccctggtctctgctgcaaaaccctttgccacttttgatgtgtagcatccagttttggctgctaggagacagaccaatgaaatgctgtgtctttctcttgagggagggaagaggctccctttgcccatgctgctgaccgctagtcggttcttcactttgaggcccctctaggccgtacatggtggctcatgcctgtaatcccagcactttgggaggctgaggtcggtggatcacctgagatgaggagttcgagatcagcctggccaacgtggtgaaaccccatctctacgaaaaatacaaaattagctgggcgtggtggcgggcacctgtaatcccagctacttgggagactgaggcaggagaattgcttgaacccacgaggcagaggttgcagtgagcctaaatcgcaccattgcactccagcctgggcaacaagagggagactccatctcaaaaaaaaaaaaaagaggcccctctagcagtgggcgtgggcttataccaagcagtttgtatgcagcttatgacggccaccttacattgctttttttcaagaccttggaaggagggacgcctaaggtttctgaggctgctcctcaggtcactctagaactgaagccaagagaagctaactggcctgtgaccttggtctgagtagtgctgctcaccagtcacttaaacagcagaattgcctggagcagggcctctaatgggggactgagcaaccaagcacacagtgaagtcctgccattccctgtagtagtaggaggagaacacagagatgtgtggcagcatatcttggggagagatcctagacctctctgcatctgggctagacttgaggttttcccaggtcgttccagctctgtagttctgtaaactctgacattgaggtgtacactagcaggtgcttgaaagataaactggtccaagggcaagcaggctctgggataaggccaggccaggtggtggtaagatgaaaggcagacattttgcaatgaggtggtagggtgaccatctggagacaagaatcaataaagctcttgtctgactggtagatgtttgttgttttgctgtggtaagtgatcgatatgtccccctgtttgggctccaaagtattggcttggctctgctgtggacaccactcttgtctcagagctgtggtgcctgcctaggcgtggaacactcctcccaccgagtcccagcagaaacactgagcgggtggggggctgtggttcaggggaatgtgcaaagcctcacccaccagcttcagcattaggcatttctccttcctgatgtctcagagcctgataggatatgttcaggctggactgcctctgaacaggccaagtgttacctgacagcttccaaccacatagggtaggtgccagctgcctgagcacctcagtgttcttgaaatacttggcaaggccccaagaggtagtagctctttctaaccagggttctcgccctgagcagcctccaagccaggagtaggtaggtaatatatgtgtcatccccaggccactgagtttttgaactgagcatgtgtgttttggcttttgggtctggggtgggggtaataactggggaggggagggaccatgctgaggatgattccctcagggtcttgccccttccccaaaccagaaggagtatgtttctttcctagagcagctgagtgggctggagagatcctttgcggaatccagtagttgacaaagccttcattcttttttgggatcggggaactgcttggaagttctagggggacatatggccatgatgactggctgcttcctactcccatgttaagaagcataatctagaaagatctgcagagccttcttcaaacagaagtgttagtcacaggtactagtgaagggtaaggggcataactagctagagctgtggccttgcttgggggtggggagggttgagcagatcctcctggaggatggagttgctgagggtgcaggatcttcccacctgggctgaggcccgagacagggagggctggtttctactgtgggacttgggttagtattgctcagtcccccatccccactattggtcattggccaaggtggtccttaggatggtggggttcctggatgcaggtgacagtgtaaggaaacatgtttatcttgtttttctgattacaaaaataatgggtaattattcttaaaaattcaaaagttgaatttagaaagttaaactccccataatcccatttcccacaggtaaccatcatgagtattttgttgtgcatttccagaggggttttgtatgctgacatctttaataaaatgtctacaacggtgggatcatacacacaaagtatttatgtttctttccacattcctgctgggacatggcaggaggagcattccacgcctgagctggtagcacagctctgagataagactgctgtccatagcagagcctagccaatactttggattgtgctttttctacctgctgcacgttagacatcttttttttttttttttttttttgagatggaatctcactttgttgcccagactgcagtgcagtggcgccatcttggctcactgcaacctccgcctcccaggttcaagcgatttcccctgcctcagcttccgagtagctgcaggttacaggcgcccgccaccatgcccggctaattttttgtatttttagtagagacgaggtttcaccgtgttggccaggctggtcttgaactcctggcctcaagtgatccgcccacctcggcctcccaaagtgctgaaattacaggcatgagccactgtgtccggccaacatctttttatagcaatctcattcttcttaaagatcatgtagtattctctcatgtggttgtgccgtaatccattctttataagcatcttcgaatcattgcaaatttatgcaaatacttctgtgggataatttcagaggtgaattgttgaacccgagggtatgaacattttgcattttatacaggtgtgctgtttttacccctgctaacagcgtttgagagtactcgcttcgtggtgctgagggatgggcagatttttataatgcaagatcaacataaaaactaagcagcctaaaaccggaaattaagaaccccatgaggccagtgccctgactcacgcctgtaatccccacactttgtgaggctgaggcagttgcttgcgctcaggagtttgaaactagcctgggcaacatggcgaaaccccgtctctaccaaaaatagaaaaagaaaaaattaactgagtgtggtagcacacacttgtggtcccagttactggggaggctgagaggtggaggttgcagtgagctgggatcgtgccactgcactcaagcctgggtgacagagtgagaccctgtaacccaccatacaaaaagaacctcgatacccatacagtgataccttgctcctctcatatgggagtctattaagagcattctttgggtacatcttagtgtattgacttaaaacgatgtctcaggatgcatggggaaaagcagtaggtttggcgtggctcaatttctacattagagacaaatataaatatatttttaactggagctctatatgtctaacagcggctctttcaggagcagaggctgctcactgactcagcaattatttcagtgcccactctgcacccagagctatcccaggccctgggaatatagtataaaagatttctgctcttatgaagtttgtagtctactttgggagagatggacccaaaaaatgtgtttaaagagaatttcagagatggatgtctattacgaagcaggtaacagtgtaatgtgactaaaaatgactttagatgtgaccacatttttattgtatatactgctagatgtgattatgttatgggatcctttccgtttctacattttgggtgtgtttgaactttcgatgagtgtgaattcctttcgtaatcagaataaaacattatagataataaaacccattgtaaagctttgaaatgaaacccttgactcctagctggtatcctgcaggtcttgactcctatttttttgtttgtttgcttgttttgttttggctttttcgagacagagtctcgctctgtcgcccaggctggaatgcagtggtgtgatcgtaactcacagcagccttgacctcttgggctcaagcgatcttcctgtctcagcctcccgagtagctgggactacaggtgtgcagcaccatgcccagctatttaaaattttttttttttttttttttttttttgttgagagagagtctccctgtgttgcccaggctggtcttgaactcgttggcctcaagcagtcttcctgccttggcctcccaaagtgttgggattacaggcgtgagccaccacatctggcctgggtcttgactcttaagcaccttaggtccccggagcaggcatttccatctccaggttcaacttatcattgtgggggttggggggctatgggccaacttgagatgaacagaacaagacgcggtgagggtaccatgggaaaaggaagccacccccatttccagaaactctttaggcttggttagcatcgtgaactgcagagcaagcctggggcctgtgtagaatggggccagggattgaaaagctggaggaaggagtgggtctgagggtgggagcttccttttttttttttttgagatggagtttcgctcttgtcccccggtctggagtgcagtggctcaatttcggctcactgcaacctccgcctcccgggttcaaatgattcttttgcctcagcctcccgagtagctgggattacaggcgcccaccaccacgccgggctaaattttttttttttgtatttttagtagagatggggttttgccatgttggccaggcttgtctcgaactcctgacctcaggtgatctgcccgcctctgcctcccaaagtgctgagattataggcgtgagccactgcacctggcctgagggtgggagcttctgataacagcatcccatgaggggtgtatgtgcatagaagtgggaagaactggggaggcggatttgagggaagtgagtctgacctgtctcatgccgcctgtctgcctggtatggccttatcttgccctagtgtccgctaaatgcccgtgtctcctctctgctccaccacagatgccgtgcgcgaaattcggaagtatgatgatgtgacggaaaaggtgaacctccagaacaatcccggggccatggagcacttccacatgaagcttttccgtgcccagaggaatctctacattgctggcttttccttgctgctgtccttgtgagtggggggttgagggggcaggtgctgtgaaaggagccatgggctagccatggacaccgagctcagtgggctcagtctcccccctgtgactttgattcctcctcagtctgtggcctggatcccaaagccctgtctgtgttagggaagccacatagttttctcctgacctccagaggcagcgtggagagtaggagagggctgcctgaaatatcagaagaccctcacacaccacatactctcaggcaaacagatgactatctcacggtctgtttgcatggagagtgagatgtaacggtaaggccttgccctcctctgggagaggaccttcagagtccagctcacaagggagcgactgaatgggggactctttgtgtccggggtgttgacctagggacagcaggtaaaagtggcacgaagaggctgggcctctcctcacctcagggccttccccacgtgaaactcgtaatgaggacatgttacattccatggcagccagagtatttctgatgatttttttggtaaaactaagtaccttaatcaaggctaagggtaactagtcgggcaaaactagaccactacgaagtgcctatttgagcctggggccctgtttgctgcctcctgcttcacatagccgttctgatcagcagggcctggctgggaggtggatgggagctcagaccatgtatgaaggcattggaaaggcgcttgctttgagggtggagctctcatcacttaatcacttctcaaaagaccccacctcttaatgctacggcagtgaggattaaattccaacacatgaagtttgaagggcactcagaccatagcaccaagtgattctcaggctcatggacagttattccccacttggttttgtgccccgagactcaagaatctccatgcctaggagattcttgctctctagtcacctggtgtgtcctgctttactaggcgctacgatgactacttgtcttaaaatctgttgtttagatgatctggtactctctgcgaccaagttggaaagaggggtggagctagaaaaggcaaacacatttttttcaagataatgggtttgatcacagatttgatctacaagcttgctgtcttcaaacttaggaaagtcaggaaggctgggaggagtcagacacataccctaaatttttcaggaagttccaaacaagtattatcttgtggtctgaggctgaaagggaagcagatctgaaagactgagtctcaaacccagaattctgagtgtgacagtcagcaaaatgaggaaaaaagaccacattgagagggaaagagaggaaactaggccatctaccagaaaagcatctagagctttaagaatggtatgggggaggggtgggctgggtgcggtgacttaggcctgtaatcccagcactttgggaggccgaggcaggtggatcacctgaggtcaggagttcgagaccagcctggccaacatggtgacacccagtctctactaacaatacaaaaaaattagctgggcttggtggtaggtgcctgtagtgccagctactcgggaggctgaggcaggagaattgcttgaacccgggaggcagaggttgcagtgagccgagatcacaccactgcactccagcctgggtgacatctcaaaaaaaaaaaaaaaaaaaaaaaagaatagtatcgggaaggtgaaaacctgccgggagctctgaatcatgaaagacatggagaagtgaggagaaggcagtcccttttatatgtctgtgtaaggaaggagatggagggtaggtggtcaagggcaaaggaaacactaggatgagaaaatggaaattacaggtgggcaagagtggcatccctaaaggatgtacttgatgagattatgtccagaagctgttgagatcatctgcagaaggcattgccaccgatgcttgaggatttgcagagtgggagagatactggcagactgcagcctggcaaacatcccaatttccaaagggaggagaaggtagatgaggaattgacctggggagggttgactttgatctccagccatgctctagaaagaatagcttgtatgcttttggaaaagaagagcgggatcattggtgactgctgtgaattcctggagaagttctgtcagccttctatagatggagtgtagatggatttttagcatgatgcttgccagtctgagtctgttcttaacgaccagatgccgaagtgtggggaaggtgctggcagaacagtgtagttaggtgtggtcctaacccacatgagtggctgccatgtggattggctctatccacacatacacatagaagccttagggggctcactctttttttttgagacagagtctcactctgtcgcccaggcaggagtgcagtggctcgatctcggctcactgcaagctctgtctcccgggttcacgccattctcctgtctcagcctcccaagtagctgggactacaggcgcccgccaccatgccctgctaattttttgtatttttagtagagacggggtttcaccatgttggccaggctggtctcaaactcctgagctcaggtgatctgcctgcctcagcctcccaaagtgctgggatcacaggcgtgagccaccgcgcctggcctgctttgttttttcagtgtttcctgcaagctgcaaatgggctgtgtggccataaggctggacaagagcatcacacagaaagccaaggtcctctagggtcacagccaccatcttagatttaactcttagactagcaaggagtatatatttctggcaaaattccagaaatgattaactagatcgcttatgggcaactggtgaatccacactgatctctgggatcaccgtttccttttctaagaagtcacgcaagaccaacctcatggcttttttggatcaggctactggatgggaacacgggagagtgcggcagctgagccaccacgcccagcctccacatgctttttaaaaacattcccgtgtttaaaaaaagttaaccacggggcttttaagcaccacatgctttaaatgccccttggtgacttgagtgttctactcagtttatcatgaatgtttttctgggacaactgacctgtttccagcatatttatttatttatttatttatttatttattttttttgagacaaggtctcgctccatcacccaggctggagtgcattggtgtgatcatggctcactgcagccccgcccttttgcctcagcctcccgagtagctgggactataggcatgtgccaccacgtgctgctaattttttaattttttgtagagacagagtcttgctctgttgcccaagctgatctcaaactgctgggctcaagaaatcctcccacctcatcctcccaaagtgctaggattacaggcatgagccactgtgcctggcctctccagcgttcttgagtgttcttgagtgtctacccaattcctcattggtggatgtcgagcctgcagctctgtttctgatgtcataaacagtggcctcagctagtcagctttctttgggcctcctgatcctcttggagcacccatgccactcctattatctgtctctttcttttttgttgctgttgatttttttctttttctttttctttctttctttcttttttttttttttttgagacagagtctctctgtgtcgctgaggccggagtgcagtggcacagtcttggcttactgcagcctcctcctcctgggttcaagcagttctcatgcctcagcctcccaagtagctgggactacaggcacatgccaccacgcctggctaatttttgtatttttagtagagacggttttgccctgttggccaggctggtcgtctctgactcctggcctcatgtgatctgcccacctcggcctcccaaagtgctgggaatacaggcatgagccaccacacccacctctctttctttccatgttctttatgtcccactgagaggctcagttcttgaacgcgagcaggtactcatggcgcgagcaggtactcatggcccgagcaggttagatggttaggagttaagggttccagacttcgtatgcaacttttctgcgtggtagagagcctgcctagtgggtattccagtactgctggcatgcagtcacctgtgtggattaacattttgcaagggtgtatgggttggagtggagcaggagagcctgaagtggggagaccaagttggaggttgtcagtgagacttgctgggaacctgaacgggggcagtggtacagtggtagtagaagtggggtggaggggacagagctgagaggcccaggtggagttgaatcagcaggcttttccagtctctgggagtctgagatgatcttggttctgctgtggacttgcggaatgcgaggacgcagccccctgctggaaagggagctctggctgcccatggagtaacactatcgtgctaggtgtgagggctggttgcagagtgggacttctggccaggcctgggggcagcaaggaaaggaggggacagggagagcagggttgagcaggggaggcctggcagatgagcaggatagggtgcttccgggcagtcgagcttgggttgctggcttcagaggcattgaggccagggcaaagggaatgtgctggcaggatggattccagcctccagcagagcgatagaagatcggggagcagaaggaagagggaagcaagatcaagaaggaggatgtgagcaggttagtggccaaggaggggagcacattctggagaaggcctggtgcttggcactagttttcagcgggactgggctcagaacacataggaggttagcctgagagctcccgagtagcctttgtaattgggaaagggggcctggcctgaaaggaaacatcacacctagaagcaagtctgtacccttggccccccatagtctgctgctgctgcctgggatagcagtgggagagtcccagcttcccagccaaagccttctgagcttttgtcctgcctctgccactactgtctcagtcctgtcacttgacccagaagcctggggctgctctgccctttcttcttgtcccatgtgactgcccaaccatcgtggccatttctcagtgtgtggcccagcagggtgaggcgctttcacggtgtcaagtagccaacctccagaagtcttcagcctgcagagctggactccacccatgaaacagcctgtagatgtcacctcctaagcctctctctcacaacccttgggaccactgctgtggtggggccaccaccatcccgtatagaccaagcgggctccctgccacctgccttcccccctttggcctgtgcaccccacttccagtggctcgctatcacatggatcctccaggacgcggctcccccacagtctctgcttcggcctccccctgtcatgaagcagtcatgtgggtctcatgggagagcctcacgtaacacatgctctcccccaactcgattctctgagcattttggggacctctgtgcggaacaccccctccagctgccggcccagccggcacctcctcttcgtgaatctccgaggcttccctgtggagcctgttccgaggggcccacaccatgttcccggctgacccatagcgctgtcctcgggtcccagggcagcctgcacacgcagctctgaggtgtggcacttggcagggttgcccatcgtggaaaacctgggctcttccccttcagactgttcagctcagtgccaagggcctggcacatatgaagggcgctgaaacatttggtgactgaatgggctgtcccgggctgacggcgacagctttaggtgcgtgcctgggttgaacttgttgggctttttagccaagaagcccagcttttcaggtcttaggagctatgacagtttgtgaaggcgggtccatcggggccacctccaggggaccacactggatgagccactggtttccacttgtggaagactccggcagtcgctcctgttcccttcctgccaaccttgcacttcgggggcacagctagcgagaggccctcttgagtcttggagtgtgttggggacggcagctccctctgggctggggtttgtgtgttcagaggacctgcactgccttctctgccttactcagcttaaatgacggtcaaggttaggcccaaagtgctggttagcagccagtcgcaggaaggcccctgtttgtgtggaagccccctgaatttttgctgacctgaacttgatccacaggcatcttttgtttcctctttacccctccagggtagaatcccatcgctgccattagcccagatggagctgcccgtgcttctctgctgagctgctttttcttcttttttaggttgagtcatctaatcacagactacctttgcctaagttgtcttacctcagtcggttgctctctaccctccagcttaccccaaacccctcagatagctggttttaaaaaagatacacagcaaaaccccagaaacccagctggtctgtgtcacttgttctcaagaagaagggaggacaggccagacccacacctgcccctttgccctgcgcttagtgcactgtcctcaggatgggtgagctccatctgggtcgtgggctggagctgccacaagtcatgttctcatttgaaacggcctccatttcccccagctctagccctcctcttcccgtcttctccagcgtctgtgtgctgggaggctacagggaaggccacgcagctgtaccaaaatggacttggggcagccctttggggcagccttctcgggtctgctctaggtgactctcccagttgtaacctgttttcctgattccagactggtgggtaagagtcgctgagggcagtggaagccctggtgttagtcattcttcttcactgaagccttcctgaggcgtcacctgacttgcttccttgcctgggcgctgcctcattttttttcttccacagctggggcgtgttcacccagagtccactggccaccctgcggtaggcctggaaagtcagcaggtggcgctgggacaccggctttctgccggctgggggctgaggagtgagcttatgtgaacaccatgtgtatgcaggggctgggggttgaatgacttgactcgcctgaaacccgtcagcagggcgggccgggggtggccacagcatggaatcttttggtcgggacttgctccttctccatttcctattaagcccgtgtcctcttccccttgctcatgggggaagacagggctgctgaaaagtgcttatgagccatggctctctccatttgatatggttggccctgtttctctagtctgtggagaggttctgtttctcctgccttctctggtttactcaaccttttataaaagcacgatagccctgctcagtgtccaacaacattctatcaagaaagcccagtcagattgaggcattggggctgccatgtgtcttccaaggccacatctggattctgttaagtttcgttcactggcctttttttggaccccaggccattctattggtgaccaccctgtatctgtaggagttgcctttggctcttaggttctttcctgttttctggaaatgaatagctaagaacagtgattcgggtaagactacttgggagatccagcagaggcagaagctaaaggccatgttcgtgccctgtcctgggggcctgggaagctacaagggaacagacaagcgcacgttaacgtgcctgagtgacccagtgtgagggagcgggaaaatgttctagaaggctggctcccaggctgaaaaatgccagtgatcagagaggacctggtctgcattgcttgggccctgggtgggggttgagggtgtgaggatgcagaggctggagctctgggttgtgccttcaggtcgcggcagtgaatgttttttccccctgcagccatgagcctggcttgcccatcagaacgggtctgagacggcgccttcccactcctgtcttctgtctcctctgttgctagactgagcagctctgtgtctgcctctgcccctcttggtgccaggctcccaggtgaacacaggtgcagtctaggcccagggagattctgtccagccttacgtgcagcctcaaatctgtcccctcacctgtcagggagcatttcctctcctgggagtgggatccagtcatctggaagcccagccccgcgccctccccccctttttttttttagctatacttgctggagtgggcggaagaccccttttcagtgtgccaggtatgggagtgcagagatgaaggcacagtgcccagcctaaagaccttcatagcctggtagggcagccatataaacggatggcagccacgcagagaacagagaatgaggtagttacatgcgggtgcctggggggctgctgcaggagcccccagaaggcgtccctctgatggggtgggagatccaaaagggtttctggggggaggtgaggattgagctgggtcgagaggacattccggcctggagaactgccacacagagccaggcgtgttccaggaatggtgaggggttaggtgttactagagcagggggccacgtggttagtgaaggaggagagctcactgagggcatgcgtgctggcagcaggtggcttaagcagagggctgacatggtcggatttgccttgctctgggaggtggatgggaaagccgtatggcagcagatagggaggaggcgccagcagtggggatgatggtgggcatgtttgcagttgacatggaaagtgctgggttgtggcttgggctgggggccaagagggctgagtccaaggcggtttgcctgcccaccactacagcaggggctacacgaggtggtcaggtcaggcaggacaagggaaggcccgttttggacaagctgagtctagaatgtctctggggacatccaggagccaatgtttagcaggaggttaggtatgagtctgggccacagagaaaaccctttcggggataagagtggctgggaggaaggtatagggtgtcagctgaagagtgcagaccccagagggagcagaataacagtgggaggagggtgttgcgaggggacctcaggagggtaacttagcagcagagcaaggagttcagggtgacctccggcctgggcggttaggaggccactggtggccctgctgctggcttggaagggcaggccttggccagcctaggttgaggaatatatgggagggaaaagaccaggggcttgggcagggtgactccaggaaggaggcagttgaaggtgaggttcctggggggagaatgatcccgggtcatccagcaggaagagagaggacctagaaggtgtgaaaaagaactatcgggctgggggtgcagtgggaggagtatgcccggggtgctgtgggggtggggagcgcctgtgagggttggcaagaggaaggggaaccggggcctggcagaggggagccccagactgtctcaaggctgggaactgaaggcctgggctggggctgagcagggccaggctttcggacacacacagcgtggatcttgcgctggactttgtgtatgccctggcctatcttggaagccctggttctcaatagccgggaagggcctgggacggtccgaaaagagctgggcctctgctgcactgccgcggaagcatttgtgttagctatctccctgggtactggggtgacagccatgggcactcaccagcagccgcttgcctggcctggtggcggggagtatagccttcagtcttgcttggtcctctctctaccaccaggtggcatgacccccacccctcaattccagctgggaggagcggtcctcttcctctttctacatcactgggatccgctctggggctgggcagctccttgccgggggcctgggtcttagtcagacttgcctttctttctaggcctctccattgacttctggccatgccgatgtgagtcagatgcattgtttctctctggctcctagggcgctcagtagcttcctccaccttcaggctgtagcccagtgcggggcaggctggtgggcagctgggggctgaggcagggaaacctgagccctaggccacgaggtcctgggccgctaattttagaaagcacatgtcactggaaactctccttctctgccaggaatcaacggcctggctctcctggtgctgccaggggcccctgggagcctctccccaaaccaggaacctcaggggtgtctcctggcccgggtgggtactttctgtcctgagtacatctggaaaggggctctgccgaggccctggagagccatggcttgggccagggaggtagctcaccttgtctgctctttactttctccagcccttccgggctgcccctggccatgagcagaggctgtgaagtgtgaaggcctggctggggcaggaggccacttcgactcttctgagtaagctgttgttgaagcactctggactaagcagatttgtctcttccttcccccaggccctgtgtgacccttgccttctgaggtgtgtgagaaaggaacccctgccttgttttgactgtttgaacgagtccttccctcctctcttcctgccagctaacatctcggggcaagggtgaaccaagggaaatgaagtggccattccaatctctgtttggggactagcatctgcctccagctgccacctgtttgcctgtctctcctggctgcttcagagaggcagcctgcgcctgtgtcctgattcctctacaccctccagcccaagaagacctcattcggggtgctgttacataacggatgtgttccagcgcagcctgcatgatgggttgggaaggaggctggccagagaagagagttctatcttacgttgggacctgggagctgttccctgttagtttagagagcagagtggttccgagctcaggttctggagtcaggcagacataatttggaattccagccatgtccatttctggtttttggccttgggtacattgatttacgctgctgaacttcagtttcctcttctataagctggggcagtgatagtaacttcctcatcaggtagatgtgaggatgcggcctggcatgttggaagtgcttggattgattagcttctctcgttaccttaccaaggcaagcccagcctcgcagggaggaaggtggtgctgtggcttgtctggcacgtctaggccccgacccggaaagtgccgcgttctgggacctcatgctgtagcgaggctcttcccagccccccaggctcctgcttccagcccctctgagagctgagggtggccgttgggcacagcggcagaggacggctcctgggccccaccttttccctcacgctgccagcaccaggttggcggcttctcactcggctgccttggcaagagggcaggtccaggctggagctaggtgtggagtgggagcaaccaggaggtgctcctgccagcccttcatgctctttttctcacttctcccttctttttgtaaataattgcagcctgcttagacgcctggtgactctcatttcgcagcaggccacgctgctggcctccaatgaagcctttaaaaagcaggcggagagtgctagtgaggcggccaagaagtacatggaggagaatgaccagctcaagaaggtgagcccagcttcccgacccaccatggggcgtcctggtgttacactgtgggagccacattcttcagggcctcagtggccactgctagcctgtcacgctgggaaatgtgcctgaaaagccagagttgggtggaggcgcagaggggaagtcctcagtggggagagtatgcctgctggaggcgtctgtgtgtgagggtccgggtgaggaggagggtgttgctgctctcgtttccatccactgcttccagttagacccttccctgagaaaaatggcccctcagtgagccaggccctctgctgtgatccgaaggccctcagctaggcccttgttccctgcaagattgccgcaccccctctggaactcggggtctgtggcatccctcagtgctggagaggaggtgggggcagggtagttggccagtcttagacgtcccgtcaggaggtgagctgcaaggcaagctcggagggatgtggatgcagaggtgggatagagctggccaggccgactgggggctcctaactgcagtgagcggcaccatgtagggagcacgaggcaccgccatctgtggaggggttggtgagcaccatggagctgctgagccctgctgcttgggaaggaggcagggccaggggccaggggccaggggccagggcaggcaaggcgtgcccggcgagctgcagcaggtggccccgctggcgcttctctttccctcggcgggcagccacgccctggcctttgcctaggagctgggagcaagtggtggctcggttccgcgttgacatttccgaaggggcgtgtggccagggcagcttgaggaaccgcagctcggtggggaggatggggctggaacctctccctccctccctcctgagtaaccctggcctttggcacttttcccagggagctgctgttgacggaggcaagttggatgtcgggaatgctgaggtgaagttggaggaagagaacaggagcctgaaggctgacctgcagaagctaaaggacgagctggccagcactaagcaaagtgaggctcgacctcgtgtccttccccgcagggaagtccagaggagcctcctctgcccgctgctgcccattttgtgccaaagtattagtaacaagccttgcacgcacgctcgagggctggctgaaaacagaccaatagcaccctgcgcctccaaccccaatgcagccatgcttagccggcaggccagtgaggctaagtggtttgaatggggctcaggaggaaccaggctgcagttggtgggcctcgattgccctgcactagagcagtgcatgctggggctttcccgtccagagtgtggcacggtagccccagcatgcctgggggctgagaatgaggggagtgtgggagtggcgttcaggaggggagtgggcggctcccaagcggcctgcctgtctttggtctcccacgcatagacttaagtctggggcgttttcccccaataccacaggcctcgcctgctgctgctgtgtgcaaggcgtggttgtcattgggtctcgcttgcaggctgggatcttgctccctgtctcccactctcagcctccctggaggttacccttgccgagagccactagagttcctctccattaaagggactgggggatggcctctgtgtttcttttgctttatcttgagcttttttgtcagccctttccctctactttgggggcctgcaaaagcagaggggctttattttgagaagtagcctcctgtataacctcgtttgagatagatttgggccagtttctggtgtctgtagcagtcgggttttttccccctaattcctgtcttttcgtttctgttttcttggtcatttacatcatttcaagaactagagaaagctgaaaaccaggttctggccatgcggaagcagtctgagggcctcaccaaggagtacgaccgcttgctggaggagcacgcaaagctgcaggtcagccctcccgtattgctgcgcccagggcaggagagcagagcaggatgaggcagcccctgcgggtgcggagggaaccttccaggggcccaggggctggctgccctctccaccactccccctggccacctctgccctactgagtgggacccttcaccgggcaggaggggggtggcctggcagcagatgtaggcacttgccaaggcggccctcaggagtggcactggctcactaggctctgagccttcctaccttcgtgctcaggcgcagccatggtttggggcctggtcaagaacaaagaagcaggtgaaactctgggacccactgctggccttctttcctagggtgctggggagtgacgtagggcaaagatccctgggcaagtgagggcacaaggtgtcaaaaaggcaccttccctagcaggcgctagttgtggccatcacctgctgccctaggcctgatctgagtcctcagactagcttgggtgcaccaggccgcatctggaagcccaggcggtcttgacgttgggagtgagggccacataaatactcctaactttggacagctggcctcagtgcttggtggcccaagtttgggcaccacagcaggtggggaggaagggtccagcctcaaagggggcacccatgccctctgtatggggcaggcttggcagatgggcttcgagggcacctgtcaaaggtgtgcagagttgggaagggtctgatcaggtcttgaaggggactggatgccttgctgttccctgcagccaggactcagcccccagtgaggtcctggcagtcctccctggctggcgttaggtccagggctttccctagagcgtgggccagggctgacgctcccaccctggcaggcctttgggtgcagctggggagggggccccttgttcacttgaatagctgttgttaggagagaggggaaccgaggtggacctctggggcatggggctggaggtggcaggggaggagtggacccggccaacctactgctgtgggatttctgtccctttccaggctgcagtagatggtcccatggacaagaaggaagagtaagggcctccttcctcccctgcctgcagctggcttccacctggcacgtgcctgctgcttcctgagagcccggcctctccctccagtacttctgtttgtgcccttctgcttcccccattcccttccacagctcatagctcgtcatctcggcccttgtccacactctccaagcacattacaggggacctgattgctacacgttcagaatgcgtttgctgtcatcctgcttggcctggccaggcctggcacagccttggcttccacgcctgagcgtggagagcacgagttagttgtagtccggcttgcggtggggctgacttcctgttggtttgagcccctttttgttttgccctctgggtgttttctttggtcccgcaggagggtgggtggagcaggtggactggagtttctcttgagggcaataaaagttgtcatggtgtgtacgtgg

SEQ ID NO: 1077 - DNA, 3699 bp, Homo sapiens
ggcaggtccaggctggagccaggtgttgagtggcagcaaccaggaggtgctcctgccagcccttcatgcactttttctcacttctcccttctttttgtaaataatcacgcctgcttagatgcctggtgactctcatcttgcagcaggccacactgttggcctccaatgaagcctttaaaaagcagatggagagtgctagtgaggcggccaagaagtacacggagaatgaccagctcaagaaggtgagtccagtttctcgacccaccatggggcgtcctggtgttatactgcaggagccatattctttagggcctcagtggccactgctagcctatcaccctgggaaatgtgcctgaaaagccagagttgggtggaggcacagaggggaagtcctcagtggggagagtatgcctgctggagacgtctgtgtgtgggggtcctggtgaggaggagggtgttgctgctcacgtttccatccattgcttccagtcagacccttccctgagaaaaatggcccctcagtgagccaggccctctgctgtgaaccgaaagccctcagctaggccattgttccctgcaagattgccgcaccccctctggaactcggggtctgtggcatccctcagtgctggagaggaggtggggccagggtagttggccagtcttagaagtcctgtcaggaggtgagctgcaaggcaagctcggagggatgtggatgcagaggtgggatagagctggccaggccgactgggggcccctgactgcagtgagtggcaccgtgtagagagcacaaggcaccgccatccgcggaggggttggtgagcaccatggagctgctgagccctgctgctcgggaaggaggcagggccaggggccagggcaggcaaggcgtgcccggcgagctgcagcaggtggccccactggcgcttctcttccccttggcgggcagccacgccctggcctttgcctaagagctgggagcaagtggtggctctgttccgcgttgacatttccgaaggggcgagtggccagggcagcttgaggaaccgcagcttggtggggaggatggggctggaacctctccctccctccctcctgagtaaccctgacctttggcacttttcccagtgagctgctgttgacggaggcaagttggatgtcgggaatgctgaggtgaagttggaggaagagaacaggagcctgaaggctgagctgcagaagctaaaggatgagctggccagcactaagcaaagtgaggcttgacctcatgtccttccccgcagggaagtccagaggagcgtcctctgcccgctgctgcccattttgtgccaaagtactagtaacaagccttgcacgcatgctcgagggctgtgtgaaaacaaacaaatagcaccctatgcctccaaccccaatgcagccatgcttagccggcaggccagtgagactaagtggtttgaatggggctcaggaggaaccaggctgcagttggtgggactcgattgccctgcgctagagcagtgcacgctggggctttcccatccagagtgtggcacggtagccccagcctgcctgggggcttagaatgaggggagtgtgggagtggtgttcaggagcggagtgggcagctcccaggcggcctgcctgtctttggtctcccatgcatagacttaagtctggggcgttttcccacaataccacaggcctcgcctgctgctgctgtctgcaaggcatggttgtcattgggtctcgctttcaggctgggatcttgttccctgtctcccactctcagcctccctggaggttacccttgccgagagccactagagttcccctccattaaagggactgggggatgtcctctgtatttcttttgctttatcttgagcttttttgtcagcctttccctctactttgggggcctgcaaaagcagagcggttttattttgagaagtaggctcctgtataacctcgtttgagatagatttgggccagtttctggtgtctgtagaagctgggtttttacccccgattcctgtcttttcatttctgttttcttggtcatttacatcatttcaagaactagagaaagctgaaaaccaggttctggccatgcagaagcagtctgagggcctcaccaaggagtacgaccgcttgcagtaggagcacgcaaagctgcaggtcagccctcacgtatcgctgcgcccagggcaggaaagcagagcaggatgaggcagcccctgcgggtgcggagggaaccttccaggggcccaggggccggctgccctctcccccactccccctggccacctctgccctaccgagtgggaccattcaccgggcaggagaggggtggcctggcagcagatgtagacacttgccgaggcagccctcaggagtggcactggctcactaggctctaagccttcctatcttcgtgctcaggctcattccatggtttggggcccagtcaagaacaaagaagcaggtgaaactctgggacccactgctggccttctttcctagagtgctggggggtgacatagggcaaagatccctgggcaagtaagggcacaaggtgtcaaaaaggcacctcccctagcaggcactagttgtggccatcacctgctgccctaggcctgatccaagtcctcagactagcttgggtgcaccaggccacatttggaagccaggcggtcttgacgttgggagtgagggccacataaatactcctaactttggacagctggcctcagtgcttggtggcccaagtttgggcaccacagcaggtggggaggaagggtccagcctcaaagagggcacccatgccctctgtatagggcaggcttggcagacgggacttgggcttcgagggcacctgtcaaaggtgtgcagagttgggaagggcctgatcaggtcttgaagggtactggataccttgctgttccctgcagccaggactcagcccccagtgaggtcctggcagtcctccctggctggcgttaggtccagggctttccttagagcgtgggccagggctgatgctcctaccctggcaggcctttgggtgtagccggggagggggccccttgctcacttgaatagctctcattaggagagaggggaaccgagctggacctctggggcagggggctggagatggcaggggaggagtggacctggccaacctactgctgtgggatttctgtccctttccaggctacagtagttggtcccatggacaagaagaaagagtaagggcctccttcctccctggcctgcagctggcttccacctggcacgtgcctgctgcttcctgagagcccagcctctccctccagtacttctgtttgtgcccttcacttcccccattcccttccacagctcatagctcgtcatcttggcccttgtccacactctccaagcacattacagggtacctgattgctacacgttcagaatgcatttgctgttatcctgcttggcctggccaggcctggcacagccctggcttccacgcctgagcgtggaggacacgagttagttgtagtttggcttgcggtggggctgacttcctgttggtttgagcccttttttgttttgccctctgggtgttttctttggtcccgcaggagggtgggtggagcaggtggactggagtttctcttgagggcaataaaagttgtcatggtgtgtatgtgg

SEQ ID NO: 1078 - DNA, 3699 bp, Homo sapiens
ggcaggtccaggctggagccaggtgttgagtggcagcaaccaggaggtgctcctgccagcccttcatgcactttttctcacttctcccttctttttgtaaataatcacgcctgcttagatgcctggtgactctcatcttgcagcaggccacactgttggcctccaatgaagcctttaaaaagcagatggagagtgctagtgaggcggccaagaagtacacggagaatgaccagctcaagaaggtgagtccagtttctcgacccaccatggggcgtcctggtgttatactgcaggagccatattctttagggcctcagtggccactgctagcctatcaccctgggaaatgtgcctgaaaagccagagttgggtggaggcacagaggggaagtcctcagtggggagagtatgcctgctggagacgtctgtgtgtgggggtcctggtgaggaggagggtgttgctgctcacgtttccatccattgcttccagtcagacccttccctgagaaaaatggcccctcagtgagccaggccctctgctgtgaaccaaaagccctcagctaggccattgttccctgcaagattgccgcaccccctctggaactcggggtctgtggcatccctcagtgctggagaggaggtggggccagggtagttggccagtcttagaagtcctgtcaggaggtgagctgcaaggcaagctcggagggatgtggatgcagaggtgggatagagctggccaggccgactgggggcccctgactgcagtgagtggcaccgtgtagagagcacaaggcaccgccatccgcggaggggttggtgagcaccatggagctgctgagccctgctgctcgggaaggaggcagggccaggggccagggcaggcaaggcgtgcccggcgagctgcagcaggtggccccactggcgcttctcttccccttggcgggcagccacgccctggcctttgcctaagagctgggagcaagtggtggctctgttccgcgttgacatttccgaaggggcgagtggccagggcagcttgaggaaccgcagcttggtggggaggatggggctggaacctctccctccctccctcctgagtaaccctgacctttggcacttttcccagtgagctgctgttgacggaggcaagttggatgtcgggaatgctgaggtgaagttggaggaagagaacaggagcctgaaggctgagctgcagaagctaaaggatgagctggccagcactaagcaaagtgaggcttgacctcatgtccttccccgcagggaagtccagaggagcgtcctctgcccgctgctgcccattttgtgccaaagtactagtaacaagccttgcacgcatgctcgagggctgtgtgaaaacaaacaaatagcaccctatgcctccaaccccaatgcagccatgcttagccggcaggccagtgaggctaagtggtttgaatggggctcaggaggaaccaggctgcagttggtgggactcgattgccctgcgctagagcagtgcacgctggggctttcccatccagagtgtggcacggtagccccagcctgcctgggggcttagaatgaggggagtgtgggagtggtgttcaggagcggagtgggcagctcccaggcggcctgcctgtctttggtctcccatgcatagacttaagtctggggcgttttcccacaataccacaggcctcgcctgctgctgctgtctgcaaggcatggttgtcattgggtctcgctttcaggctgggatcttgttccctgtctcccactctcagcctccctggaggttacccttgccgagagccactagagttcccctccattaaagggactgggggatgtcctctgtatttcttttgctttatcttgagcttttttgtcagcctttccctctactttgggggcctgcaaaagcagagcggttttattttgagaagtaggctcctgtataacctcgtttgagatagatttgggccagtttctggtgtctgtagaagctgggtttttacccccgattcctgtcttttcatttctgttttcttggtcatttacatcatttcaagaactagagaaagctgaaaaccaggttctggccatgcggaagcagtctgagggcctcaccaaggagtacgaccgcttgcagtaggagcacgcaaagctgcaggtcagccctcacgtatcgctgcgcccagggcaggaaagcagagcaggatgaggcagcccctgcgggtgcggagggaaccttccaggggcccaggggccggctgccctctcccccactccccctggccacctctgccctaccgagtgggaccattcaccgggcaggagaggggtggcctggcagcagatgtagacacttgccgaggcagccctcaggagtggcactggctcactaggctctaagccttcctatcttcgtgctcaggctcattccatggtttggggcccagtcaagaacaaagaagcaggtgaaactctgggacccactgctggccttctttcctagagtgctggggggtgacatagggcaaagatccctgggcaagtaagggcacaaggtgtcaaaaaggcacctcccctagcaggcactagttgtggccatcacctgctgccctaggcctgatccaagtcctcagactagcttgggtgcaccaggccgcatttggaagccaggcggtcttgacgttgggagtgagggccacataaatactcctaactttggacagctggcctcagtgcttggtggcccaagtttgggcaccacagcaggtggggaggaagggtccagcctcaaagagggcacccatgccctctgtatagggcaggcttggcagatgggacttgggcttcgagggcacctgtcaaaggtgtgcagagttgggaagggcctgatcaggtcttgaagggtactggataccttgctgttccctgcagccaggactcagcccccagtgaggtcctggcagtcctccctggctggcgttaggtccagggctttccttagagtgtgggccagggctgatgctcctaccctggcaggcctttgggtgtagccggggagggggccccttgctcacttgaatagctctcattaggagagaggggaaccgagctggacctctggggcagggggctggagatggcaggggaggagtggacctggccaacctactgctgtgggatttctgtccctttccaggctacagtagttggtcccatggacaagaagaaagagtaagggcctccttcctccctggcctgcagctggcttccacctggcacgtgcctgctgcttcctgagagcccagcctctccctccagtacttctgtttgtgcccttcacttcccccattcccttccacagctcatagctcgtcatcttggcccttgtccacactctccaagcacattacagggtacctgattgctacacgttcagaatgcatttgctgttatcctgcttggcctggccaggcctggcacagccctggcttccacgcctgagcgtggaggacacgagttagttgtagtttggcttgcggtggggctgacttcctgttggtttgagcccttttttgttttgccctctgggtgttttctttggtcccgcaggagggtgggtggagcaggtggactggagtttctcttgagggcaataaaagttgtcatggtgtgtatgtgg

SEQ ID NO: 1079 - DNA, 1204 bp, Homo sapiens
caccagctccccgaacttgggcgagaaggcccgcagcacgttggccgtgaggaacaccacgaggccggcgatggccgagggccaggctgtgccggctccacgggagcgggccgcccgaagcagggtgtaggaagtcacagccacgtccaggagtggcttggtcaggttggagtagaggtgggccacagaggccgcaaaggccaccacgtcctccgtcagagactggtcagggttgcgaagccgcccgtccatgttgctgacccggtagtaggtctgctgggagaagtagaggcggtaggcgtgggccaccagacggctgcggaacgacagggccagttggccctccaggtaacggatggcactgttgacgaaggtagcagggagggcgatgaggagccactgcagcagctgccagccaaaagcccgcgggtccttgcggacgatgcagcgggccagccttccgtccaggcgggccacatacaccgacaggaaggtgcggctcaccaaggcggccgagtgcagggccagcagccccgtctcccggcacaggacccgggggaacagcagccgcaggagccacaggagccgctgcaggaatacccggttcatgccagctttggccgccgcgaccccggaggcctcctgcgtgggctccccggcgggcgcctgaagacccctggccggggccaggcactggcgcaccaaggggtagactttgtgggctccataggccgcgagggccaggagcacggccgtgcgcttcagcgtgttcccccgccagggccggggcctggagagcaccggcatgtcacctgggctggctgccgcgtagggactggggctggtgcctggggcagcagttgaggcaggtggctggaaggattgttgctctgaccctgggcctgttgtctaggcaactggaaaccttgcgatggcccctgagactgtcgctttaggcccccggggtggtgctggggcccctggtgcggtgggctcagggccctccagggtcgcggcctcttcgggcagcccaagtggaggaacttggctctcctgtcctgtcagtgccctggcccctgaggtcagggccttgagaggtctcgggcagagggggcgtctcttcctctccaccttctcctcctcctcctcccccggtggcgcccctccccggggcaccaggcgcgtccgtccgctccgcagcctg

SEQ ID NO: 1080 - DNA, 469 bp, Homo sapiens
gctgaagagtgcagatcccagagggagcagaataacagtgggaggagggtgttgtgaggggacctcaggagggtaacttagcagcagagcaaggagctcagggtaaccgcctgcctgggtggttaggaggccactggtggccctgctactggcttggaagggcaggctttggccagcctagattgaggaatacatgtgagggaaaagaccaggggcttgggcagggtgactccaggaaggaagcagttgaaggtgaggttcctggggggagaatgatcccgggtcatccagcaggaagagagaggacctagaaggtgtgaaaaagaactatcaggctgggggtgcagtgggaggagtatgcctagggtgctgtgggggtggggagcacctctgagggttggcaagaggaaggggaaccagggcctggcagaggggagccccagactgtctgaaggctgggaactaaagg

SEQ ID NO: 1081 - DNA, 469 bp, Homo sapiens
gctgaagagtgcagatcccagagggagcagaataacagtgggaggagggtgttgcgaggggacctcaggagggtaacttagcagcagagcaaggagctcagggtgaccgcctgcctgggtggttaggaggccactggtggccctgctactggcttggaagggcaggctttggccagcctagattgaggaatacatgtgagggaaaagaccaggggcttgggcagggtgactccaggaaggaagcagttgaaggtgaggttcctggggggagaatgatcccgggtcatccagcaggaagagagaggacctagaaggtgtgaaaaagaactatcgggctgggggtgcagtgggaggagtatgcctagggtgctgtgggggtggggagcgcctgtgagggttggcaagaggaaggggaaccagggcctggcagaggggagccccagactgtctgaaggctgggaactaaagg

SEQ ID NO: 1082 - DNA, 9872 bp, Homo sapiens
ccggcccggcgcccgatttccgccttccgacccagctgtgggctgcgccccacgccagcccgcgccccgcatggctgccgccggggccaggcctgtggagctgggcttcgccgagtcggcgccggcgtggcgactgcgcagcgagcagttccccagcaaggtgggcgggcggccggcatggctgggcgcggccgggctgccggggccccaggccctggcctgcgagctgtgcggccgcccgctctccttcctgctgcaggtgtatgcgccgctgcctggccgcccggacgccttccaccgctgcatcttcctcttctgctgccgcgagcagccgtgctgtgccggcctgcgaggtgagccgccaaacggggtcgggacggggccatgcctccgacgcgtgcgcggcgttaattccgggagcgaccagggggacggcggcaagcaccgctgccgccccagcctcagagctccctctccgcgctgccccaggagcaccttctcccgggcccttccaggatgtgctcatttttgctacataagcttctaactgtgcccacgcgcattggtaacccccagcttttaatcagtgggtaccaggtatggtgttaattcagataatagaaattgtcttggaaagatggatcccagtagctttttcgtatttttggcagtcgttcttaacgatcagtcttattaatttgattaactcaaaccacctctaggaggcaactcagttgcgtgtaccggacgaaatctagtttctggattttaaaagcttattcctgaaagcaaaaactttcatttcttttttgttgttgttattttcagttttacgtgcagaggataaaatatgtgaattgctgttttgtttgaagataaaacttttctctgtattcttttttagtttttaggaatcaactacccaggaaaaacgatttttactcatatgagccaccttctgagaatcctcccccagaaacaggagaatcagtgtgtctccagcttaagtctggtgctcatctctgcagggtttgtggctgtttaggccccaaaacgtgctccagatgccacaaagcatattactgcagcaaggagcatcagaccctagactggagattgggacataagcaggcttgtgcacaaccaggtgggtaatcttttttttaagtctcagttcagtttcatcgcctttgtcaacccagatatttccaggacaactttaaaggtaaaattaggaaaggtatagtactttaaaatttttcatgcctggaacacctttgtaaaaaaaaaaaaaaggctgtgaagtctgaatcactgaataatgtcaccatataggcatttaatttatgaccctttatctaaaatgccagaactatagggaatatagtactttagagacagcaaattattagactgtcttcaaaactaaatgattactaatagtgctgtcctttttgtttcagatcatctggaccatataattccagaccacaacttcctttttccagaatttgaaattgtaatagaaacagaagatgagattatgcctgaggttgtggaaaaggaagattactcagagattatagggagcatgggtaagcagtttcaggacttcattcattaagtggttaaacataatacttggaagaaagggctccatgtgcctagaagagaggtactgagaggaagactcactttggaggctgtagcatacaattttcagatattgcctcaggtaaaaatatacttcctggactttgttttctgacacataagaggtgtgttctgctccctgtaaagacaagggtgggtatccagatggtcccatgagtagggctgcacaagatgctggaggcttggtaagttcctctgggtcgcagatcggtttctcgggtcgggatagtgtgagtgcctagcacagtgtcgggcacgcagaagggccccttaaaagtttctctttcatctggccagttttagatacacaattttgtcagtttacttacagtgcatactcttgggtagtacttgtgctgaccaagtatcttagaggcttattttattatagtagccaacatttatccagcacttaccttatataaagggctgtttgtgcatgagctcattaaaatcgtgacagcagaccaatgagtgagaaactgccccattttgaaggtgaggaaattgaggttctgggtataactttctttggtcacataatattaaattttacaatttgagccttgagccatacacaaaaccaccacaaaattagatttatagactcaaaatgaaaacatcagcttactggtttgtagttcataccagtcatacattccaaaacatgttttgagtcttactctgtgcctgaccttgtgcttgataacagggatataatgggaagcaacactccagtggtcagatgctcacagtcttatggaggagcccaaataatatctggggaagttaaagtccatataatgactgataagagtacaatacaggtgccatgggaacacgtgacatcactgaagactgcctggaaggggccgcgcgtgtgttcatgcctatacgataaacatgatacataatgaaaatgcttatctttaggagaaaggagagcctagagtagcaggatcaaggatgaaagctggacttcaaatatgccttgttagtgtaaatgtgactgtggaactgtatgagtattttaagattatggagtaaagtaagttttaaaaagcagtccctaatcatcaaaagtaaaaaactcttgatgtagtcatataaccacactaagaactcttccaggtgacttcaaaacataggacagtacatctctagtagaatatgccctgagaatgaaaagaatgtaacagtgttagtattttgaataaacatgttattactagactgttgcttttattttgagatggttgtgtgtgtattggggggaaaggaaacgagtaattatgttggtgttactgagaactgagatgttgggcgtaggaggaagataatgttgattgtgtctacgtaccatttctctctaaaaggaactccaggctctttggagaggtggttgattccagaactaggtcaggaaacgttcatataatgtgggaacatggtcatatcaaagattaaggataaggattactagggccatgtcagaactcaagcaacatgaaaaggctcctgcttgcaaaagatggacagtttgaacatccacaaggacgctaactgcatcagatatgtttaatgggttcaaaatgatactttaaaaaaactcagtaatcatctttataggatacttgggaacagactcattttcaaattggtaaataaaaggaaagagtttgccttcgaggggtacataacttaattatgaatgaagtgatatgtgtggaatttacttcagagtaatggaggtggaagtggcagagaaaggaaacactggacttgatagtgttgaaactgattaatgatatgtggcggttcattatagtatttccacttttctgtatgtccaaaattttctaaaataaaaggagaattgaatagaaaaatgcttcctggaggtagctgtgtcttacctgagacttggcaggaggcagtagggcctgagggaacagcatttacagtgtcctaacggttatactgaaactttccacgtatacttgatggaacatcaatctgaaggcatcctacacttcctccatcagacctgatggtgcaagtgaacaccatcagtgcctttccagtttcatcaaagcagttattttagcttctctgacccaaggtatatcagttctattttaacgtacattacaaagactaatggttatacttagagacacgggtctgttggggacagcagtggcttagggtggctgtaatcccaggaaggaatgtggagaaggaaatgaacatttttttttttgagacggagtctcactctgtcgcccaggctggagtgcaatgtcaccatctcggttcactgcagcctctgcctcccaggttcaagtgactctcctgcctcagcctcccgagtagctgggattacaggcacctaccaccacgtctggctaatttttatatttttagtagatacgggatttcaccatgttggccaggctggtcttgaactcctgacctcaggtgatctgcccgcctcggcctcccaaagtactgggattacaggcgtgagccactgctccaggccagaaatgaacacttgatgactgagtgagtgagcctaccagctgaggatactaatgataagggctcacatttgttgggtgtcctgtgatgtgctgggcagtcctaagcccttgaccattctgttattttgaagctttaaggagatgcactaaatggaagtccatataatagagttggatggagtacctggaaattcagatggtccaacttgaatgagtgaataaatagggaaagctatctgattaaaagtgggtcccctctccatgtgtgaattgtcaagttgtggggattactcctgtttttcataatagttacgttgatttttcaggtgaagcacttgaggaagaactggattccatggcaaaacatgaatccagggaagataaaatttttcagaagtttaaaactcagatagcccttgaaccagaacaggtaaagtggagctcatagctcctcatcgtgttctcttcaggccatgttttatgagtataatctgtaagaaataacttcatagtaacattagtctgttccttaggagcctataaaagcaggcttttgttatcttgttagaggagttcctcacacagatgggccatgtagaaaggtgttttgcagtgctgatccatttaatagttactaaaagactaaaggttatactgtttatcatacagggttcattttctaaagcaagcatcagggatgggagatgaatgagatgttgcctaaggtacatgaggtttaggcaccattggcccccccgccagaaagaaaaaaggttatttttgcccatttccaacaggtaactttggcttgtaaaatgtgacatgttaacatttttctccttaacctcccctaccataaacgtaaatcacgaaagaaaactaaactcccataaaccagtcactggttcaaataaatacacaggaagaatagatctaggtcttaaacactaaggcagtttttagcaatgcatatgcttttagacaaaatacagaaaaccactcagttgctgtaggaagcttattacagtgaaatttacttatgtttgtagtagttttcaaaacactatgtttcacttggtatttgtccctcctaaaattttttaactatgaaggtaggcacagactctgggcagaattctgcaattagagcagaggctcattcttagtcccttcacaatatattcataggattaagttgccaacattaggtagtaaaagcatcatctgggagatatattttgatgccctctgagtcagataaactgaaataatcactttgaggtgattgagaaggcattagtggcacactggtacagccaggtctgatgggggaactgtgacatgccttttgggtcagtgctacatcaagagtaggaacattcatggagtagatagcatgttaccattggcaacttataggtaaggtattgattatttgaacatgatcttcattgattttagattcttagatatggcagaggtattgcccccatctggatttctggtgaaaatattcctcaagaaaaggatattccagattgcccctgtggtgccaagagaatattggaattccaggtatgaccttaaataaggaccatttagtgtgtaatcaccatgattgtttttaaacattaaaaacttcaccaaggtaatttgtgcacatgggtcaacatggcagtatggaagggtaccctataatgaaaatcatcagtttcctgcctcaccttggggctagttccctggaaggaactgtcttgtttttttctgtttcctagttttcagacacggtctattgactgacttctgtgacaatgaggatatctacactgctctccacctccagtgtggttatgtcattattattagtgcctctgttaacttttgttattttaaataatgtataccttcctttcttgttctagtaattaaagtctttgactatatactttatgagaggagtctttactgtttaatcttggtttgtggatttgttagaaaaaatggatataagcattaaagataaatgtccttccctgcccaaaaggatttgttagcatcaaaatccatttgggtagggtggaaatgctcttgagctatggattcactaaccttaccaaagtcatagctaatattggtttgtttctttgggtaaaaaaggaattatgaggaccatacacaaaactctgcttggttcttagtgccaaagctctcaatgtccaaattgaggtgacaggatttgtataaagtgattccatatcaggtggctattctgcctattcactctttgagttagactacttctaagattcctctctggtctctataactacattgatagatgtcctttctgtattcattactagtaattagtgtttcttgagtcaagagtaacaacatctgcaatgatacaaagtaaaagttgcccaaatagaagcctcagcccttttgagtggcatattagtaatgaaaataattcattaacagccacttgtgaacttctttctcaaatggaaaagaccaaacagaaggtgagaggggctttgaagtcataaggaagttttagattgttaaacatgttaattgtataatgtctataatcctgctttgtagtatgaggattgaaagaccaagatccctataatcatcctggctgagaaggtctcgtgctccctgctgtgaagcagctttctaactgtgtgtcaccctcttctcaggtcatgcctcagctcctaaactacctgaaggctgacagactgggcaagagcattgactggggcatcctggctgtcttcacctgtgctgagagctgcagcttgggtactggctatacagaagaatttgtgtggaagcaggatgtaacagatacaccgtaaaggcatcttaaagccttgaaaaatgttaataatcttttataccttgcaattccatttctgggattttatcctaaggaaatacttataccaaaaatagaggtgcagagatgttgacagattgcttacacagtgtctacttattagtgaaacaaaagtgtccagtgacagggaattaaataaattttggtacatccacagaggaaggctacacagtcttaattataacacctatattgacaacagacataccattataggtggtattcatggtatgatcctattcttgtaaaaatatttgtatgtatgcacagaaatctgcaaagatgtacacttagtgaactggttaccaacgaatggtgggactaactaaaatggtctttttacttatatgtgcatttctttttataataaaaatgggttatatgcctaatgaagtcaaaccatctcactctgagcatttcccaccctaggtttttaaaacacaaaaatacttaggtaaaactcccaacaaacttgtctgatcattagctgattatcacaggctctagtatgtactggaagcccagaatatttgagaaataccaaacctcaggttggtgagtatgatgaacaggaaacccagtaattctgaagcagcagtatcacagttggcaggatgaggaacaacagtggctttgtgatcacagaactggaatttaaagaggctggaccttcagaactgatcttggtcagccagcggccctgcttacagatgagacactgaaaggcaaaaggcgatggtcttccctttccgtgtcagcattgtatacaggttccctatcgcacatacaagggttatggaatgtaagccaaaataagggtctggcctaggaggcagcagcctgaggaaaggaaggccctgaagtcagttttcaaagggctgacccttggcctattatgtttctgatacatctgtttaagcaagcggctcctaagactacactaaggtttcttccatcccctagcagctcacagttgacaattcccagttctctcagcaccagtgatgcctgcccttaagacacattgctgttgatcagtgcttgaatactgacggctaattctgataaatttctcaggcttatttccttaatctacattggctcacattgtcccctaacacatccctgttaactgaaatgcattgccaccataaatcctcacgttttcataggtaacatcacttgctaatgtaattgtctacttggctattttatttgtaatttaaaaagttctgtcctagtagtccatattatataagtatacatatgcaatttgtattaattgtataagatagttatacatagcaccatatgggaaactgcagtatggagtttctcccatggggaggttatcagctacttaagagctagaggatactagtttcgaacctgggatggctaaatctatgaaaatcacctataactatggtgtcacagccctgtggctactggagtaagttgtcatcaactagtgacaagagctggtcgcaacacttagtaggaagcacagtggcataaggaaacctggactagtggggcctttatatctaaaattatgtattattccttataggcagaatctgtaagtacgttatgactgctaatgacttttaaagcaaacatgttaacgatctttctatggtaaaaactgttatttggggacatcaccagatgatgtggacattcttgcaggtattttggcatacccaggcaagctgtcattggtgtatattccagttaacctctggagatgatcgtaacagtttacagggcctttccatttgggatggatatatcaagagggagacaaactggtccaaatcaccagaaagaaaatctcacagcaccgacttggcatctgtgttaaaaaatagcaactatatttaaaataaactgtacaacataaaaaatttaaattaaaaaatgcattaagcaagttgcctttagaaatgtgaagacattttaaaacactacaagataatgagcaagtctcacctacataatcatggctccacagacggtgccagtccatgcatccaccatttctcaacacctacaaagttttaagatctgcttggttcagatactgtccagccacagcagctccctctgctgtagagagcagcatattcagctttgcctttttatttcagatactgaatatcctttggcaatttcagatatcacagcaaaaaaaaaaaaagttccaagtgtttttggcaatcatattggtgatagtgtttttgttactcttaagaatgttatggtggaggtgggaggatggcttgagcctaagagttcaagaacagcctgggcaacagttgagtgactttgtctctacaaaaattaaaaaaaattagctgggtgtgttggtgtgcacccgtagtcctggctagctactccagaggctgaggtggatcacttgagcccaggagtttgagactgcagcaaaccatgattgtgccactgcactccagcctgggcaacagagaccgtgtctcaaaaaaaattgcacatataacagataaagtaatgataaagtaaatacgtaaagtaaatgagtaattatgggacattctaattcctcatcccctatgtctttaagaattaaaaattctcagtgtagaaggaagagtgtaatacagaattggttaaataaaaaccctataagctttgaatttgaattggatatacaattggtaaaataaccctatgagctttgaattggacatattaat

SEQ ID NO: 1083 - DNA, 9878 bp, Homo sapiens
ccggcccggcgcccgatttccgccttccgacccagctgtgggctgcgccccacgccagcccgcgccccgcatggctgccgccggggccaggcctgtggagctgggcttcgccgagtcggcgccggcgtggcgactgcgcagcgagcagttccccagcaaggtgggcgggcggccggcatggctgggcgcggccgggctgccggggccccagccctggcctgcgagctgtgggccgcccgctctccttcctgctgcaggtgtatgcgccgctgcctggccgcccggacgccttccaccgctgcatcttcctcttctgctgccgcgagcagccgtgctgtgccggcctgcgaggtgagccgccaaacggggtcggaacggggccatgcctccgacgcgtgcgcggcgttaattccgggagcgaccagggggacggcggcaagcaccgctgccgccccagcctcagagctccctctccgcgctgccccaggagcaccttctcccgggcccttccaggatgtgctcatttttgctacataagcttctaactgtgcccacgcgcattggtaacccccagcttttaatcagtgggtaccaggtatggtgttaattcagataatagaaattgtcttggaaagatggatcccagtagctttttcgtatttttggcagtcgttcttaacgatcagtcttattaatttgattaactcaaaccacctctaggaggcaactcagttgcgtgtaccggacgaaatctagtttctggattttaaaagcttattcctgaaagcaaaaactttcatttcttttttgttgttgttgagtattttcagttttacgtgcagaggataaaatatgtgaattgctgttttgtttgaagataaaacttttttctgcattcttttttagtttttaggaatcaactacccaggaaaaacgatttttactcatatgagccaccttctgagaatcctcccccagaaacaggagaatcagtgtgtctccagcttaagtctggtgctcatctctgcagggtttgtggctgtttaggccccaaaacgtgctccagatgccacaaagcatattactgcagcaaggagcatcagaccctagactggagattgggacataagcaggcttgtgcacaaccaggtgggtaatcttttttttaagtctcagttcagtttcatcgcctttgtcaacccagatatttccaggacaactttaaaggtaaaattaggaaaggtatagtactttaaaaatttttcatgcctggaacacctttgtaaaaaaaaaaaaaaggctgtgaagtctgaatcactgaataatgtcaccatataggcatttaatttatgaccctttatctaaaatgccagaactatagggaatatagtactttagagacagcaaattattagactgtcttcaaaactaaatgattactaatagtgctgtcctttttgtttcagatcatctggaccatataattccagaccacaacttcctttttccagaatttgaaattgtaatagaaacagaagatgagattatgcctgaggttgtggaaaaggaagattactcagagattatagggagcatgggtaagcagtttcaggacttcattcattaagtggttaaacataatgcttggaagaaagggctccatgtgcctagaagagaggtactgagaggaagactcactttggaggctgtagcatacaattttcagatattgcctcaggtaaaaatatacttcctggactttgttttctgacacataagaggtgtgttctgctccctgtaaagacaagggtgggtatccagatggtcccatgagtagggctgcacaagatgctggaggcttggtaagttcctctgggtcgcagatctgtttctcgggtcgggatagtgtgagtgcctagcacagtgtcgggcacgcagaagggccccttaaaagtttctctttcatctggccagttttagatacacaattttgtcagtttacttacagtgcatactcttgggtagtacttgtgctgaccaagtatcttagaggcttattttattatagtagccaacatttatccagcacttaccttatataaagggctgtttgtgcatgagctcattaaaatcgtgacagcagaccaatgagtgagaaactgccccattttgaaggtgaggaaattgaggttctgggtataactttctttggtcacataatattaaattttacaatttgagccttgagcaatacacaaaaccaccacaaaattagatttatagactcaaaatgaaaacatcagcttactggtttgtagttcataccagtcatacattccaaaacatgttttgagtcttactctgtgcctgaccttgtgcttgataacagggatataatgggaagcaacactccagtggtcagatgctcacagtcttatggaggagcccaaataatatctggggaagttaaagtccatataatgactgataagagtacaatacaggtgccatgggaacacgtgacatcactgaagactgcctggaaggggccgcgcgtgtgttcatgcctatacgataaacatgatacataatgaaaatgcttatctttaggagaaaggagagcctagagtagcaggatcaaggatgaaagctggacttcaaatatgccttgttagtgtaaatgtgactgtggaactgtatgagtattttaagattatggagtaaagtaagttttaaaaagcagtccctaatcatcaaaagtaaaaaactcttgatgtagtcatataaccacactaagaactcttccaggtgacttcaaaacataggacagtacatctctagtagaatatgccctgagaatgaaaagaatgtaacagtgttagtattttgaataaacatgttattactagactgttgcttttattttgagatggttgtgtgtgtattggggggaaaggaaacgagtaattatgttggtgttactgagaactgagatgttgggcgtaggaggaagataatgttgattgtgtctacgtaccatttctctctaaaaggaactccaggctctttggagaggtggttgattccagaactaggtcaggaaacgttcatataatgtgggaacatggtcatatcaaagattaaggataaggattactagggccatgtcagaactcaagcaacatgaaaaggctcctgcttgcaaaagatggacagtttgaacatccacaaggacgctaactgcatcagatatgtttaatgggttcaaaatgatactttaaaaaaactcagtaatcatctttataggatacttgggaacagactcattttcaaattggtaaataaaaggaaagagtttaccttcgaggggtacataacttaattatgaatgaagtgatatgtgtggaatttacttcagagtaatggaggtggaagtggcagagaaaggaaacactggacttgatagtgttgaaactgattaatgatatgtggcggttcattatagtatttccacttttctgtatgtccaaaattttctaaaataaaaggagaattgaatagaaaaatgcttcctggaggtagctgtgtcttacctgagacttggcaggaggcagtagggcctgagggaacagcatttacagtgtcctaacggttatactgaaactttccacgtatacttgatggaacatcaatctgaaggcatcctacacttcctccatcagacctgatggtgcaagtgaacaccatcagtgcctttccagtttcatcaaagcagttattttagcttctctgacccaaggtatatcagttctattttaacgtacattacaaagactaatggttatacttagagacacgggtctgttggggacagcagtggcttagggtggctgtaatcccaggaaggaatgtggagaaggaaatgaacatttttttttttgagacggagtctcactctgtcgcccaggctggagtgcaatgtcaccatctcggttcactgcagcctctgcctcccaggttcaagtgactctcctgcctcagcctcccgagtagctgggattacaggcacctaccaccatgtctggctaatttttatatttttagtagatacgggatttcaccatgttggccaggctggtcttgaactcctgacctcaggtgatctgcccgcctcggcctcccaaagtactgggattacaggcgtgagccactgctccaggccagaaatgaacacttgatgactgagtgagtgagcctaccagctgaggatactaatgataagggctcacatttgttgggtgtcctgtgatgtgctgggcagtcctaagcccttgaccattctgttattttgaagctttaaggagatgcactaaatggaagtccatataatagagttggatggagtacctggaaattcagatggtccaacttgaatgagtgaataaatagggaaagctatctgattaaaagtgggtcccctctccatgtgtgaattgtcaagttgtggggattactcctgtttttcataatagttacgttgatttttcaggtgaagcacttgaggaagaactggattccatggcaaaacatgaatccagggaagataaaatttttcagaagtttaaaactcagatagcccttgaaccagaacaggtaaagtggagctcatagctcctcatcgtgttctcttcaggccatgttttatgagtataatctgtaagaaataacttcatagtaacattagtctgttccttaggagcctataaaagcaggcttttgttatcttgttagaggagttcctcacacagatgggccatgtagaaaggtgttttgcagtgctgatccatttaatagttactaaaagactaaaggttatactgtttatcatacagggttcattttctaaagcaagcatcagggatgggagatgaatgagatgttgcctaaggtacatgaggtttaggcaccattggcccccccgccagaaagaaaaaaggttatttttgcccatttccaacaggtaactttggcttgtaaaatgtgacatgttaacatttttctccttaacctcccctaccataaacgtaaatcacgaaagaaaactaaactcccataaaccagtcactggttcaaataaatacacaggaagaatagatctaggtcttaaacactaaggcagtttttagcaatgcatatgcttttagacaaaatacagaaaaccactcagttgctgtaggaagcttattacagtgaaatttacttatgtttgtagtagttttcaaaacactatgtttcacttggtatttgtccctcctaaaattttttaactatgaaggtaggcacagactctgggcagaattctgcaattagagcagaggccattcttagtcccttcacaatatattcataggattaagttgccaacattaggtagtaaaagcatcatctgggagatatattttgatgccctctgagtcagataaactgaaataatcactttgaggtgattgagaaggcattagtggcacactggcacagccaggtctgatgggggaactgtgacatgccttttgggtcagtgctacatcaagagtaggaacattcatggagtagatagcatgttaccattggcaacttataggtaaggtattgattatttgaacatgatcttcattgattttagattcttagatatggcagaggtattgcccccatctggatttctggtgaaaatattcctcaagaaaaggatattccagattgcccctgtggtgccaagagaatattggaattccaggtatgaccttaaataaggaccatttagtgtgtaatcaccatgattgtttttaaatattaaaaacttcaccaaggtaatttgtgcacatgggtcaacatggcagtatggaagggtaccctataatgaaaatcatcagtttcctgcctcaccttggggctagttccctggaaggaactgtcttgtttttttctgtttcctagttttcagacacggtctattgactgacttctgtgacaatgaggatatctacagtgctctccacctccagtgtggttatgtcattattattagtgcctctgttaacttttgttattttaaataatgtataccttcctttcttgttctagtaattaaagtctttgactatatactttatgagaggagtctttactgtttaatcttggtttgtggatttgttagaaaaaatggatataagcattaaagataaatgtccttccctgcccaaaaggatttgttagcatcaaaatccatttgggtagggtggaaatgctcttgagctatggattcactaaccttaccaaagtcatagctaatattggtttgtttctttgggtaaaaaaggaattatgaggaccatacacaaaactctgcttggttcttagtgccaaagctctcaatgtccaaattgaggtgacaggatttgtataaagtgattccatatcagggtggctattctgcctattcactctttgagtcagactacttctaagattcctctctggtctctataactacattgatagatgtcctttctgtattcattactagtaattagtgtttcttgagtcaagagtaacaacatctgcaatgatacaaagtaaaagttgcccaaatagaagcctcagcccttttgagtggcatattagtaatgaaaataattcattaacagccacttgtgaacttctttctcaaatggaaaagaccaaacagaaggtgagaggggctttgaagtcataaggaagttttagattgttaaacatgttaattgtataatgtctataatcctgctttgtagtatgaggattgaaagaccaagatccctataatcatcctggctgagaaggtctcgtgctccctgctgtgaagcagctttctaactgtgtgtcaccctcttctcaggtcatgcctcagctcctaaactacctgaaggctgacagactgggcaagagcattgactggggcatcctggctgtcttcacctgtgctgagagctgcagcttgggtactggctatacagaagaatttgtgtggaagcaggatgtaacagatacaccgtaaaggcatcttaaagccttgaaaaatgttaataatcttttataccttgcaattccatttctgggattttatcctaaggaaatacttataccaaaaatagaggtgcagagatgttgacggattgcttacacagtgtctacttattagtgaaacaaaagtgtccagtgacagggaattaaataaattttggtacatccacagaggaaggctacacagtcttaattataacacctatattgacaacagacataccattataggtggtattcatggtatgatcctattcttgtaaaaatatttgtatgtatgcacagaaatctgcaaagatgtacacttagtgaactggttaccaacgaatggtgggactaactaaaatggtctttttacttatatgtgcatttctttttataataaaaatgggttatatgcctaatgaagtcaaaccatctcactctgagcatttcccaccctaggtttttaaaacacaaaaatacttaggtaaaactcccaacaaacttgtctgatcattagctgattatcacaggctctagtatgtactggaagcccagaatatttgagaaataccaaacctcaggttggtgagtatgatgaacaggaaacccagtaattctgaagcagcagtatcacagttggcaggatgaggaacaacagtggctttgtgatcacagaactggaatttaaagaggctggaccttcagaactgatcttggtcagccggcggccctgcttacagatgagacactgaaaggcaaaaggcgatggtcttccctttccgtgtcagcattgtatacaggttccctatcgcacatacaagggttatggaatgtaagccaaaataagggtctggcctaggaggcagcagcctgaggaaaggaaggccctgaagtcagttttcaaagggctgacccttggcctattatgtttctgatacatctgtttaagcaagcggctcctaagactacactaaggtttcttccatcccctagcagctcacagttgacaattcccagttctctcagcaccagtgatgcctgcccttaagacacattgctgttgatcagtgcttgaatactgacggctaattctgataaatttctcaggcttatttccttaatctacattggctcacattgtcccctaacacatccctgttaactgaaatgcattgccaccataaatcctcacgttttcataggtaacatcacttgctaatgtaattgtctacttggctattttatttgtaatttaaaaagttctgtcctagtagtccatattatataagtatacatatgcaatttgtattaattgtataagatagttatacatagcaccatatgggaaactgcagtatggagtttctcccatggggaggttatcagctacttaagagctagaggatactagtttcgaacctgggatggctaaatctatgaaaatcacctataactatggtgtcacagccctgtggctactggagtaagttgtcatcaactagtgacaagagctggtcgcaacacttagtaggaagcacagtggcataaggaaacctggactagtggggcctttatatctaaaattatgtattattccttataggcagaatctgtaagtacgttatgactgctaatgacttttaaagcaaacatgttaacgatctttctatggtaaaaactgttatttggggacatcaccagatgatgtggacattcttgcaggtattttggcatacccaggcaagctgtcattggtgtatattccagttaacctctggagatgatcgtaacagtttacagggcctttccatttgggatggatatatcaagagggagacaaactggtccaaatcaccagaaagaaaatctcacagcaccgacttggcatctgtgttaaaaaatagcaactatatttaaaataaactgtacaacataaaaaatttaaattaaaaaatgcattaagcaagttgcctttagaaatgtgaagacattttaaaacactacaagataatgagcaagtctcacctacataatcatggctccacagacggtgccagtccatgcatccaccatttctcaacacctacaaagttttaagatctgcttggttcagatactgtccagccacagcagctccctctgctgtagagagcagcatattcagctttgcctttttatttcagatactgaatatcctttggcaatttcagatatcacagcaaaaaaaaaaaaagttccaagtgtttttggcaatcatattggtgatagtgtttttgttactcttaagaatgttatggtggaggtgggaggatggcttgagcctaagagttcaagaacagcctgggcaacagttgagtgactttgtctctacaaaaattaaaaaaaattagctgggtgtgttggtgtgcacccgtagtcctggctagctactccagaggctgaggtggatcacttgagcccaggagtttgagactgcagcaaaccatgattgtgccactgcactccagcctgggcaacagagaccgtgtctcaaaaaaaattgcacatataacagataaagtaatgataaagtaaatacgtaaagtaaatgagtaattatgggacattctaattcctcatcccctatgtctttaagaattaaaaattctcagtgtagaaggaagagtgtaatacagaattggttaaataaaaaccctataagctttgaatttgaattggatatacaattggtaaaataaaaaccctatgagctttgaattggacatattaat

SEQ ID NO: 1084 - DNA, 426 bp, Homo sapiens
cattaaagccactgtagtagccaagggaaagcttcctttttgtcctctgaaggttcactgaaaagtcaactgacaaaaggcacattaattggagaaagggcatacaaatttattaacatgcacatgggggagaaccagagtgattttgctgaagccccaaatggggttcagaaacttatataccatcttgaggttacagaatgggggtttggattgtggcataacaggttatgcgggtggagacctggctgacaaccacggtcttgttatgtaaatgaaacctcctaagtagaactccttaaagagaacaggtggtacatgtttctttcagacctttgcaaaccaacagtaaaattctaaaccctccaaccgactgatggaccctctgcttgcccaagggcattctgaagttaacctgaaaaacta

SEQ ID NO: 1085 - DNA, 18491 bp, Homo sapiens
ctaacacttttataaactgcatttattgtacagagtactctgaagaaagaaaaaaatatgtacagccattcattttcattaacacatatattctgtcctgcaatactggagaggtggaatgtgtctggcacagaaataacccctaggagttataaattagaaaaacaacacttttaaaaaagatttttacttttctggtagaaatataaaaactgtggttcatggggaaaaacattaaaattaaaaagtccaatcaattatagaggtggctttaacacttaaagttttctccctcaaaccaacttgtcaacagcagtgtttaaaatctacatataaataaatgggcagcgctgcccagatagcagcacggtatgagcaactcacagtcacgctgcgcggtgttctcagtgcacaaataatgccccttcccggcatcccgcggtgggcacttacagaagggcatcacctggtgccacaccctgcaactcaacatccatcttctcacaacaccaccatttaaaggtaccaaaacaaactgatttgtttaaaaaaaaaaaaagaagggggtgggggaggcaagggtacatgagagccattacgtcgtcttcctgaatccctttagaatagggtagatgttttcaaatgcttcataaatttctgctctgactttagcacctaagaagacaagttggagtagagatgagagactgaaatggcacttcttaacatattaagatggtaaaattcttaccttaaagctgcaagcacaattctcaccatacccagtcagattaaggcacaggcatgaaaacattaatagtggaatcccttgtcacaatcttatttttgtttataaaacaatacttttaaaaaatcatcttagtgactccagcgtctcattctatagctcaagaggcatgtattcacacttctctccttggtcctgaaccaggccataaaccaagcaggacggcaatgataacaactgaatcttcttctctgaattgctgccttcaactagactcatttctgaatcttcctttcttgtctcataatcatattgctgaggaatcctaaagcttcagataactaattccaagtgaaaacgccatcttttgttcaatgcaatgctcacctcctcactgtaaatggaagtctgcttgcagagctgtggtcagacttccctgctctcactgtgcctttagtgggcacgtttctcatcagactttgggtgggaggcctttgtacaagaagctagcccactgtccgaacactgaaatttcttttcagcactgagaaaatgccatactcaaaacacttacaaactttcagatactacttcctgttacaacttacctgttaatacaacttttccagaaacaaaaataaggagaacaattctgggtttgatcattctgtagattaaaccaggaaataactctggctcataactagaaggaaaattgcaaaaagtttagaaatcaagagctttgtgtgcttttagataaaatgaggacctgtacaaggaaaaatactgaataaacaaactagtcaagaggtaaaacacagttcttcaagcagcatcaaaggatagaatagaataattaaagcaagtgaggccgacttgtagtcgtcagttgataaccactggatggaaggctatttgtcctcctatcactttaccctatttctattgaatctggattttctgatttaagaaaaagagccctgtagttatgtctgcagtctctatatcattagatataatgatatctaatgcagataataatcctttacttttacagtcctaataattactattacagtcctaataatcatttacttctaagatccaatactgacagtttaacttttaatcatatcttacctccttaaattgaaatattctctagctgacaattgtggtcaggaaatttaatcaaacttatatactagcctgagaattaacctatacctgattaagctgtctgactgaatggactattggtatatattctttttttttttgagacggagtcttgctgtgtcgcccaggctggagtacagtggcacgatcttggctcactgcaacctccatctcctgggttcgaatgattgtcctgcctcagcctcccatgtaactgggattacaggcatgcaccaccatgtccagctaatttttgtatttttagtaaagacgaggtttcaccatgttggccaggctggtcttgaactcctgaactcaactgatctgcctgcctcggcctcccaaaatgctgggattacaggtgtgagccaccaggccaggcctggtacatattcttctaagcctagtaatctcatttttctcagttcggagagactgaaaacaggatgcctctgtttctgtgtgtctgacctaagacaaaattcaggacaggcttctctgaggaagagtggaatgggtagacatatggaactcaagtgggagcttcctaggtgaaaagggaaatgagcatactaggcataaaagtggcaagtgcaaaggcctagggcaggaggaaccaagtgagccccaggggcacacagaactaatgtgcctgtgaacagacaccagaagaccatgagatgaagcagtgaggtgggcagggctgcctgcctgtgagtcttcacctgcaagtagcagggaagataattagaaagttgttcctatcgctcaacttcacactttgctggtagatctgacacaatgttgactaaaagagaagatccaaactgggaaaaaaaattgatacaaggttagggtcaattcatgcattccaagtgtattcagcaataaaacgataaaacatacagaagtagaatcaaattcattccagtaaaggggagttatgggtaccgcaaagtgataagggaagcagaggctggtgagggtgataaatatgactgagaacatcaggaagacaatgcaagaatacatacaactataaccatgtcaactgttctcatatactgaatattttgcatgtgttttattctgaacaatgtttagattataaatgaactgttgccaataacaatcataatacatttcagacttacctactaaattgttggtgggtgagcacaaggccttctaaccttataggaaacttcacatcacagctccccaccatattctgaatcttgaagtccaagaacttagctggaaaacccaacttctgtacaactctagcatattttcttgctgccagtctggactgttcttcactagggaaaggaaaaaagtgagttattcatactcagagccagctaaaatacttatttagactaataacttataaaaagtccaaaacagtaaactaataaagtgtaaactggtcagccttcttgcaataggagaaaagactgacaggcattcacaattccttataaagtattcctggatccttgacagaaaactgtaggcctgccaaaatgacctttcaatccgccaaattattgtagccctagattttatggatgtgaattatcaccatcatcagtcatcactatttctgtattttagcccatgcatttctactgagaggaaaactaacaaacttcattttgatcagaaaatgttgatgagatttattattgaacaatgtattcactaattctatcctcttttataccaagactcatcatgaatagacattcctatgtcatttgttgaataaactacgacttagcagttcagagcttacataagaaaagcagaatgtgggccaggcatggtggctcacgcctctaatcccaagcactttgggaggccaaggcggatagctcacctgaggtcaagagttcgagaccagcttggtcaacatggtgaaaccctatctctactaaaaatacaaaaattagctgggcatggtgccaggcacctgcaatcccagctacttgggaggctgaggcaggagaatcacttgaacctgggaggtggaggttgcagtgagccaagattgtgccactgcactccagcctaggtgactccaccaaaaaaaaaaaaaaaaaaaaaaaaaaagaaaaggaaagaaagaaagaagagaaaaaaagaaaaaataaaagagaaaaaggcaggcaggcaggtcgggcacggtggctcacacctgtaatcccaacactttgggaggctgaggcaggcggatcatgaggtcaggagattgagaccatcctggctaacacagtgaaaccccatctctactaaaaatacaaaaattagccaggcatggtggtgggcacctgtagtctctgctactcgggaggctgaggcaagagaatggcgtgaacccaggaggcggagcttgcagtgagccgagatcatgccactgcactccagcctgggcgcagagcgagactccatctcaaaaacaacaacaacaacaaaaaagaatgtgaaaatattaccataaagagactatcaggtgcaggggatcaggaagaacaaaaatcaagcatatatatatatgctacgcttttaaatttcaggtaaatgtattggtggtttcttgtcttgatgaaatagtcatccaactacatatacaatattcagttttcagatgctctgggacaaaaaggctaaatgctgcatgaaaagcttgccttgataaaccaaaagtttctgatgttccatgcaggggaaaacaagcaaacaaaaacgctcttaattaaagaggttactactgcatgttgtggccaaggggaagtgaaaggcaagaacacatccttgtcctgcattctgaaaaacctcggagatcaggagccagaatgtccacaccaatggcattcccatcactgaaagacaatttcaaacttcagaataagcaaaaatatccacagcccccttctatgtgttgatacctccaagtacatttaatactctttcatttaaaaagttttagtttatttgttcagttcatttatgaagctaatgtcactaattttccccctagtttttgacttctaccaagtatataagctctgtttagaacagtcagggccgcagagtactaaccttcagacaggatcacttcagatggagaatataggcaatgacattttataacaagggtgcattccttaagatctgcacaactcaaacactattaatgaaagctagttccagtgagaaggcaggtttctgcagccaacacatgtgatgctgtcacgctgccaggcccaataaggtctgcaaagcccttacaccattagcttagaagtgttttaattcttgatcaattttttcttccatttcaagatgtatttgtgttatttacaacatttttcacataaagggaattttattaatagttctgatgttgtattacatcttacctaatttttttcttttttctggagaaagtgtcttgttctgtctcccatgctggagtacagtagcatgatctcagctcactgcaacctccacctcccggatttaagcgattctcgtgcttcagcctcccaagtagctgggactacagacatccactaccacgcctggctaatttttgtatttttagtagagatggagtttcaccatgttggtcaggctggtctcgaactcctggcctcaagtgatttgcccgccttggtgagacaccacgcctgcccatatctaatttttaagaaaatgaaatcactgctatctaacattaatagaatcaaataataaataaataaataaaaataattaatagaatcatattaaaatggtttttataagaaagcaataataacatgttaaagtgctaacctaataacctaaaaacaatgagatatcaccttttcattcataacccatagaccagaagaatgaatttcttacggctacctcttggctcctgtgcacaccattttcccagaactgaaaatcagtgccgtggttcgtggctctcttatcctcatgattaccgcagcaaaccgctacaatggtcagagagaatcattagtgaggtcatgccaaactgctcaatgttgttaggcgaaccacccattgacaaaaaaatcacaactggtaggaaggacatagtacatctagttatcaaaatatttgttctgtatttctgtatatctgtaaaggatttgcatacaccacatgtaacaaatattcctttgcataaggagcagaaaataatcaattgtgactaagttataccaaatctgtatgttctttcacatgagcattccatcaagagaaatgtttgcaaaatttggttatgttctcaataaatacaagtgcttctgtttctactttatatttgctgcttatcatgactatagcttctctgatacattttgttttattaatatgaattttgaggcaaataaaccaataaaccttttctaccttaatggaattaataaatcagattacaagcctatcaatacgtaatgaagtaaaatcatgctttcaattggtctttagaaacaatattaatgtattaaacacataaatgcaaattaggaaaaaaacacagttttaacttttattttctgctttttatgcttgaaacatgttaattctttcagaaaattttcttgctaaggtggtaactcaaggggaaaatatttcaactgtgggttgaattaatggcctcagttattaggtacatgataaaaagcaaataattactttgaaacaacttaaatattttaatacatttaattatacaataaaaacctacatgtttctaattaagacgactctttgacaaactagattgctttaacaattttatttttttattttattaatttttttttttagagacaagagtctcactttgttgcccagactggagtgcagtggtgcaatcatggctcactgcagcctcgaattcctgagctcaagagatccttctgtcttggcctcccaagtagctgggattataggtgtgtgccaccaaccccagataattttttaaattttctgatgaaacaaggccttgctatgttgcccaggctcgtcttgaactgttggcctcaagtgatcctcccaccttggcctcccaaagtgctggaattacaggtctgagtcaccatgcctggcttttaacaattttagtttaaaacctgctctatgtcttccctgtgattttatcaacatctaaaaaagctagcagtatatagtagtttatatacgtcccaggaaaagcctagctattttgaatttccagaatttcctctactatttttattggttaaatatcacttaagaacgtaaagtaataaaattatgtattcaactaaatgtgattataatagatgaaagattaattcttagaatgctacatgtcatacagactcattatgagtggttaaaaggtgattttcagacccttagctgtctttcagatctcaggcattatgtttcagggattttaaaatgcaccctaagtccattacttaacatttctctcaacccagctaatgtttatccaaattactttgcctactatagctggctaacatcatccctatacatatacaaaattcttcacatgatcccaatacaatacatatataacttagcttattttatagactgctgtactcccagggattcttatatcacagacactcaataaaagatacaaaacaatgcacattttactttagatcttcattttattggtgtcaaggaataagcataacacaaactctttgatatacagattttttttttgaggcggagtctcgctctgttgccaggctggaatgcaatggcgcaatctccgctcactgcaacctctgcctcccaggatcaagtgattctcctgcctcagcctcccaagtagccgggattacaggcgcatgccaccactcccggcaaatttttgtatttttagtagagacggggtttcactatgttggccaggatggtcttgaactcctgacctcagatgatccgcccacctcggcctcccaaagtgctgggattacacgtgtgagccaccaagcccggccaattttttttttttttttaagagacagggtcttgccatgttgcctgggctggtggtgaactcctaggttcaagaaattctccttcctcagcctcccaaagtgctgggattacaggcattagccactgtgcctggcctgatctacagacatttgttttatagcgtgaaatacattaaaatatagagacacggcagaggagacaaaaaagaaaaaaaaaagaaatacattaaaatagatctaaccttgggattatattcggcgtttcgggcacgaagtgcaatggtctttaggtcaagtttacaaccaagattcactgtggatacaatatttctgtaagagatttaaaaagaaaacacgactatttaaattacttaagtttcattggatgaggcgttagaaattatgcagacatctgattatttcaaccaggctttacttttttttaattgctcacatttattgtttaacaagtatcatgcacatgttgagcattttatatagattattccatttaatacatataacgcactgaggtagaagttaccagtattcccacatttggataaataagctgaggcttaaaggtagagtgcaacttgctcaggacgcaatggctcccaagtggaggagccaggatttgagtctgtctgtctccagagcctgcccttagccttctcacagacaaactcaattctcatctgtgagctctgaaaagctaccaccaccaccctattcctaagtaactatttataatgaaaacaagcaggcatgaactgcccagttctctcaaagtaagtatcttttgaaaaacaagagctaagtgtctttagcaaaaaaaaaaggcaaaaccctgctttctcttctaattaactctcagtaaataaggataaatggagccatctgggtccactgacccttttcatttctcagtgttcttaaatcacttaacgaataacttatacaaggataaagatatactaaaaagcaactctattagaaattttaataaaaatttaaacaacaaacccacattttcattatacatttttctgcttatgaaagtatatatagttgaaatgggcaatgccctttgaatgcaattaactgctcaacaactgtctcgcatggacctggaaatcaccatcccaagaatatcgagtccagatttcaaatacataggttcaaatacaataggtttcagctcattgttgcttctggttctttttcttgtacagtctatgatacacaactgtaaagccaattaggttgatccacacaatgaatgttttcatttccatatcatctatttccttccaatcacccttgtatacacacctgcctttagcatttgtccacttatgaactataccaagtagattttagtatatctatcacaactttagtcacataattgttaaatgtattcttatatattttcattaattaaatatttaccttaatccctcttaagcctacaagatggagagggcactgaactaccacccgggagggttcttagtagatagtggaaattcaggaatgtggatgactggatgctctggggagtatcagaacagcaaaggcactcgcaagaaacaaacacctgactgtactgtttataatttattatttaaatcagaaatgcaaacttaaatattcctgggagtcagacaagcatgctggacacatgggagtggtatagacaagggtgagctaaaaagggctctctctaaaatcactaaaattactttgtttttaaaattgtgtgtggggtcaaacaaaattgtggaggcaagatttaggtctttgggtgaaagtcagcatccacgattacacaccacttagttccaaaaatgatgagagatagcttataaacaacaaccatatatgtaacaaggtgaataaatgcaaataggaaatactagatctaaagggagtatgaaggaggaaggtatctgtacaagaaaactgaggagatgcagagactgcaagtaaccttttaatttggtcataagctttctaaaatgaaaagctatacacttcttattgactggaattatttggaaatatttgctggtttttcaggaagatgaaattatttcctacccctactacactgttacatatagaacccacttcatttaggtagaaaaatccatttatgacaaaaacagtcgtcttcattttgtgggaaggacacagaccttcaaagatttatatgcagcacccatagtaaaaacaaaaaacaagaactaccagaaattatactgatattgtgactaaagacctaaaatagcataagggaaagagactacctaacattgtgatttagcgatatcagatacagggaaatgtctataatataataataacgacagtgaaagtcagattaaattttattggctcaggtatgtaaacacaaatgaccacatttctaaacctgttaagagccttttactgaggacactgactaagatagctttgcttccctttcccaaatgtgagataaagcaaattttgatacacaattaccgttagtgccactccctcccttaataaaaggatccatctgaaaacagagcaggaacataactcaaagggactcctaagtgggaggaaacataaaacacgaagtactcactgcagctgcggtacaatcccagaactctccgaagctggcgtggcaggagtgatgggggtcatgggagtcatgggggagggatacagtggagtggtgcccggcaagggtgcagttgtgagagtctgtgagtggaagagctgtggtgcctggcctgaggttccctgtgttgcctgctgggacgttgactgctgaacggctgcagctgccactgcctgttgctgctgctgctgctgctgctgctgctgctgctgctgctgctgctgctgctgctgctgttgctgttgctgctgctgctgctgctgctgctgttgttgttgctgctgctgcctttgttgctcttccaaaatagacagactattggtgttctgaataggctgtggggtcagtccagtgccataaggcatcattggactaaagatagggattccgggagtcatggcaccctgtggaaagcaaggagaaaaacaggttaggctggctgctgctaagtgtttgtggaactttcttggtggaacagcaggtcaggtgtgcaaagacagatgccttcggagaataatggggttattaaacattaattacggaagaaccagctattcttatacacattgctttcttctttaataccacacagtggataaacatgaagaaaaatggataaactgaacttcggaaaaattaaaaacttctgttctttgaaagacaccattgagaaaattaaaaggcaggccagactgggaaaaaaataactataatacatacatctgagaaaggactggtaaacagaataataaagagctctgacaactccataaaagaagatcaacaaataaaataataaaaaagggcaaaagatgtgaaggacatattacaaatgaagatacaggcatacctcggagatactacaggttaggttccagaccatctcaataaagcaagcggcatcaattttttggtttcccagtgcctacaaaagttatgttagcactaaagtctattaagtgtgcaatagcattatgtctaataatatgtatataacttaatttaaaaatgctttattgctaaaaatgctaacaatcatgtgagcctgcagcaaatcataatctttttgctgacagaggatcttgcctcgatgttgatggctgctgactgatcagggtggtagctgtggcaatttcttaaaataagactgacgaagtttgccacactgactgactcttcctttcactgaagatgtctctgtagcatatgatactatttgacagcattttacccacactagaacttatttcaaaattggagtcaatcctctcaaaccctgctgctgctttatcaactaagtttatgtaatattctaaagtcatcagttcttcaccaggagtcaattctatctcaagaaaccactttctttgcttactcacaagaagcaactcctcatctgttcaggttttatcaaaaaattgcagcaattcagtcacatcttcaggttcacttctaattctagttcacttgctatttccactacacctgcagtaacttccagcactgaagtctagaacctctcaaagtcatccacgagggttggaatcaacctcttccaaactcttattcatgttgatatttcaccctcctcccatgaatcatgaacattcttaatggcatctagaatggtgaatctttttcagaaggttttcaattcactttgcccagattcatcagaggaatcactatctatggcagctacagcatatgtccctccctgcttcctttctttgagacagggtctccattgtagcctttaacttctggactcaagtgaccctcccgcctcagcctcccaagtagctgggactacaggcacatgccaccatgaccagctaattaaaaaaaaatttttttttgtagcaacagggacttgttttgttacccaggttggtcttgagctcctagctttgagtgatccttccaccttggcctcccaaagtactgagattacaagcatgagccaccatgccctgctgtatttcttaaatagtaagaattgaaagttgaaattactccttgatccatgggctgaagaatggatatattatttaagcaggcatgaaaacaatattaatctccttgttcttctccatcagagcttgtggacaactagttacactgtcagtgagtaatattttgaaattaaactttttttctgagcagatctcaaagagcttaaaatatccagtaaatcatgctgtaaacagacgtgctctcatcaggttttgttgttctgtttactgaggacaggcagagtagatttagcgtaattcttaaggctctatggttttagagcagaacatgagcattggcttcaatttaaactcaccagctctattagcccctaactagtcagccagtcctctgaagctttgaggctaggcactgatttctcctctctagctataaaagtcctagatagcatcttcttccagtagaaggctgtttcatctacattaaaaatctattatttagtatagtcaccttcatcaattatctcagctagatcttccagataacttgctgcttcatgttgcatttttatgttgtggagaaggcctctctccttaaagctctgaataaacctctgctagtttcaaaactttcttctacagcttcctctccgctctcagcctttacagaattgaagagagttaaggccttgctctgtattacactttggcttaaggggatgtgtgggtggtatgatcttctatccagaccattcaaactttctccatataagcaataaggctgttttgctttcttatcacttgtgggtttactggagtagcacttctaatttcctttaagaacttttcccttgcattcacaacttggctaactatttggtgcaagaggcctagcttttagcctgtctcagctttcaacatgccttcttcactaagtataatcatttatagcttttggtttcaaatgagagatgtgcagctcttcccttcatctgaacacttaattaaaagtcactgtaaggttattaattagcctaatttccatattgttgtgtctcaaggaatagggaagaccaagcagagggagagagatgggggaatggttggtcacgctgcagacatttatcaattaagttcctgtattatacaggtgcagtttatggcattcaataataattacaatagtaacatcaaagatcactgatcacaataacagataataatgaaaaggtttgactaggcacagtggctcatgcctgtaatcccaacactttgggaggccaaggcggatggatcacttgcagccagtagtttgacaccagcatggtgaaactccgtctccactaaaaatacaaaatttagctgggtgtggtggcgcatgcctgtaatcccagctacttgggaggctgaggcaggagaatcgcttgaacacgggagatggagtttgcagtgagccaagactgcaccactgcactccagcctgggcaacagagtgactgaaaaaaaaaattaaaaaaaaaatacaaaaaaaaagaaaaaaaaaagtttgataacaataacggataataatgaaaaagtttgaaatcctgcaaaaattaccaaaatctaaccccaagacatgaagtgagtacacacttttggaaaaataatgccaacagacttgctgggtacaggtttaccacaaccttcaatttgtcaaacatgcagtaaagtgaagtgcagtaaagtgaggtgggcctgtgtatgagtggctgacaagcacttgccaaggtgctcagaaacattagtaatcaggcaaataaaaatcaaaaccacaataagatactactaagcaatcactagagtgaaagtaaaaagactgacagcagaaagtgttggtgaggatgtggagcaacttaaatctcttatgctgcaaaacaatacagccacttcaaaaaacagtttggcagtttcttataaagttatacatataccaatataggacctagcaatcctactcctaagtatttacccatgagaagtaaaaacagtgcattcaaagtctacacaaatgtttacagtgcttttattcgcaatagctccaaactggaaagaccccaaatgtgagcaactggagaatggatgaactgtggaacatccaaacaatggagtgatacttagctatacaatggattaactactgatatacaaacagtacactgggctaagaagtcagacatacacaaaaaagcatacactctgattccatctatatgaaattctagaatagacaaaactaatcttcagcattgaaaagcagatgcagtagttacctggggccagcagagtgactataaaggggaagaagggactttttaaggtaactgaaatgttctgtaatttatacattatatataattatcaaaacagacacttaaaatgagtttttttgtatgtatatttcaacaaaagttattgatttttttttttttttttttttttttgagacagagtctcgctctgtctcccaggctggagtgcagtggcacgacctctgctcactgcaacctccacctcccgggttcaagcaattctccttgcctcagcctcccgagtagctgggattacaggcacccgccacaacacctggctaatttttgtatattttgtagagatgaggtttcaccacgttggccaggctggtctcgaactcctgacctcaggtgatccgcccaccttggcctcccaaagtgctgggattacaggcgtgagccactgcacccaggctgaaaaatttttaaagtagatgggtggttgagagcttgaaatgtaaaaggggaaaaataaaactagaaaataatttggtgagggtgattttcaaaatcaaagaccctatatagtcatttggaacattctcataagtgtttatcaaaagattaggtgtttcataaatatataacttagcttccagacttcccaaataaacaccattgtgcctattcaaagcctaatagaacttctcaacaaaataaggcttaaaaaacatattaaaccattttcaaaaacagatcattaaatgcccttccttgccttttgataccatctcttgcagttcagatttccgccctccctattctctccctcctgctatattacctgaggggaggccaagccctgagcgtaaggtggcaggctgttgttctgatccatgatgttcactttcttcttggcaaaccagaaacccttgcgctggaactcgtctcactattcaattttttcctagagcatctccagcacactcttctcagcaacttcctcaattccttgggttatcttcacacgccaagaaacagtgatgctgctttggaaaaaagtctaaagtttaatttaaggatccaggtaacctgtacagtcctataagccagttctatggctatacaaaacacaaacatgaaaaccaatgaagctattttggaatacatttgtttttaccttataatcctaaagttttattccttccatgtttccggcgattgcatgtaaaatcgccaacaaaacaaaaatcattttgttacatgtttaaataatcggaaaatgctcaaaatcgagctgtcataaccagcattaaaaacttttgaggaaaaacacctagagaaaaataattcctaagcaaaatgtaatatcagagcagaatattcactaagcactgtatacacagcactgttaggcaaagtttagatctttaaatattccaattttacatcctctacaatgtcttgggcaaaaaattaagtaaatatcaaattcaatccaatatacttcagagtgatcatttatcaagctcctactgtaatgaaactgttaaaaaaaaaaaagccgcacaaagataaagccctgaatttttataaatgtaataaccttacctctttagaacacattaatgcaaactgtgcctgttatctgacttttcttaaatcatcatcgctttactcactacacatctgaaatgagtttataacaacatattctcacatagaacttagaggtctcaaagttacaaattatatgtccaaagatccttcaggcatatgcacttcaagcatgtgctggtacagaacagacactcagatatttgctgaatgtatgaaagactctgacgatcactttgaaagggcaaaggcccccaaagactatctatcctacatactcatcactgaaaaacagaccaaaaaagaaagcaagctctgcttctggaaataaatatatcagagatattttttaaaatatactttttttttgacagttatcctataataacaataacagaagtcctgcagatgaggatataaagataggaggatatagtccttggcatcaaagtgttcaatatgaagggtatgcaaataactactgtaaaacatagtattataacagcaggtatggtctaagctaagttccttgaatgcagaaaccagcctacatgtctttgtgatctctgcatctagcactatgcctggaatacagtatgtgatcatgaatgagcccatatacacccctggaagagaagacaatatagactaacagccaatcactgtgaagagagcgcagtgttttcacaaagcagggaccatctaacttgggtctcacaaggtgagtaggaatttacacatcagggcttcagacaaaagagaaatcaagcagaaagagacagattgaaaaagcatgcagtatgcaggcaacaagcttagtatgactgtatagaaggtcactgcagcagatgagacagcacatattggtgggctcatactatcaggagttttcaatgttattgcataggcaataataacagttatggaatttcggaagtgcagtatgaacagatctaatttggcaagactagatgaatttgagaggagtaaaactggaggacggaagtttcgtttcaggaatctaaggttgaggcaagagataatgacggcaggatttaaagccattataagtatgattagagatttatccaggaccttcggtggcttcaggccactttttgcaagtaagtctacagaagaaaccgcacagtgattactgcactaatttatcctcagaaaagagttgtttgctgggtatcttcatctcctggaaattgaaacatcaaatccgatattttttggaggcaatcaaattaattctgcatagccttctagtgtctgtataactaaatgaagcacagtcttttcacagaaaagtctacctagagatttggaaaaccatgatggcctgaaccgagagacgggagaccctgcaaataaagtggtgtgtattatatcttaagcgctaccgtgcccgctgtctcaggcttctgacaaaatatttaagtctcaatgttggcagcaaaacaggcgggcacagatctgggtgaatctgcttctaacatggagaagaagcggatggcaggacagggcagggtaaacttagggtcttcgatgcaagggactgtcctgtcccgcctgccgccgcccagccagccagtagtaccctgagccccacaatcgtacgatgggaagctgcctgcgaaacacagcagagtagggcaccaggcgggagtggcggccgagtggccgttacaggccggaacggcggcagcacgaaagggaggaacgtcccccgaggggcctgcacgcgcgccaattcctagtctcttccccaccattgcccccaggcctcagtgcagtggtggccttcgcccgaaccgtcagaaaagagtacaatctgttacctgggtcactgcaaagatcactatgggccagcggaagcgaagttaaacagccggcggcccaggcgcccgccacagcgaacctgcccgacctcac

SEQ ID NO: 1086 - DNA, 18495 bp, Homo sapiens
ctaacacttttataaactgcatttattgtacagagtactctgaagaaagaaaaaaatatgtacagccattcattttcattaacacatatattctgtcctgcaatactggagaggtggaatgtgtctggcacagaaataacccctaggagttataaattagaaaaacaacacttttaaaaaagatttttacttttctggtagaaatataaaaactgtggttcatggggaaaaacattaaaattaaaaagtccaatcaattatagaggtggctttaacacttaaagttttctccctcaaaccaacttgtcaacagcagtgtttaaaatctacatataaataaatgggcagcgctgcccagatagcagcacggtatgagcaactcacagtcacgctgcgcggtgttctcagtgcacaaataatgccccttcccggcatcccgcggtgggcacttacagaagggcatcacctggtgccacaccctgcaactcaacatccatcttctcacaacaccaccatttaaaggtaccaaaacaaactgatttgtttaaaaaaaaaaaaagaagggggtgggggaggcaagggtacatgagagccattacgtcgtcttcctgaatccctttagaatagggtagatgttttcaaatgcttcataaatttctgctctgactttagcacctaagaagacaagttggagtagagatgagagactgaaatggcacttcttaacatattaagatggtaaaattcttaccttaaagctgcaagcacaattctcaccatacccagtcagattaaggcacaggcatgaaaacattaatggtggaatcccttgtcacaatcttatttttgtttataaaacaatacttttaaaaaatcatcttagtgactccagcgtctcattctatagctcaagaggcatgtattcacacttctctccttggtcctgaaccaggccataaaccaagcaggacggcaatgataacaactgaatcttcttctctgaattgctgccttcaactagactcatttctgaatcttcctttcttgtctcataatcatattgctgaggaatcctaaagcttcagataactaattccaagtgaaaacgccatcttttgttcaatgcaatgctcacctcctcactgtaaatggaagtctgcttgcagagctgtggtcagacttccctgctctcactgtgcctttagtgggcacgtttctcatcagactttgggtgggaggcctttgtacaagaagctagcccactgtccgaacactgaaatttcttttcagcactgagaaaatgccatactcaaaacacttacaaactttcagatactacttcctgttacaacttacctgttaatacaacttttccagaaacaaaaataaggagaacaattctgggtttgatcattctgtagattaaaccaggaaataactctggctcataactagaaggaaaattgcaaaaagtttagaaatcaagagctttgtgtgcttttagataaaatgaggacctgtacaaggaaaaatactgaataaacaaactagtcaagaggtaaaacacagttcttcaagcagcatcaaaggatagaatagaataattaaagcaagtgaggccgacttgtagtcgtcagttgataaccactggatggaaggctatttgtcctcctatcactttaccctatttctattgaatctggattttctgatttaagaaaaagagccctgtagttatgtctgcagtctctatatcattagatataatgatatctaatgcagataataatcctttacttttacagtcctaataattactattacagtcctaataatcatttacttctaagatccaatactgacagtttaacttttaatcatatcttacctccttaaattgaaatattctctagctgacaattgtggtcaggaaatttaatcaaacttatatactagcctgagaattaacctatacctgattaagctgtctgactgaatggactattggtatatattctttttttttttgagacggagtcttgctgtgtcgcccaggctggagtacagtggcacgatcttggctcactgcaacctccatctcctgggttcgaatgattgtcctgcctcagcctcccatgtaactgggattacaggcatgcaccaccatgtccagctaatttttgtatttttagtaaagacgaggtttcaccatgttggccaggctggtcttgaactcctgaactcaactgatctgcctgcctcggcctcccaaaatgctgggattacaggtgtgagccaccaggccaggcctggtacatattcttctaagcctagtaatctcatttttctcagttcggagagactgaaaacaggatgcctctgtttctgtgtgtctgacctaagacaaaattcaggacaggcttctctgaggaagagtggaatgggtagacatatggaactcaagtgggagcttcctaggtgaaaagggaaatgagcatactaggcataaaagtggcaagtgcaaaggcctagggcaggaggaaccaagtgagccccaggggcacacagaactaatgtgcctgtgaacagacaccagaagaccatgagatgaagcagtgaggtgggcagggctgcctgcctgtgagtcttcacctgcaagtagcagggaagataattagaaagttgttcctatcgctcaacttcacactttgctggtagatctgacacaatgttgactaaaagagaagatccaaactgggaaaaaaaattgatacaagaggttagggtcaattcatgcattccaagtgtattcagcaataaaacgataaaacatacagaagtagaatcaaattcattccagtaaaggggagttatgggtaccgcaaagtgataagggaagcagaggctggtgagggtgataaatatgactgagaacatcaggaagacaatgcaagaatacatacaactataaccatgtcaactgttctcatatactgaatattttgcatgtgttttattctgaacaatgtttagattataaatgaactgttgccaataacaatcataatacatttcagacttacctactaaattgttggtgggtgagcacaaggccttctaaccttataggaaacttcacatcacagctccccaccatgttctgaatcttgaagtccaagaacttagctggaaaacccaacttctgtacaactctagcatattttcttgctgccagtctggactgttcttcactagggaaaggaaaaaagtgagttattcatactcagagccagctaaaatacttatttagactaataacttataaaaagtccaaaacagtaaactaataaagtgtaaactggtcagccttcttgcaataggagaaaagactgacaggcattcacaattccttataaagtattcctggatccttgacagaaaactgtaggcctgccaaaatgacctttcaatccgccaaattattgtagccctagattttatggatgtgaattatcaccatcatcaatcatcactatttctgtattttagcccatgcatttctactgagaggaaaactaacaaacttcattttgatcagaaaatgttgatgagatttattattgaacaatgtattcactaattctatcctcttttataccaagactcatcatgaatagacattcctatgtcatttgttgaataaactacgacttagcagttcagagcttacataagaaaagcagaatgtgggccaggcatggtggctcacgcctctaatcccaagcactttgggaggccaaggcggatagctcacctgaggtcaagagttcgagaccagcttggtcaacatggtgaaaccctatctctactaaaaatacaaaaattagctgggcatggtgccaggcacctgcaatcccagctacttgggaggctgaggcaggagaatcacttgaacctgggaggtggaggttgcagtgagccaagattgtgccactgcactccagcctaggtgactccaccaaaaaaaaaaaaaaaaaaaaaaaaaaagaaaagaaaagaaagaaagaaagaagagaaaaaaagaaaaaataaaagagaaaaaggcaggcaggcaggcaggtcgggcacggtggctcacacctgtaatcccaacactttgggaggctgaggcaggcggatcatgaggtcaggagattgagaccatcctggctaacatagtgaaaccccatctctactaaaaatacaaaaattagccaggcatggtggtgggcacctgtagtctcagctactcgggaggctgaggcaagagaatggcgtgaacccaggaggcggagcttgcagtgagccgagatcatgccactgcactccagcctgggcgcagagcgagactccatctcaaaaacaacaacaacaaaaaagaatgtgaaaatattaccataaagagactatcaggtgcaggggatcaggaagaacaaaaatcaagcatatatatatatgctacgcttttaaatctcaggtaaatgtattggtggtttcttgtcttgatgaaatagtcatccaactagatatacaatattcagttttcagatgctctgggacaaaaaggctaaatgctgcatgaaaagcttgccttgataaaccaaaagtttctgatgttccatgcaggggaaaacaagcaaacaaaaacgctcttaattaaagaggttactactgcatgttgtggccaaggggaagtgaaaggcaagaacacatccttgtcctgcattctgaaaaacctcggagatcaggagccagaatgtccacaccaatggcattcccatcactgaaagacaatttcaaacttcagaataagcaaaaatatccacagcccccttctatgtgttgatacctccaagtacatttaatactctttcatttaaaaagttttagtttatttgttcagttcatttatgaagctaatgtcactaattttccccctagtttttgacttctaccaagtatataagctctgtttagaacagtcagggccgcagagtactaaccttcagacaggatcacttcagatggagaatataggcaatgacattttataacaagggtgcattccttaagatctgcacaactcaaacactattaatgaaagctagttccagtgagaaggcaggtttctgcagccaacacatgtgatgctgtcacgctgccaggcccaataaggtctgcaaagcccttacaccattagcttagaagtgttttaattcttgatcaattttttcttccatttcaagatgtatttgtgttatttacaacatttttcacataaagggaattttattaatagttctgatgttgtattacatcttacctaatttttttcttttttctggagaaagtgtcttgttctgtctcccatgctggagtacagtagcatgatctcagctcactgcaacctccacctcccggatttaagcgattctcgtgcttcagcctcccaagtagctgggactacagacatccactaccacgcctggctaatttttgtatttttagtagagatggagtttcaccatgttggtcaggctggtctcgaactcctggcctcaagtgatttgcccgccttggtgagacaccacgcctgcccatatctaatttttaagaaaatgaaatcactgctatctaacattaatagaatcaaataataaataaataaataaaaataattaatagaatcatattaaaatggtttttataagaaagcaataataacatgttaaagtgctaacctaataacctaaaaacaatgagatatcaccttttcattcataacccatagaccagaagaatgaatttcttacggctacctcttggctcctgtgcacaccattttcccagaactgaaaatcagtgccgtggttcgtggctctcttatcctcatgattaccgcagcaaaccgctacaatggtcagagagaatcattagtgaggtcatgccaaactgctcaatgttgttaggcgaaccacccattgacaaaaaaatcacaactggtaggaaggacatagtacatctagttatcaaaatatttgttctgtatttctgtatatctgtaaaggatttgcatacaccacatgtaacaaatattcctttgcataaggagcagaaaataatcaattgtgactaagttataccaaatctgtatgttctttcacatgagcattccatcaagagaaatgtttgcaaaatttggttatgttctcaataaatacaagtgcttctgtttctactttatatttgctgcttatcatgactatagcttctctaatgatacattttgttttattaatatgaattttgaggcaaataaaccaataaaccttttctaccttaatggaattaataaatcagattacaagcctatcaatacgtaatgaagtaaaatcatgctttcaattggtctttagaaacaatattaatgtattaaacacataaatgcaaattaggaaaaaaacacagttttaacttttattttctgctttttatgcttgaaacatgttaattctttcagaaaattttcttgctaaggtggtaactcaaggggaaaatatttcaactgtgggttgaattaatggcctcagttattaggtacatgataaaaagcaaataattactttgaaacaacttaaatattttaatacatttaattatacaataaaaacctacatgtttctaattaagacgactctttgacaaactagattgctttaacaattttatttttttattttattaatttttttttttagagacaagagtctcactttgttgcccagactggagtgcagtggtgcaatcatggctcactgcagcctcgaattcctgagctcaagagatccttctgtcttggcctcccaagtagctgggattataggtgtgtgccaccaaccccagataattttttaaattttctgatgaaacaaggccttgctatgttgcccaggctcgtcttgaactgttggcctcaagcgatcctcccaccttggcctcccaaagtgctggaattacaggtctgagtcaccatgcctggcttttaacaattttagtttaaaacctgctctatgtcttccctgtgattttatcaacatctaaaaaagctagcagtatatagtagtttatatacgtcccaggaaaagcctagctattttgaatttccagaatttcctctactatttttattggttaaatatcacttaagatcgtaaagtaataaaattatgtattcaactaaatgtgattataatagatgaaagattaattcttagaatgctacatgtcatacagactcattatgagtggttaaaaggtgattttcagacccttagctgtctttcagatctcaggcattatgtttcagggattttaaaatgcaccctaagtccattacttaacatttctctcaacccagctaatgtttatccaaattactttgcctactatagctggctaacatcatccctatacatatacaaaattcttcacatgatcccaatacaatacatatataacttagcttattttatagactgctgtactcccagggattcttatatcacagacactcaataaaagatacaaaacaatgcacattttactttagatcttcattttattggtgtcaaggaataagcataacacaaactctttgatatacagattttttttttgaggcggagtctcgctctgttgccaggctggaatgcaatggcgcaatctccgctcactgcaacctctgcctcccaggatcaagtgattctcctgcctcagcctcccaggcgcatgccaccactcccggcaaatttttgtatttttagtagagacggggtttcactatgttggccaggatggtcttgaactcctgacctcagatgatccgcccacctcggcctcccaaagtgctgggattacacgtgtgagccaccaagcccggccaattttttttttttttttaagagacagggtcttgccatgttgcctgggctggtggtgaactcctaggttcaagaaattctccttcctcagcctcccaaagtgctgggattacaggcattagccactgtgcctggcctgatctacagacatttgttttatagcgtgaaatacattaaaatatagagacacggcagaggagacaaaaaagaaaaaaaaaagaaatacattaaaatagatctaaccttgggattatattcggcgtttcgggcacgaagtgcaatggtctttaggtcaagtttacaaccaagattcactgtggatacaatatttctgtaagagatttaaaaagaaaacacgactatttaaattacttaagtttcattggatgaggcgttagaaattatgcagacatctgattatttcaaccaggctttacttttttttaattgctcacatttattgtttaacaagtatcatgcacatgttgagcattttatatagattattccatttaatacatataacgcactgaggtagaagttaccagtattcccacatttggataaataagctgaggcttaaaggtagagtgcaacttgctcaggacgcaatggctcccaagtggaggagccaggatttgagtctgtctgtctccagagcctgcccttagccttctcacagacaaactcaattctcatctgtgagctctgaaaagctaccaccaccaccctattcctaagtaactatttataatgaaaacaagcaggcatgaactgcccagttctctcaaagtaagtatcttttgaaaaacaagagctaagtgtctttagcaaaaaaaaaaggcaaaaccctgctttctcttctaattaactctcagtaaataaggataaatggagccatctgggtccactgacccttttcatttctcagtgttcttaaatcacttaacgaataacttatacaaggataaagatatactaaaaagcaactctattagaaattttaataaaaatttaaacaacaaacccacattttcattatacatttttctgcttatgaaagtatatatagttgaaatgggcaatgccctttgaatgcaattaactgctcaacaactgtctcgcatggacctggaaatcaccatcccaagaatatcgagtccagatttcaaatacataggttcaaatacaataggtttcagctcattgttgcttctggttctttttcttgtacagtctatgatacacaactgtaaagccaattaggttgatccacacaatgaatgttttcatttccatatcatctatttccttccaatcacccttgtatacacacctgcctttagcatttgtccacttatgaactataccaagtagattttagtatatctatcacaactttagtcacataattgttaaatgtattcttatatattttcattaattaaatatttaccttaatccctcttaagcctacaagatggagagggcactgaactaccacccgggagggttcttagtagatagtggaaattcaggaatgtggatgactggatgctctggggagtatcagaacagcaaaggcactcgcaagaaacaaacacctgactgtactgtttataatttattatttaaatcagaaatgcaaacttaaatattcctgggagtcagacaagcatgctggacacatgggagtggtatagacaagggtgagctaaaaagggctctctctaaaatcactaaaattactttgtttttaaaattgtgtgtggggtcaaacaaaattgtggaggcaagatttaggtctttgggtgaaagtcagcatccacgattacacaccacttagttccaaaaatgatgagagatagcttataaacaacaaccatatatgtaacaaggtgaataaatgcaaataggaaatactagatctaaagggagtatgaaggaggaaggtatctgtacaagaaaactgaggagatgcagagactgcaagtaaccttttaatttggtcataagctttctaaaatgaaaagctatacacttcttattgactggaattatttggaaatatttgctggtttttcaggaagatgaaattatttcctacccctactacactgttacatatagaacccacttcatttaggtagaaaaatccatttatgacaaaaacagtcgtcttcattttgtgggaaggacacagaccttcaaagatttatatgcagcacccatagtaaaaacaaaaaacaagaactaccagaaattatactgatattgtgactaaagacctaaaatagcataagggaaagagactacctaacattgtgatttagcgatatcagatacagggaaatgtctataatataataacaacgacagtgaaagtcagattaaattttattggctcaggtatgtaaacacaaatgaccacatttctaaacctgttaagagccttttactgaggacactgactaagatagctttgcttccctttcccaaatgtgagataaagcaaattttgatacacaattaccgttagtgccactccctcccttaataaaaggatccatctgaaaacagagcaggaacataactcaaagggactcctaagtgggaggaaacataaaacacgaagtactcactgcagctgcggtacaatcccagaactctccgaagctggcgtggcaggagtgatgggggtcatgggagtcatgggggagggatacagtggagtggtgcccggcaagggtgcagttgtgagagtctgtgagtggaagagctgtggtgcctggcctgaggttccctgtgttgcctgctgggacgttgactgctgaacggctgcagctgccactgcctgttgctgctgctgctgctgctgctgctgctgctgctgctgctgctgttgctgctgctgctgctgctgctgctgctgctgctgttgttgttgctgctgctgcctttgttgctcttccaaaatagacagactattggtgttctgaataggctgtggggtcagtccagtgccataaggcatcattggactaaagatagggattccgggagtcatggcaccctgtggaaagcaaggagaaaaacaggttaggctggctgctgctaagtgtttgtggaactttcttggtggaacagcaggtcaggtgtgcaaagacagatgccttcggagaataatggggttattaaacattaattacggaagaaccagctattcttatacacattgctttcttctttaataccacacagtggataaacatgaagaaaaatggataaactgaacttcggaaaaattaaaaacttctgttctttgaaagacaccattgagaaaattaaaaggcaggccagactgggaaaaaaatacctataatacatacatctgagaaaggactggtaaacagaataataaagagctctgacaactccataaaagaagatcaacaaataaaataataaaaaagggcaaaagatgtgaaggacatattacaaatgaagatacaggcatacctcggagatactacaggttaggttccagaccatctcaataaagcaagcggcatgaattttttggtttcccagtgcctacaaaagttatgttagcactaaagtctattaagtgtgcaatagcattatgtctaataatatgtatataacttaatttaaaaatgctttattgctaaaaatgctaacaatcatgtgagcctgcagcaaatcataatctttttgctgacagaggatcttgcctcgatgttgatggctgctgactgatcagggtggtagctgtggcaatttcttaaaataagactgacgaagtttgccacactgactgactcttcctttcactgaagatgtctctgtagcatatgatactatttgacagcattttacccacactagaacttatttcaaaattggagtcaatcctctcaaaccctgctgctgctttatcaactaagtttatgtaatattctaaagtcatcagttcttcaccaggagtcaattctatctcaagaaaccactttctttgcttactcacaagaagcaactcctcatctgttcaggttttatcaaaaaattgcagcaattcagtcacatcttcaggttcacttctaattctagttcatttgctatttccactacacctgcagtaacttccagcactgaagtctagaacctctcaaagtcatccacgagggttggaatcaacctcttccaaactcttattcatgttgatatttcaccctcctcccatgaatcatgaacattcttaatggcatctagaatggtgaatctttttcagaaggttttcaattcactttgcccagattcatcagaggaatcactatctatggcagctacagcatatgtccctccctgcttcctttctttgagacagggtctccattgtagcctttaacttctggactcaagtgaccctcccgcctcagcctcccaagtagctgggactacaggcacatgccaccatgaccagctaattaaaaaaaattttttttttgtagcaacagggacttgttttgttacccaggttggtcttgagctcctagctttgagtgatccttccaccttggcctcccagtgagattacaagcatgagccaccatgccctgctgtatttcttaaatagtaagaattgaaagttgaaattactccttgatccatgggctgaagaatggatatattatttaagcaggcatgaaaacaatattaatctccttgttcttctccatcagagcttgtggacaactagttacactgtcagtgagtaatattttgaaattaaactttttttctgagcagatctcaaagagcttaaaatatccagtaaatcatgctgtaaacagacgtgctctcatcaggttttgttgttctgtttactgaggacaggcagagtagatttagcgtaattcttaaggctctatggttttagagcagaacatgagcattggcttcaatttaaactcaccagctctattagcccctaactagtcagccagtcctctgaagctttgaggctaggcactgatttctcctctctagctataaaagtcctagatagcatcttcttccagtagaaggctgtttcatctacattaaaaatctattatttagtatagtcaccttcatcaattatctcagctagatcttccagataacttgctgcttcatgttgcatttttatgttgtggagaaggcctctctccttaaagctctgaataaacctctgctagtttcaaaactttcttctacagcttcctctccgctctcagcctttacagaattgaagagagttaaggccttgctctgtattacactttggcttaaggggatgtgtgggtggtatgatcttctatccagaccattcaaactttctccatataagcaataaggctgttttgctttcttatcacttgtgggtttactggagtagcacttctaatttcctttaagaacttttcccttgcattcacaacttggctaactatttggtgcaagaggcctagcttttagcctgtctcagctttcaacatgccttcttcactaagtataatcatttatagcttttggtttcaaatgagagatgtgcagctcttcccttcatctgaacacttaattaaaagtcactgtaaggttattaattagcctaatttccatattgttgtgtctcaaggaatagggaagaccaagcagagggagagagatgggggaatggttggtcacgctgcagacatttatcaattaagttcctgtattatacaggtgcagtttatggcattcaataataattacaatagtaacatcaaagatcactgatcacaataacagataataatgaaaaggtttgactaggcacagtggctcatgcctgtaatcccaacactttgggaggccaaggcggatggatcacttgcagccagtagtttgacaccagcatggtgaaactccgtctccactaaaaatacaaaatttagctgggtgtggtggcgcatgcctgtaatcccagctacttgggaggctgaggcaggagaatcgcttgaacacgggagatggaggttgcagtgagccaagactgcaccactgcactccagcctgggcaacagagtgactgaaaaaaaaaattaaaaaaaaaatacaaaaaaaaagaaaaaaaaaagtttgataacaataacggataataatgaaaaagtttgaaatcctgcaaaaattaccaaaatctaaccccaagacatgaagtgagtacacacttttggaaaaataatgccaacagacttgctgggtacaggtttaccacaaccttcaatttgtcaaacatgcagtaaagtgaagtgcagtaaagtgaagtgggcctgtgtatgagtggctgacaagcacttgccaaggtgctcagaaacattagtaatcaggcaaataaaaatcaaaaccacaataagatactactaagcaatcactagagtgaaagtaaaaagactgacagcagaaagtgttggtgaggatgtggagcaacttaaatctcttatgctgcaaaacaatacagccacttcaaaaaacagtttggcagtttcttataaagttatacatataccaatataggacctagcaatcctactcctaagtatttacccatgagaagtaaaaacagtgcattcaaagtctacacatatgtttacagtgcttttattcgcaatagctccaaactggaaagaccccaaatgtgagcaactggagaatggatgaactgtggaacatccaaacaatggagtgatacttagctatacaatggattaactactgatatacaaacagtatactgggctaagaagtcagacatacacaaaaaagcatacactctgattccatctatatgaaattctagaatagacaaaactaatcttcagcattgaaaagcagatgcagtagttacctggggccagcagagtgactataaaggggaagaagggactttttaaggtaactgaaatgttctgtaatttatacattatatataattatcaaaacagacacttaaaatgagtttttttgtatgtatatttcaacaaaagttattgatttttttttttttttttttttttttttgagacagagtctcgctctgtctcccaggctggagtgcagtggcacgacctctgctcactgcaacctccacctcccgggttcaagcaattctccttgcctcagcctcccgagtagctgggattacaggcacccgccacaacacctggctaatttttgtatattttgtagagatgaggtttcaccacgttggccaggctggtctcgaactcctgacctcaggtgatccgcccaccttggcctcccaaagtgctgggattacaggcgtgagccactgcacccaggctgaaaaatttttaaagtagatgggtggttgagagcttgaaatgtaaaaggggaaaaataaaactagaaaataatttggtgagggtgattttcaaaatcaaagaccctatatagtcatttggaacattctcataagtgtttatcaaaagattaggtgtttcataaatatataacttagcttccagacttcccaaataaacaccattgtgcctattcaaagcctaatagaacttctcaacaaaataaggcttaaaaaacatattaaaccattttcaaaaacagatcattaaatgcccttccttgccttttgataccatctcttgcagttcagatttccgccctccctattctctccctcctgctatattacctgaggggaggccaagccctgagcgtaaggtggcaggctgttgttctgatccatgatgttcactttcttcttggcaaaccagaaacccttgcgctggaactcgtctcactattcaattttttcctagagcatctccagcacactcttctcagcaacttcctcaattccttgggttatcttcacacgccaagaaacagtgatgctgctttggaaaaaagtctaaagtttaatttaaggatccaggtaacctgtacagtcctataagccagttctatggctatacaaaacacaaacatgaaaaccaatgaagctattttggaatacatttgtttttaccttataatcctaaagttttattccttccatgtttccggcgattgcatgtaaaatcgccaacaaaacaaaaatcattttgttacatgtttaaataatcggaaaatgctcaaaatcgagctgtcataaccagcattaaaaacttttgaggaaaaacacctagagaaaaataattcctaagcaaaatgtaatatcagagcagaatattcactaagcactgtatacacagcactgttaggcaaagtttagatctttaaatattccaattttacatcctctacaatgtcttgggcaaaaaattaagtaaatatcaaattcaatccaatatacttcagagtgatcatttatcaagctcctactgtaatgaaactgtaaaaaaaaaaagccgcacaaagataaagccctgaatttttataaatgtaataaccttacctctttagaacacattaatgcaaactgtgcctgttatctgacttttcttaaatcatcatcgctttactcactacacatctgaaatgagtttataacaacatattctcacatagaacttagaggtctcaaagttacaaattatatgtccaaagatccttcaggcatatgcacttcaagcatgtgctggtacagaacagacactcagatatttgctgaatgtatgaaagactctgacgatcactttgaaagggcaaatgcccccaaagactatctatcctacatactcatcactgaaaaacagaccaaaaaagaaagcaagctctgcttctggaaataaatatatcagagatattttttaaaatatactttttttttgacagttatcctataataacaataacagaagtcctgcagatgaggatataaagataggaggatatagtccttggcatcaaagtgttcaatatgaagggtatgcaaataactactgtaaaacatagtattataacagcaggtatggtctaagctaagttccttgaatgcagaaaccagcctacatgtctttgtgatctctgcatctagcactatgcctggaatacagtatgtgatcatgaatgagcccatatacacccctggaagagaagacaatatagactaacagccaatcactgtgaagagagcgcagtgttttcacaaagcagggaccatctaacttgggtctcacaaggtgagtaggaatttacacatcagggcttcagacaaaagagaaatcaagcagaaagagacagattgaaaaagcatgcagtatgcaggcgacaagcttagtatgactgtatagaaggtcactgcagcagatgagacagcacatattggtgggctcatactatcaggagttttcaatgttattgcataggcaataataacagttatggaattttggaagtgcagtatgaacagatctaatttggcaagactagatgaatttgagaggagtaaaactggaggacggaagtttcgtttcaggaatctaaggttgaggcaagagataatgacggcaggatttaaagccattataagtatgattagagatttatccaggaccttcggtggcttcaggccactttttgcaagtaagtctacagaagaaaccgcacagtgattactgcactaatttatcctcagaaaagagttgtttgctgggtatcttcatctcctggaaattgaaacatcaaatccgatattttttggaggcaatcaaattaattctgcatagccttctagtgtctgtataactaaatgaagcacagtcttttcacagaaaagtctacctagagatttggaaaaccatgatggcctgaaccgagagacgggagaccctgcaaataaagtggtgtgtattatatcttaagcgctaccgtgcccgctgtctcaggcttctgacaaaatatttaagtctcaatgttggcagcaaaacaggcgggcacagatctgggtgaatctgcttctaacatggagaagaagcggatggcaggacagggcagggtaaacttagggtcttcgatgcaagggactgtcctgtcccgcctgccgccgcccagccagccagtagtaccctgagccccacaatcgtacgatgggaagctgcctgcgaaacacagcagagtagggcaccaggcgggagtggcggccgagtggccgttacaggccggaacggcggcagcacgaaagggaggaacgtcccccgaggggcctgcacgcgcgccaattcctagtctcttccccaccattgcccccaggcctcagtgcagtggtggccttcgcccgaaccgtcagaaaagagtacaatctgttacctgggtcactgcaaagatcactatgggccagcggaagcgaagttaaacagccggcggcccaggcgcccgccacagcgaacctgcccgacctcactgaacccctggcgcgcgttgataatgt

SEQ ID NO: 1087 - DNA, 426 bp, Homo sapiens; identical to SEQ ID NO: 1084

SEQ ID NO: 1088 - DNA, 127 bp, Homo sapiens
tgaggcaggagaatcgcttgaacccgggaggcagaggttgcagtgagccaagatcacgccactgcactccagcctgggcgacagaatgagactccatctcaaaaaaaaaaaaaaaaaaaaaaaaaag

SEQ ID NO: 1089 - DNA, 1026 bp, Homo sapiens
cacagcatgagcatgagctgtccctggttgggcacctgggcagtggtctgtgcttcacctagacaaagaaatgacagtcaaggaacagatgctaggggaggaaacagagctgaccagaggttacctgggcacaagaggaatctggaagagcgcacacctgctgagcaaacctaaggcagtgacatcagggtggaaaaaagaatacatatgcttattgttagtgttcaccaaaaaaggttcacagtgcgttgctctaaagctcagttagcttctctaacacaaggtagatacagtgtgaagtgccaaaactcagtttccataaaactttttacaagcatgtaagttccttattgactttttcaaaagaaattcatgtaggaaatgcatcctaactcattctatgatgccagcattaccctgatactaaagccagccaaagacactaaaagtaaagaaaactgtagagcaatatcccttatgaaggttgatgccaaaatcatcaacaaaatactagcaaatcaaattcagtagcaggctgaaaggattatacaccctgaccaagtacagtttgttcctggaatgcaaggatggttcgacacatgaaaactgatcagtgtaaacagaatgaagggggaaaaacacatgatcatctcaattgatgccaaaaaaaaagcatttgacaaaattcaacatctttcatgatgaaagcactcaatatactagaaatagaaggaaactacctcaacataataaaagttatatgaaaaatctacagcaaatatcatactcaatggcaaaaaaactgaaatcttctcatctaaaatcaggaacaaggcaataatgcccacttctattcaacatattactggaagttctagctagagcaattggacaagaaaaagtggggggtgggggagaagaggcatccaaactggaaaggaagaagtaaaattatctctattcccagatgatgtgatcttatatgcagaaaaccctaacagttccacaaaaaaaaaaaaataaata

SEQ ID NO: 1090 - DNA, 1026 bp, Homo sapiens
cacagcatgagcatgagctgtccctggttgggcacctgggcagtggtctgtgcttcacctagacaaagaaatgacagtcaaggaacagatgctaggggaggaaacagagctgaccagaggttacctgggcacaagaggaatctggaagagcgcacacctgctgagcaaacctaaggcagtgacatcagggtggaaaaaagaatacatatgcttattgttagtgttcaccaaaaaaggttcacagtgcgttgctctaaagctcagttagcttctctaacacaaggtagatacagtgtgaagtgccaaaactcagtttccataaaactttttacaagcatgtaagttccttattgactttttcaaaagaaattcatgtaggaaatgcatcctaactcattctatgatgccagcattaccctgatactaaagccagccaaagacactaaaagtaaagaaaactgtagagcaatatcccttatgaaggttgatgccaaaatcatcaacaaaatactagcaaatcaaattcagtagcaggctgaaaggattatacaccctgaccaagtacagtttgttcctggaatgcaaggatggttcgacacatgaaaactgatcagtgtaaacagaatgaagggggaaaaacacatgatcatctcaattgatgccaaaaaaaaagcatttgacaaaattcaacatctttcatgatgaaagcactcaatatactagaaatagaaggaaactacctcaacataataaaagttatatgaaaaatctacagcaaatatcatactcaatggcaaaaaaactgaaatcttctcatctaaaatcaggaacaaggcaataatgcccacttctattcaacatattactggaagttctagctagagcaattggacaagaaaaagtggggggtgggggagaagaggcatccaaactggaaaggaagaagtaaaattatctctattcccagatgatgtgatcttatatgcagaaaaccctaacagttccacaaaaaaaaaaaaaaaaata

SEQ ID NO: 1091 - DNA, 1026 bp, Homo sapiens; identical to SEQ ID NO: 1090

SEQ ID NO: 1092 - DNA, 263 bp, Homo sapiens
gaggggacggggacagaaccagggtgccctctcccatgccccacctgcactccacgaagctaaacccatttcgcccttgctgtccctgctgaagacggaggcagaggctcctatactcactgaggaatctcaagtttagggacaccaggtggcaggttgtgccaggaaagacatcagtcagggacagcactggcagagctcaccacaccatggagtcctccttccactccccttccatggtcctccctcctctccccctccat

SEQ ID NO: 1093 - DNA, 870 bp, Homo sapiens
aaaactttgtgtagcatgcctggttgtacgataagagctgagtgaaagatgcagtatcccttttccacacggaaaagccaaatagcatcagcaacaacaaatagaataatgcagtggtttctatcatgctaatttattttgctttggagcaggtacctttcctctatggcattattttcttgcatttctcataaaggggaggatgcatcccaactgaatggctcactggcatgtcttttatgtgttcagttgccattcctagctttggaaagtttctatctgtccatgtgtatacaagtcaatgccccatttttgtttttcttttaaccgaggtgtagataggaaaaggacatttttaattacttaataaccggaaatgcagatgtgtaaggagaatgagaggaatgagttaaagtggttatgcatttttctatagatgagccattacagcaaggaattttacagttgacttctctgaacctagctttaccacagtgattaaatcctatttagaaaggggaatctgatttaaatgtgtgattccttgtatttgctcctatcacaaaagatatattaaaggaggtatgccattaatgaaatccactgtcctgagtattatctttcctcctgttgtactttctcagagactatggcagaatatctggatcttccttggattttgtacacatattgtagtgaaatgtgtcctacatctgaaattgcatgggactcatgcccagcaatctggttctaggcctttgacacctgataatatgagagcaattggccagccaatagccataagcccagaggattttagagcttcatgtgtggcttttaagagcaggtttgaaaaaaaaaaaaaaagac

SEQ ID NO: 1094 - DNA, 868 bp, Homo sapiens
aaaactttgtgtagcatgcctggttgtacgataagagctgagtgaaagatgcagtatcccttttccacacggaaaagccaaatagcatcagcaacaacaaatagaataatgcagtggtttctatcatgctaatttattttgctttggagcaggtacctttcctctatggcattattttcttgcatttctcataaaggggaggatgcatcccaactgaatggctcactggcatgtcttttatgtgttcagttgccattcctagctttggaaagtttctatctgtccatgtgtatacaagtcaatgccccatttttgtttttcttttaaccgaggtgtagataggaaaaggacatttttaattacttaataaccggaaatgcagatgtgtaaggagaatgagaggaatgagttaaagtggttatgcatttttctatagatgagccattacagcaaggaattttacagttgacttctctgaacctagctttaccacagtgattaaatcctatttagaaaggggaatctgatttaaatgtgtgattccttgtatttgctcctatcacaaaagatatattaaaggaggtatgccattaatgaaatccactgtcctgagtattatctttcctcctgttgtactttctcagagactatggcagaatatctggatcttccttggattttgtacacatattgtagtgaaatgtgtcctacatctgaaattgcatgggactcatgcccagcaatctggttctaggcctttgacacctgataatatgagagcaattggccagccaatagccataagcccagaggattttagagcttcatgtgtggcttttaagagcaggtttgaaaaaaaaaaaaaaaa

SEQ ID NO: 1095 - DNA, 868 bp, Homo sapiens; identical to SEQ ID NO: 1094

SEQ ID NO: 1096 - DNA, 750 bp, Homo sapiens
cttcaaagcaaggaaataagatgctgtatatgcacacataaatgcattgataatgtaaatatcctattcacgctaatgaattactagatattaaaagtggggggtggaaatcattgtagccctttattgatgacacccattcattctggcttcagaccttgcagaggttggccatatctttttaaaagtgtcattgatgataaaagggactacccaaggctaaagcgtcaacatttttcagaacaattgcttttctcattatttacaacctatataattcaactttgaaataacccttattttgaaaaaaactgttctaggtatggcatgttttgttttttccctcaggtatattcaatacattcttcatatttgggggaactgcttttgaaaaagggatactgcatcttaacagttatcttcagtgtgcatccagtaaagtctgcgtgttgagtatttgagctacattccatatattttggccaccctcataccagaggacagccgtagttcaggaggctctgttttcaaaagcaagttcaaaagcacatgcacattgagggaagatgaaagaaaacaaaaaccaaccatgcccatttaacttcagattacagagcacaaaatgtggagtgccattaacccattgattgattgtggctgtagaatttaaaaagcaaacatggggggggtggggaatcatctgtatccagggtaagaatgaccaatattttcacatgggatcatcctaat

SEQ ID NO: 1097 - DNA, 750 bp, Homo sapiens; identical to SEQ ID NO: 1096

SEQ ID NO: 1098 - DNA, 750 bp, Homo sapiens; identical to SEQ ID NO: 1096

SEQ ID NO: 1099 - DNA, 3965 bp, Homo sapiens
tttttttttttttttgataaatacaaagatacatgtaaagttttacttacctgattttaaaaacaggctaccaaaatttatccaaatatattaaaaaatgagactgttttaaaaacctttcgtttccatattgtgactccactaagcgggtaaaaagttcaggacagagatggaaaggaaagaaggaaacaggaagaagtgaaactaggaaggtggtgccagtggcacatggatgaagaaagagagatcatcagccatggagaattttgtaatgtaagtagagagagagattgggtaggaagacaggcttcacagtttgtaaagtgtaagggaactacccatcgtaccctgtcattgactagggctgtgagttatgtagttctgtctcctcttgcaaaagacttaccacttctggcaagtgattaaccacttctggcaactcttcatttcttcttatccttgaatattcatctacatcactctaaacagcacagccccagaagcatggaaaggggagttattagtatggaaaggggagttactcttctggtgtagtggtccgattgagtccatggcttcccagccttaccagaggtgataaaaatgtcaattcctttggggccaatcttgctcctccagtgtgttttagccctaatgaggtcatggttatttctagacttctgagacttactgtggctttgaattgacacaaacactaattttctgtcaaaggctagagtgatggatgttatatgcctgaattttctttgaacattttattttaaaagagatactttgggcttttcatgaaactaaaattctggaaccctagagcagtctattatatctgtcaccacaaggactttccttaaaaagctccctccataagcacttggatgtgtaaacaagatcctttcacagatctttttctcttcctctccatatcccaacttgtcttggagactactttttgaattataaatccctttctgcatttctattattaatttttatttgtaaaattgctaaaatagctaaatttggccatttaacctgcatttaaaatctaggaatgtggggtgatcatctttgtacataaattacctaatgaccctgtccatgctgtgctacgtgtttaggtggaataacactcccatggatgaagcactgcactttggacaccatgatgtatttaaaattctccaagaataccaagtccagtacacacctcaaggagattctgacaacgggaaggaaaatcaaaccgtccataagaatcttgatggattgttgtaatggtctcaaatcccaagatttaaatcacttacctatttaattgtggaaaatgattatgaagaacatgtgtatttctatctggtagtgatgtatattttacatttgtcatttcagtgttactggagttttcttcattgtgcacacaggacaaatctgatctctttgggaaaaaatagaaataaaacaatctccctccataatgtgagcaatattacctcgtgcattgtataatttgatgtaaaagaaatagttaccaatgctagcttgtgtggtcttccatgatttatttgtgttttgtgaattttcaatttatggtgatgatctgctgatatgcatttataaagtaagctctgttgtacagtctgtccaaatgggtcaaggttgcctttagaagcaaatagtgtgattttcaagacttcaaatacaaatttagtttaagtgtttgaacaactatatgcacttacggttgtgtgtttaaaatgtctctctcaccccctagcttcatgatgtgactcttaaaaaactataatagttaacaactgttagtaagatagaccaattctgattagactttatcagggaatctgtttaagatatgtttggtgaccaaaacgtatgtgtgaatgtagttataatgcttttgaaaaattttcctttttctatatccccttagtccagcctctcttctcagacatttagctatctgcctctttcctttagctgggaaagtgagagctggcatactatgcagtttttatgttttccatagtaagtcagaaaatgcctcctatttctggcatcagaactttgccatttgtctacagaagacgaaccagagacaaaattactaagtataaattagtcaagtttatcagtctaaaaaacgaagggatgtgcaactgcagctctttaagaagttttttttttttagcttctagggtaaagataaattcagaaatgctctaagctaccaaagttattctgaaagtatgggaactgctacaactaacaaacatttgtttccaagcctgtcattaagagtctgcatcaagagatttgtcctccttgggggaccactggatcattccagatttcttgtgatttttctattgtgtaattcttggtgggctctgtagtttaataataagaaaaaggccatttcattttaaattgtgacctataattctttgtcttgggttggtaattcaggattcatttggaaagtgggtaaaaggggcttcaaaaaacggatagaacaggattttctaggagttacacatacattttatcctgtcatacctcgagataaagtggcatgttagtgaggagttctgatattaagcacacacacacatgcacacaaatggacttctctgaagctgtgtttagtgaaatgagctcaagtacatgaatgttagttgttatcacatacagcaaattcctttttttttctttttctatgagcacactctgctgcttctaaactttacatgcctgatggcaccttactccagcagcctccaggtgctttcattttcacttccagtctaagccagtggctcctgccactgccctcccattacctagatggcacctcctttggtgaaaccacggccaatgttccttagctgcaccaggcccgaagctgttcccatgcttgagcttccatggggaggatgctgagtgagcagtttcctaccccgtggatctagcaagccatggagacaggtagcatttgtaagatgctgcacaggagcagcattatccccaaagatattacagggtagacacgttttaactgaaatcaatcaagataactttattcaaagagcagcccgctttgtgtgactaaaatgaaacaagacagttgaattgtgtgacttgaagattaccaatgattttgaggcttttctataataaaaagaggttctaaccattatttgggaacaaagagagttttcatcttttttcagatcaaaaccattctgtaaaatctttgttgtttaattaaatgtgccgttatttacccctgatgttatttatgactatgtgccgattcctgctcgggctgtttgctgttggctggtaataatatatttgatttaaatgctgttgactgtgctattaactgctgccgtcagtaaactccaaagatctttttgttttggctttagtatcatatgtgctttttctgtatcctgagcgctctatatgatcatgttaatttaaagctttatacacattgttgtttttgctggtctcatctttggtaatatgctataccccactgctgcccgacactgccctttagctgcagagctggattagctgttgaccatttgatgctgttgtctgtctggcagggactgaatgacctgatgtcagatttagattcttcctggggattacacagctatgaatgtatttgcttctaaaacctcccaaagtgaatctaatcttaaaactacaagttgtaagtattctgaaattgggaaacatttattttaaatgcaatcaggtagtgttgctttttacagcataataaatatatgtatcaaaaaaaaaactgtgtggaaaaaatgaattttcttaaaacaattaagagccaggaactccactgagcatacagaccatctctggttaggttccaatccatttctaatgcctgc

SEQ ID NO: 1100 - DNA, 814 bp, Homo sapiens
gggttgccacaatgactaggacaagaatcctgtgtagagttcacctttgaaggtgagggatgtgcaggcatgtctctagtcctctagatgcaaacactatccttttacagttaggaagtgctcagtaaatatttgttgaatggaaccagtaaacatacccttgaatgagaagagaggttattttcacaaagccttgaaatttatttagagagttgaagctagtactgccacactagaatctgagtgtcaccagccagtacacctcagctcctaatttattctgcgtgggaatagcattcgcttccaatgccagaaatccctggtcttcagagcactctttcctttcaggccaggggttagtgtatagttttccaaccatagagaaagtacatgaacaccatgactgttacattttcatttatcaaagttatctgtcacaaagtaagttactttgctagaagagtcactgcattactggcattgtagaactgtgatgagccaggtactatgcaaggtgacaagtggggttaccacaatgattagaagagacatcagaaattctctaatctaactcactcttcttttatagatgaagctgagacccaagagtgggctgtgatacagaactcttagtcctgcgctgttgttctacgtcctacaacactgattatgcccagtatggatagaatatacatattagcttattcatatgcactatctcctattagctaaggcctcttctctgctgagttttaggcagaggcctaagtgctacaacagaaagtcctgcaacatatagtcaacttcagctata

SEQ ID NO: 1101 - DNA, 743 bp, Homo sapiens
ccaggtttctaaagcaaaaaattgaagagcattttcctcctgtgtttataatcccaactaaaacactatgtaatacatgttggaaatattactgtgctttgtatatgtattaattttttttgccctaaattggcctctaggaatgtgaaagtagatgtacccacctgataagaaaaagtgagctaagtaactaacttgataactaggcattcaacaagtctttttctctatttcatagaatcagtgtcaccttaaattataataggtttgcacagaattcgtgaattcttgagatagagtcttgctctgttgcccaggctggagtgcagtggcgtgatctcgttcactgcaacctctgcctcccaggttcaggcaattctcctgcctcagccacctgagtagctgggattacaggtgtgttccaccacgcccagctaatttttgtatttttagtagagaggggtttcgccatgttggtcattctggtcttgaactcctggcctcaagtggtgcacccaccttggcctcccaaagtgataggattacaggcatcactgtatctggctgaaattagtgtattctttaaagttcatatttttcattaattcacagaagaattgtaaaaaaggtaacacgcagttgacattccatttttccagaaagacagataattacatactgtagaggatgactcaaaagtctgtttcaagccactgacttcctaaactaatgaaggcctattc

SEQ ID NO: 1102 - DNA, 2395 bp, Homo sapiens
ctttctttcctttatgcagtagatgctttcttcctcctgcagttctggaccatgtggagctacatggagaaattgcacagacagaatcactttgccacactgcagggcccaggagtgggagcccaggccctccctccagggtagagatgcaccgaatggaaattgcactaaggacctcttcctttgctgtatggacagaagagttcatggttgcattcagggattgcaaggaccatatagacatgtcacaggtggaaaaagggccacaagccgttttgcacaaatgcctgcccacctgcccctcttccatccaggagtgtgctactgaggggctggctggaccaacctgctggctcaggcatgtgactggcctaactgcatgcccagggcactgccagggttcaatgggccagccgtctcctactccaccttggatttttctctccatcacatcatttctgaccatttgctcccttccattcttgaaacacctcatgccccacaggagccccagtggtgactggatctgcaagggttatctcccgccctctggggtttgagtggaggtatggagccagagaggctatcctagctaccttcctcctagggggagctggtccccttcctatgtggtagagagactggtgtaagagtgtggggtgtggcaggcgccggaaatcctcaaagctttcagaagcatccagaatgcctaccatcagctcctgaatcagggattttcagcactacctctgagccatggggttggctgcccagccaggcttccaggccctgaggacatgtggtcaggttcagcaggctcctgggtaaagagggtgggagggggcttctccttttggaagcagatagccatgcaggtagaattgtcatctcccaagtggccacatacagcaacccactccaggccatggggaccaccactcagggttcggggctggcaggagggtagtttctccagtctccccagtctgttggtgtctttataggaaactataaagcagagcagtggtgtctttagaggaaactcattcaagtcagggcactgattttcctctcagtttattatttggggggatagggtcaggtgggtatagtagtactttaccagggtgcttttaagttactttaaaaaaagcctacaaaatattttttttcttttatttgctcgagttcacattaatgatggtcacaaggctgccttgttgggcaggcgtattgcccccagttcctcttctgctggcctgtatgacctccacagccaggccctgggcccaagccccttgtcccttctccactgcccctctttccagacagtaaaggccatggtcagtgtgtttttctcttgtaaacaaaccccagcttgtttaacagaaatgctaataacctactgggaaagatggaggtctaaattacctccagggtttttctgggggtttatcaccagtgtgggtcccttctgataccaccaggttcactccaggcagagtggggcggaaggctgctgaggatatgggtcagttacagcagccctcacctcaaagggctggcctgcttctcagcctacattcatttgcaagcttcaatctctggaccatctggtgttcacaggtgttagagggttaggggttaggggctagttttggatttgattcataggtaggagggcttagattttaaggcacttctgaaagtcaatccctggacaaggcagtcatcacataagaacagctaccttctccacttggtggcacaagaggtagggaggggagtatgggttcatttggcttcgcattatgcaaggtgaaaccgtttgttttccctctccattttccctaactaaatgaaaaggacacattctgaaatcccttttgttggagaataagtcagtctgaggggaaatgggaggccagagatgagaaccctttgaaaagattgtaaaatactgattttcattctttcaagcttatttgtaaatacctatttgaatgctgtgtatttgtacaggaatttgagcaaaaaatgtatagagtgtgatgtccaattggtattcagcactataaatgtgtttttaacctcccgcattctgtgcttatttaaaacaaggaaacttctaaccatttcttttgtgtattcatgtttaaagaaaaaaagtgatttaaaaatgatcttacctgtaccagaaaagcaaagttaaaggaaacaaaatttgtaccattgtcccaagaggtattttactgtatatattgtggtagcatgttcaaaatccaacaagtaatgtgaattttagatgtaaatatctgccacttgattttttttccccctttccccacttccttgactgctgtgatgtgaattaaagataaatacgtgatactga

SEQ ID NO: 1103 - DNA, 2395 bp, Homo sapiens; identical to SEQ ID NO: 1102

SEQ ID NO: 1104 - DNA, 125 bp, Homo sapiens
agcccttccttcagatgtcccgcagtccgtccaccccgcacgtctcctatcagcctatgcacggcgggctccggtcaggtggaggatcagcaggtgggctttcaaaggttggatccgttgcccac

SEQ ID NO: 1105 - DNA, 125 bp, Homo sapiens; identical to SEQ ID NO: 1104

SEQ ID NO: 1106 - DNA, 622 bp, Homo sapiens
gtgagagtaactttgggcactcctcggaggccccacctcgcactgacaccatggactccatgccaagtcaggcctggaatgctgacgaagatcttgagccaccctacctccctgtccactacagcctctctgagtctgccgtcctggactccatcaaggcccagccatgccgaagccactcagccccagggtgcgtcatccctcaggaccccatggacccgcctgcgctgccgcccaagccctaccacccccgcctgccggccctggagcacgatgagggggtgctgctgcgtgaagagactgagaggcctcgaggcctgcaccgcaaggctccattgcctcctgggagcgctaaggaggagcaggcccgcatggcctgggagcacggccgaggggagcagtgaggggcaacgaggcggctgggatgccgccctcagtaagcagcttgccaatcactccaggtctgaaaagcaagtcccccagccccaccccagggagccagagaggcttgcactcaggagagaaccacccccaagtctccgttctactgccgtgaactcatgtgttgccatgtacagaggccacagcagcatgaagggttgtggcttccctttttattttt

SEQ ID NO: 1107 - DNA, 8968 bp, Homo sapiens
ttgaaacaattagaaatattcctcatttagctgcaaatctaaagaaaatggtgagtattaatatagcaatcttcagttattttttactagaaacttagaggtgtgctctcccagtttagctttttaatagctaatattacgagctagttaatttttaaatcaagaagtattttcttggcctggcatggtagttcacacctgtaatccctgcactttgggaggccacaacgggtggatcacttgaggtcaggagttggagaccagcctggccaacatggtgaaactccatctctactgaaaatacaaaaattagctgggcatggtggtgcgtgcctgtaattccagctacccgggaggctgaggcaggagaactgcttgaacctgggaggcagaagttgcagtgagctgagatcgtgccagtgcactccatcctgggcgacagcaagactccatctcccattaaaaaaaaaaaaaaaaaagaagaagaagtgtttatttatttagaccttggatttaacattttcttttttatataatttttatttagaagccattttaaattattttattccaacatttaataaacatgtgttggcttcattgtgccgtggctatgctacatgtattgtgaaagatagatatgaccaatccctgccttcaaattctcaacgtttggtgagacagctgtaaaatatacattttctacttataggattatatttgcataataaatgcagcaaagaattacaaagagatgccatctattgagcatagaaaagggaggaattacttccagtttaggaggattctgagtaggatagggataggaagacttcaataaagtttttgttttgttttttaaatagagacgagttctcactatgttacctaggctggtttcgaactcctaagctcaagtgaggcacccgcctcggcctcttaaagtgctgagatcacaggcatgagccaccatgtccagctttgcaataaagatttatttaggtgttagcagtaagctgaatctttatttatttatttattttctgatatggagtttcactcttgttgcccaggctggagtgcaatggcacaatctcggctcagtgcaacctccgcctcttgggttcaagcgattctcctgcctcagcctcccaagtagctgggattacaggtgcccaccaccacacctggctaatagtttgtatttttagtagagacggggttttgccatgttggccaggctggtctccaactcctgacctcaggtgatccacctgcctcagcctcccaaagtgttgggattaaaggcctgagccaccgcacttgccaaagtaagctgaatcttaaggaataagtgaaattcggacatgcatcagaaagaatagtttggccaaaaggagcaatgtgaggaaagacataaaagtcaaagaacccagagagtatgggggaaaagtgatactccactttggctgatgcgtaaaggtattgaggagattagctcagggttagtttatgcagtgccttaaaaaccagactaataaccttagactttactgtctgagtattggggagccattgaatgtgtgtgtgtgtgtgtgtgtgtgtgtgtgtgtgtgtgtgtgtgttttctttttttagtgaagggtgcagaggagtgacttgattagaactgccttaatcatggagaaaatattggatagagcagactgagccttgctactcttgagtatgggcagagagtatcaacatcacttggaagcttgttataaatacaaaactacagacatcatgcaccctagaacttcagaatcagaatctacgttttaacaagttcctcaggtgattcctgtgcacattaaagtttgatcagctctggattagaagactaggcagagaaaccaaaggcagaaaaacctggagactaattaccgtcattcagataaaagatttaaagcataggaatacagaagataatttttatagattatggaggtcacatttttagaacttggctatgaattggacaagggacacatcaaaaataatgaagtttctagtctgggtgacttgaaggtgagtagtatcaagtgtgggttaaagaagttagtaagtgggctgggcgcaatggctcacacctgtaatcccagcactttgggaggctgaggtgggtggatcacgaggtgaggagatcacgaccatcctggctaacatggtgaaaccccgtctctactaaaaatacaaaaaattagctgggcgtggtggcacgtgcctgtagtcccacctacctgggaggatgaggcagaagaatcgcttgaacccaggagacggaggttgcagtgagctgagattgctccattgcactccagtctggcaacagagtgagacaccatctcaaaaaaaaaaaaaagaggttagtaagtatattttttgacacatcttgcacatgtagtaaatggtcaatcatttttgaactgtagttagactgagtttgagatattgaaggtacatccagatagagattaccagtagtcttaaatgtgggcctgaattttaggaaggaagttaggtttagcaatataaattgagggtcatctgcattgagtgattattgaagacaaaagagttgaactcacaaagagtaggtttgtactgtaagaagtgggaaagcacagttttaaggagcttttgaagtaaggggctggaaaaagatcatgtgttaacctttggtatcagttactgatgatataatgaattaataagagacataatttctcctgtttcccttttcaaatgttacagaaccaggctttagcaaagatggatatattggtgactgagacagaagaactggcagagaatatactcaagtggcgtaaacaacaaaacgaagtttcgtcttgtatccccaaaatattagctgaagaaagttatctttataaacatgatattataatgcctcctttaccttttacttctaaagttcatgtccaaactattaatgccaagtagtcatcaactttatttttgcttaattatgtgtagtcatatgaagtctatttctagttgactgtaacatgggtattaatagtctttgctgctggtaatactgaaagaacctgctttatattggagtatcaagatctcaggttcattaagaccaaactgacttttcctttgtttttcatatatttttattctacctttcagtaaaactagagaagctaaaaaatagccatgacaatttattaatataagtgaattaaccatttctcaggtgggaaattctctttttttaaaaatgtgtgtttatcgtctggtgtggtggctcacacctgtaatcctaacacttggggaggctgaggcgggcagatcacttaaacccaggagttcaagaccagcctgggtaacatggtgaaatcccatatctacaaaataaacaaaaaattagccgaccatggtggtgcatgcctgtagtcccagctattcgggaggctgaggtaagaggatcacctaagcctgtgaggtcatggttgcaatgagtcatgatcacgccactgcgctacagcctgggcgacacagtaagaccctgtctcaaaaaaaagaagtgtgtttctggccaggcacggtggctcacgcctgtaatcccagcactttgggaggcctaggtgggcagatcatgaggtcaggagttcgagaccagcctggccaacatggcgaaacacctgtctctactaaaaatacaaaaattaggccgggcgcagtggctcacacctgtaatcccaacactttgggaggccgacccagatgggtggatcacctgaggtcaggagtttgagaccagccttgacaacatggtgaaaccccatctctggtagaaatataaaaaattaaccgggcatggtggtggacgcctgtaatcccagctacttgggaggctgaggcagaataatcgcttgaacccaggaggcagaggttgcagtaagccaagatcgtgcctctgcactccaacctgggtgatggagcaagactccatctccaaaaaaataaaaaatacaaaaattagccaggcatggtagcatgtgcctgtaatcccagctactcaggaggctgaggcaggagaatcacttgaacccaggaggcagaggttgcagtgagcccagatcgtgccaccgcactctagcctgggcaacagagcaagactctgtcttaaaaaaaaaaaaaaaaggtgtttctgaattagaagggtcttcttgaatctgaaaatgtctatgatgattattcctgtgggaatgtcactaagtatgcagaaaagagtaacacagccagcctgacttatcctttgaaaggcctgattataaggtttgtcctcagctgttgcatctgggaacttagatatcagaaggtatcttagtctgttctgctgtcataacagaattacacaaactaagtattttataatgaacagaagtttatttggttgacaggtgtggaggctaggcagtccaagaacatggtgccagcatctagtgagggtcttgccatggcagaaggcaccacatggcaagtgagcatgagaaagatatatgggtctaaacttagccttttatcatgagcccactcccaagatagcagcactaattcattaatgagggcaaagccctccttacctaattactttttaaaggtctcataacacttttacaatgtcaattaaatttccaacacttgaactttgggggacatatttaaaccttaacaggagggctccactcactgaaaagagtcgttcatggtagctaacctgtggtttgtgctgaaaacctgctttcttcctgggagtctagaattttggtacatggtaggtagaaggtacctacgtgaccagcccccagtaaaaaccctgggcactgtatctctaacaagtttccctggtaaacaacatttctcacatgttgtcacaattcagttgctggtggaatgaaacaacagatatgtgtgactccactgttagaggactctggaagcttatacctggtttcccccagactttgcctctgtaccttttctctttgctgttttgcttcatatgcttttgctgtaataaatcatagctgtgtgatgatatgctgagtcttgtgaattctcctagcaaatcatggaacctggaggtagtcttggagaccctggcatacaaagcagttcctaagtgtttactggtagctgtaggaataggcaaagaagaaacagcaaagaaaaaggcacactgtggtataactttggaggtttaccttgcaaaatgctcagatattttacctatcagaggttattgtgcatataatagagagtgatatactaacaactgcctcaggatatactctttttaatcagtattgtaactaaccttggcttattttacttttagacttggggttctattttgctttaaaacatgtacatcagttttgttttttgttttgttcttttctttcctttttttttttttttttttaaagacaggatctcactctgtcacccaggttgctgagagtgtggtgtggcccaatcttgacctcactgcagccttgacctctcaggctcaagtgatcctcccacctcagcctcccaagtagctgggactataggcacgcgccaccacgcctggctaatttttgtattttctgtagagacagagttttgccatgttgttgaggctggtcttgaactcctgggttcaaacgaccctcccgcctcagcctccgaaagtgctgggagtacaggtgttagccactgcgcctggcctcattgtactccttaacacaagaagacttcaacaatgataagtagttgtttataaggaagcaggatcattaccaaaataaatcctgctaaaacaacaggaatcatgttttaaagcctagtttgctaatttttgctagtaggataagagtgatcgtaatatctcgaacattacatagacacttaaaacctttagttgtatttcatcaaaaatctgttcataccccacgttggtttcaaaacatactatgctttttcttcgtgttatttcctatattcatttttgtgtgtatgtgtatgtcacaaatattgatatgcctggttgtttatttttgttttctattatgcctttttcaaaatataaaaataaacttgtaatttctaactaaaattttttagtcctagtctgaatttaaagtgatagaaaggactgatgcactgtttaacttatacagtataggcatataggctctcagaatcaaaagagcttgaggtaagttaagcctgaggtctacttcaaagagaaagctaatttaatactcttccagagtcaatcagtgctgattaatttttctttaattattcaacttttagatgtgtggatattaaaaaaaaattagctctgcatgcctttttttgttgttgttgttgttcttgttttttagatggtcttgctctcacccaggctggagtgcagtggcacaatcatagcccactgcactctgaacctcctgggctcaatggatccttccacctcagcctcccaagtagctgggactacaactgtgccccaccacacccagctaacttttaaatttttttgttgagatgaggtctcgtcgtgttgcccaggctggtcttgaactcctgggttcaagcaatcttggcctcccaaagtgctgggattacaggtgttagccccttgcacctagcctgaatgtctgtgtttcctacttacactagaagaggtgtgtgagatttgcaaatttattgccagcataacagtgatgccagtttgtgaagaccattctggaggaattgagatgctgcctggttttcctagcatttttcttattttctttctttctctatgtgactctaccagtctgacccctgatttatcctctgaaaccctcaatgaagtcaggaacagtctgaggaatagcagaacctaaaagatttcttgacatgcaaaatctataatagagttgagattttaataagactgtaattagtgtattgtgggatttcttcacatatctgtaaaacacatgaatttacataaaagatttatctcacaatttggggaatccactaattgagtttactaaaaaaattatgcattagacccttgaacaatataagcttgaagtgcatatgcaattttttttttttttttgagacagggtctcactgtcaccaggctggagtgcagtagtgtcatctcagctcactgcaacctccgcctcctgggtttgagcaattctcctgcctcggcctcccaagtagctgggattacaggtgcacaccaccatgcccggctaatttttgtatttttagtagagacagggtttcaccatgttggccaggatggtctcgatcttttgacctcgtgatccacccacctcggcctcccaaaatgctgggattacaggagtgagccacagtgcccagccacaatttttttttcaataaatatattggaaatttggagctttgtgacaacttgaaaaattcacaggtcaggcacagtggctcacgcctgtaatccagcactttggaggcggaggcgggtggatcacctgaggctgggagttcaagaccagcctgagcaacatggagaaaccccgtctctactaaaattacaaaattaaccaggaatggtggcacatgcctgtaatcccagctgcttgggaggctgaggcaggagaattgtttgaacgcgggaggcggaggttgcagtgagctgagatggtgccattgcactccagcctgggcaacaaaagcaaaactctgtctcaaaaaaaaaaaaagaaaaagaaaaattcacagatgaactgtgtggcctacagatatcttgaatgcaaaaaatatatatagatacaagtctatcatttactaccacaaaacacacaaatcaattaaaagttaaattttatgaaaacacagactgtacgtgtaagcaaatttaaaatgcagtattaaatcataactctatagccgccactgtccggccacagccccacactcttcactgtcgctcgtcatctcgcacagggtggctccagttgtggtgtttggcgccagaattaaaccaccaccatgtcgagcaaaaaggcaaagacgaagaccaccaagaaatgccctcagtgcacaatatccaatgtgtttgccatgtttgaccagtcacagattcaggagttcaaagaggccttcaacatgattgattagaacagagatggtttcatcaacaaggaagatttgcatgatatgcttgcttctctagggaagaatcccactgatgcataccttgatgccacgatgaatgaggcaccagggcccattaatttcactatgtttggtgagaagttaaatggcacagatcctgaagatgtcatcagaaatgcttctgcttgctttgatgaagaagcaacaggcaccattcaggaagattacctgagagagctgatgacaaccatgggggatcagtttacagatgaggaagtggatgagctgcacagagaagcacctattgacaaaaagggaaatttcaattacatcgagttcacaagcatcctgaaacatggagtaaaagacaaagatgactgaaaagaactttagctaaaaccttccaattacattgtcttactctgttttatttctcacacacttcccccaccctcatagaacctgttgcatgcaacttagtttcacagctttgcctttttttaaaaatgtatttattccagacctttctgccacttagcacttgtataatcagactggaaatggtgatgacgccataaattgtattgaaaaagagatcgccaataaaaatcaacaaatgtgaaagcccccccaaaaacataactctataaactagtacgtactgtactactgtaattttgtaactgcctcctgttttagtgagtcaagtgttgccagcatctgc

SEQ ID NO: 1108 - DNA, 955 bp, Homo sapiens
gcatggtgtctgatagtggctcaatttcagtttttttttaaattgtttccgaggcgtgtttcaaatatttgactttttcccactggtctgaatagtgcttctcagatacggcaagtctctaggtttgcatgagtcagcctctgtgccctctgttcttttccccgatgttctttttgcttcttcttatgctattaccacactgtcttaattactatattttattaacaaatctcactttctggtagaccatttccttcacctacttcttcactttccttcaggaatgtcttggatatttgtaactcttttccttatgatttagcatcagcttgacaagtttaataaaccttgttaggactgagataaaattagaaagattggacatctttaaggtactgagttctcctagccaggaatgtggcacgtttccctatttctttagggaattgtaaaatgtctttttataacgttttataattttccccatagagatctttaaaatattttgttagatttattcctagcaccttatatattttgttactcttgtaaaaagtatccttttttttttttttttttttagaaacggagtctcgctctgtcgcccaggctggagtgcagtggcacgatcttggctcactgcaagctccgcctcccgggttcacgccattctcctgcctcagcctcccgagtagctgggactgcaggcacctgccaccacgcccggctaatttttgtatttttagtagtagagacggggtttcaccgcgttagccaggatgttctcgatctcctgacctcgtgatccgcccgcctcggcctcccaaagtgctgggattacaggtgtgagccaccgcgcccggccagtatccatttttaaaaactacattttctctttgttgcttgggtagagaaataaaatcaatttttaatttatcttatatctgatcatttt

SEQ ID NO: 1109 - DNA, 479 bp, Homo sapiens
aaagaaagtggaagatagtaacagagaaagtggaaaaaaggacgagaagggatagacatgcaaaactccagcattccaaagttaagggaaagagaataaccatgttgtgcctataaccctagaagattacaaaaattatttctagcaaattgacaacccttctttctgaaggtagctttgggcaaaaaggtgctgttttgagcttttaccctgaatcacctggggtgcacttgaaaagaagccattttgccaatgcattaaaagtgtctgagtgaaagctgccacttgattgtcctaagaggcttttaaccccagccacataattatttcataacaaacaatcaggaacatttctcttcctcatcagtttcccagactacctcatagcacatgcatgatacaatgtgtgattttgcagccttccatgtaacatcggagtcctaaagagatggacttgaagaggctcatggtgattttaa

SEQ ID NO: 1110 - DNA, 13191 bp, Homo sapiens; identical to SEQ ID NO: 976

SEQ ID NO: 1111 - DNA, 1316 bp, Homo sapiens; identical to SEQ ID NO: 977

SEQ ID NO: 1112 - DNA, 309 bp, Homo sapiens; identical to SEQ ID NO: 978

SEQ ID NO: 1113 - DNA, 9740 bp, Homo sapiens
ttttctgctacaggattatagctggacagacatccgctgcccctttgaaaaacgaagagatgcagcatgcgtgttttgggacaatgtagtatacattttgggaggctctcagcttttcccaataaagcgaatggactgctataatgtagtgaaggatagctggtattcgaaactgggtcctccgacacctcgagacagccttgctgcatgtgctgcagaaggcaaaatttatacatctggaggttcagaagtaggtaaggacttcttaagtattttggtttggggcatatgctttaaagccaagtatcttggctttcatatttaaataaacagctggtattatttgtccagatactttcttggtaatttaaatatgtgtttgtcacattttagagctcatctccctgaaggtttatgtcgttgctttacaaaccattaaattacagaactttagcttcctagattaatggcccattttttttatcataatgaagcattagttgacattatctgaattatagttctaaattatttgggctgcataatattatttgttttaaagatttcagagttcaacttatagactctttaagaactcgttactatattcaggcttttaaaatttgtattatatttgctttctttttattagaaaaaagaatgctctttttcatttgttttattctttaagtttttaatgactgtagtggtatttatgcttattgagcagaatgggatgtgggtgtggatataaaaaccttattggatagtgtgttagtgtccagtagtgctctttttctaaatgaataatttttctaaatgaataggtgcaggctagatacataatagcttttgtatgctttcattttcaagtaatttctttagcttaaataatgggctaataaagaaaactagggagaccgtaaatggttatacttttggtctgcatacttatgtttttaccctcaactatatgtcaaatgaatacaagaaaaatcactatttcctaaatgtaaccatttcctctctttaaaagcattcttcacagactgttataatgtagaatatttcaaatacaataaatcctaaagatgatagacggtaactgttctgtggtactgcagataacttcatttcttcagcctttgctaagtgtgtttttagcttaagtagtagtttttttttaatctactatatactatatattttcctatagtgtccacccactgaacctaccaaatcaggaatgtttaaaaagttaaaaataagttatttttggtcatgaccattgcttcttctagttgttattttctgatctttacttttcacagaccttagttgcaacgcagaattataaaggtgttgtcgtttttaaatcatttgatattagcccagaatggtgggagatgagaaatagtttggtaacttctaaaattttttgtccttgggaaggaaaaaaaaaagcacttaaactttaatagtatcatttctaaaattttttattgaactcctacagtgtgtagaagtttcaaaacatgatgaatgtatgttttgcctttaaattgtgtaatcaaaatacatcagaaatatacatcaatattttgagaatatactcaagcagggaccagtgtgatttcaggatataccacactaactgagaatagttaggaaatataattttgttaatggtgctgtagctattccagaatattaaataagaatatgatcagatagtagttttcatattttaaggtatgggtctaccatctgtaaggaactattatgcttttccactttatataaacatttgaagtatggataattcccgtcatgcataatggggcttgaagacatatataaggcttcttatttaatttttcttttgaaatcaaatttatttttctaaagtttaattaccaataaataagtatttccaacagatccttttaaggatgttttccagggtctatacaaacaggattattagcgttttcttaaactattcctacactttgttgttgttgattgagtatgaaaatggccgtatgaccctaaattcttccttccttaactaataagatctacagtcagttctttccaaacccccgcacacactaaagttaagcatgatggggcctttttcttttacaggaaactcagctctgtatttatttgagtgctatgatacgagaactgaaagctggcacacaaagcccagcatgctgacccagcgctgcagccatgggatggtggaagccaatggcctaatctatgtttgtggtggaagtttaggaaacaatgtttctgggagagtgcttaattcctgtgaagtttatgatcctgccacagaaacgtatgtatctatttaaaatttattttacagttaactgtattctataagctctgtaggagatgtcaaaagaccagaggaacccaacagaagaattttgtccttgagtgaagagtgtatataaacttttgagtgtgctagggtcagtggcatatttatgacctggacctttcccttacaccagaaatggcttgaacttacaccccatgggaacctctttctttctggttctgcgtgcaataaatgcctatgaatgagacacatctgattgattcgtcaactcataaaatgtttttgtttgagcggtcaggaaatgtagaggaggaggggggagtttatgaccagcaataaatttatccttaagtagaaatattagatattggctcatggcattaataaatcatgcctccctagttctttttaggtgtaaacttcctaagtacatttagattcatgtttattaaataaaattattcttaaatcaactgcttttaaaaaggcaaagtgtgtcaaaaaggtaaaatgctaaagaaataactggttagccagtttttctgaccttgtagttaatgatggaacacattcaatgtagccaaaggaaatgtgctaatcattgaataatggagagggcatgagggcacgggttgtgagtagtgacattaaagctgatgaggacataaaacagatgataccctagtcgtaccttttatggaaacatccaaagagctttgataagaaaagtcacttgatcatatggctggattgcccatcgttcttcccttactagaacaagttactgggtgaatacgttcactaaaatgctatgccagagttgcatcaaaactctcgtgcttaaagttttatatttaggaaatattgccaaactacaaaacatggaagtcttcaactccagctactgctttttttaaaattaagaaataagatgccaggcatggtggctcatgcctataattccagcactttgggaggctgaggcaggcagatcacttgaggtcaggagtatgagatcagcctggccaacatggcaaaatcccgtctctactaaaaatacaaaaactagctgggtgttgtggcgcgtgcctgtaatccactactggggaggctgaagcaggaaaattgcttgaacctgggaggcggaggttgcagtgagccaagattgtgccacagcactccggcctgggtgacagagcaagactccatctcaaaaaaaaataaaaaataaaaaaataagagcttaattataaaatatgattaattatgtgcatttatctatgattcccacatatttttaaaagatttaaggaagcataatcaataacttctttccagtgcaaataatagaaaagcaagttgtcttgaaatttgtcttttgctaaagatgtttaccaactttgctcccttttatgtgaacctctaccttacttcccataaaccctaggctcaaaaagtgttacagcatactagttggaaaactgattcattctgctaattattttttatttctaaaaaatctcttaaaagagaagccataaccataaaaactctaggtttctaaatttttacatctttattcaggcactatcaatgtaaattaatattgattttttacttacttttttgttcaaagtaaaaatataaaggagttctgcagcttctgtattttttaaaactaggtgaatattcagtttcaggaatatttaaaaacttacaagacctagcatttctttcattttatatatattgagcttaaatttgaattctctatgttcccttcaatgcccttaaattttcacaaatgaaaagctagtgtgaatataattatccaactctcaaaataaatgttatattatttccttttaaaaatgttacctagtccaggtgtggtggttcatacctgtaatcccagcactttgggaggccgaggctggtggatcgtctaaggtcaggagttcgagaccagcctgaccaacatggtgaaactctgtctcgtctaaaaataccaaaaaaaattagccgggcgtggtggcgcgtgcctgtaatcccagctattcaggaggctgaggcaggagaatcatttgaacccgggaggtggaggttgtagtgagctgagatcgtgccattgcactgcagccagggcaacaagagcgaaactctgtctcaaaaacaaaaacaaaaataaaaacaaaaagttatctagccagccaagttttttttaataagaatttcttcccaattttgacattttaagtgtttgataattagaatgtgtttaattggaagctgaaaaactaagcctatggaccatagaaacacaaataacacatgttgtcactcatgtgggagctaaaaatgttgatctcatggaggtagagagtagaatgatggttatcagaggttggttaacaagtacagaaatacagttagataggataagttctaatattcagtagtacagtagggagactatagttaacaataatttattgtatatttcaaaatagctagagaagaattggaatgttcccaacacaaagaaaagatattcctcagcagcaacatgggaggcctgggttccttccctagcccaaaaagaaacaaaaggaaagataaatgtttcaggtgctggatatcccagttactctgacttgatcattacacattgtatacatgtgtcaaaatatcacaggtaccataaaaatatgtacatgtattatgtatcacatttttaaaatcagttttaaaaaagatggagaggagcagaagctcataataaagtaactgaagaaagaaagaaattatgtctatggaaacaatgtgacacagtttgagcggtcagaattttaagaaatgactttttttttttttttttgtgagacggagtctcactctgtcaccatgctggaatgcagtggcacgatctcagctcactgcaacttctgcctcccaggttcaagcgattctcctgcctcagcctcctgagtagctgggattacaggcgcacgccaccacacgggctaatttttgtattttcagtagagacggggtttcaccatgttggccaggatggcctccatctcttgaccttgtgatctgcccaccttggcctcccaaagtgctgggattacaggcgaaaaaacgcttctaaacattaaacttcagattgcagatagcggggacctagtatgtactctgcatgtgaattataggaggaaggggaatttgtgaaagttttttctaaaccttcaggagatttagatatacataaagacatgctgtctttttatatcattaacattatatttggagaagaaagtggtatgtaaatggaatttttccaagtcaaatactgtgttttaatgcatgatgatagctgagtctataaatctcactacgtgcagggcagtgaagacctagtttttactgctgtcccacttccgagctgtatgccggtcacttcacctggatgagcgtgtgtgtttttcctaaaaacaggagccatgctgtccacctcaccttaacagagaactttgaaaatgagagtggtgactgtcaaaccatttttaaaacaatacataaatgtaagacaaaagaattgttaatacttcagagttaatcattgtgccttaattatgttttataaagttgaattcatcaaattgttttttgttttttgagacggcgtctgcctctgtcgcccaggctgcagtgcagtggcgtgatctcagctcactgcaagctccgcctcctgggttcacgccattctcctgcctcagcctcctgagtagctgggactacaggcgcctgccgccacgcctggctaattttttgtatttttaatagagacggggtttcaccgtgttagccaggatggtctcgatcgcctgacctcatgatccgcctgcctcggcctcccaacgtggtgggattacaggcgtgaaccaccgcgcccggccggccatcaaattattttaaagaagagatataaacaataattatagagagttactcttatgccaagtttcccttttgttgttgtccttactgttgtttggcgtctcttggtttaagttagctgctgaaagcacaagcctgtgtgccagtaccaccttcacaatcacaaatgtcagtcttgggagtgtatgcagaagaatgtattaaatctcagaaaaaaataactaaactcgattgtctgtgtatatatgcataatgctgcaacctgtgaattaatatcctttaacacttgggtccacatttatattctcagtttcattatttatatattagtggctgtgaacagagcaacatgaggtattaaacttgacagaatgatagtacttttttgttaccagagcagcataaagttcttagtgtagatttaaagatggacatgtgaatagtaacagatactattaatttcctgattgcctgaggcccattataagtttgtgttttacttacgcatatataaataataattaaagctaggtgtgatagaactagttaatatttcctgccagcagaggtgtgaagaaagaaaaaagaattatttatcttcgaagcatcttcctcttcttttttgttcccatattacaagtttttatgaacctcaggaaatggatttcctctaaaaacgtgttttttaatagatatcctcattttcttatatcctatcagaattgaaaggaataaaatccatgttttccccgtgtattaataaattacccataatcattgttcaacttttgttttctacccttctagacattttgtgcgtatatgtacacatatgtgagtagtaaatgagcacttaattagaataatagacctttctcattagtatgagttcttttacttcctgtaaacaagcacactaaaaactttaattttttcagatggactgagctgtgtccaatgattgaagccaggaagaatcatgggctggtatttgtaaaagacaagatatttgctgtgggtggtcagaatggtttaggtatgtgatgttaattcactgttccactttcctgatgagtttgctgatacttccttaaattattgaagcatttttaaaaatctagatagaagcatttaccatgtatattattatatctatttttatagtttctgggaattaacatacttgataaaatatcgcaggatgttaaacattcctgtttatgaaatgtcgcagtagtcaccagtcattgtgacaattttagatggctcctatacattcccagatacctcctggggaatgatgtcgcaccagcttaagaactattgagcaatagaaatatttgaactttaaaaaacctttaaaaactttttaaatacaagttttaaggcttgtatccaggtcctaaatggtaaagtttcctaaatatttttaaacattgcatgaaaatatcaatattgtaatttttaaatgactaaatttggcattttgttttcataaataatgtactaaagaatcttaaataattgtcttaaatgaaagggagtcggaactgaatctagacacaagcttcaatttagtcagtactttaagcatcacttaagtgtaccagtaacttcttttccttcttctgtccctgtccattgctattttccataaagtgctaaaaggaggaaaaagaaggacatttgagtaattataatcaaagttaatcagaggggaaatcaccgattggtttattttgcatttttccagaatagataaaacatgtttaattttgtagaaaaaaatcaatatttaaaaagaaatattaaatgtctattgtgttaagagtaagaatttaggtggtggctatgtggacattcactgtaaaattattacagtttttctgtgtgtttgacatttttcacaataaaatattggaaaaatacaaaaagttattactttaagaaaccttagaattgttgatatagtttttcatgttgttcatgttttattcttttgaaggtggtctggacaatgtggaatattacgatattaagttgaacgaatggaagatggtctcaccaatgccatggaagggtgtaacagtgaaatgtgcagcagttggctctatagtttatgtcttggctggttttcagggtgttggtcgattaggacacattctcgaatataataccgaaacagacaaatgggttgccaactccaaagttcgtgcttttccagtcacaagttgtttaatttgtgttgtcgatacttgtggagcaaatgaagagacccttgaaacatgaaaaatgagtggacttcagactcatcagagactctaaaatatagccaccagtgctttgttccaggagtttggtgacaaagttttggtttggtgttttggtaaagaaagtttcaagtgaaatgaggttcctataaaatagatgtttcttttatatggatttccttaattcaaagatcatattttagctggccacaaaaccaagaacatatctagcaagaaaacttgaaaaagtataagcatttgttaaaaatgtgaatttcttgaatgaatttcacatttgtaactatgattttggcagaatagaagattggctcatcagtgaagcgcagtatcttagctctagattctattttcatgcatcacagaagtgctatacggttaggtctgtttgtgctcagtcaagaactaagaaatagtatgaattgtaagtcaagatgggcaactcagatggagcagcttagtctcacagtttgcttgtctatttattttatttagtgccaaatgtattccattttaaaagtaagccagagtgagtcaaggcatatacacactttctcacaaaacttcctaaacagatttgggggtttaatatgtccaactcctcatgaaatatattcaatccacttaaatatattccatctttttaacataaaatgtaaagcttagcacccatcattaatttatgtctctgttttatccagtggttaaaaaaggattctgcctctttagtcctcactgttaaataaaacccaatcatagtaagtgattaactagcaaaaagtaaagctatttatagcaaatttctagatcattagaaaagcactggtagttgtacaatatcagtgttgactttgaacttctttaacgagatcatgaattcttttcccttagccaaaacatgaaatatttaacctagttgtctctaaaagttttgtaatcatgagttagatatatgtcatctcctattcattgcttttatgtgatcaataaatcttttacaaacccaactactcatttccttcctagtaatactttgcctttttcactgtgtatggaatgaaacatgtaaagctgtcacaatcaatgtttttatctgataatattaaatattttttaacttaaaatag

SEQ ID NO: 1114 - DNA, 2636 bp, Homo sapiens
gttcaacttttgttttctacccttctagacattttgtgcgtatatgtacacatatgtgagtagtaaatgagcacttaattagaataatagacctttctcattagtatgagttcttttacttcctgtaaacaagcacactaaaaactttaattttttcagatggactgagctgtgtccaatgattgaagccaggaagaatcatgggctggtatttgtaaaagacaagatatttgctgtgggtggtcagaatggtttaggtatgtgatgttaattcactgttccactttcctgatgagtttgctgatacttccttaaattattgaagcatttttaaaaatctagatagaagcatttaccatgtatattattatatctatttttatagtttctgggaattaacatacttgataaaatatcgcaggatgttaaacattcctgtttatgaaatgtcgcagtagtcaccagtcattgtgacaattttagatggctcctatacattcccagatacctcctggggaatgatgtcacaccagcttaagaactattgagcaatagaaatatttgaactttaaaaaacctttaaaaactttttaaatacaagttttaaggcttgtatccaggtcctaaatggtaaagtttcctaaatatttttaaacattgcatgaaaatatcaatattgtaatttttaaatgactaaatttggcattttgttttcataaataatgtactaaagaatcttaaataattgtcttaaatgaaagggagtcggaactgaatctagacacaagcttcaatttagtcagtactttaagcatcacttaagtgtaccagtaacttcttttccttcttctgtccctgtccattgctattttccataaagtgctaaaaggaggaaaaagaaggacatttgagtaattataatcaaagttaatcagaggggaaatcaccgattggtttattttgcatttttccagaatagataaaacatgtttaattttgtagaaaaaaatcaatatttaaaaagaaatattaaatgtctattgtgttaagagtaagaatttaggtggtggctatgtggacattcactgtaaaattattacagtttttctgtgtgtttgacatttttcacaataaaatattggaaaaatacaaaaagttattactttaagaaaccttagaattgttgatatagtttttcatgttgttcatgttttattcttttgaaggtggtctggacaatgtggaatattacgatattaagttgaacgaatggaagatggtctcaccaatgccatggaagggtgtaacagtgaaatgtgcagcagttggctctatagtttatgtcttggctggttttcagggtgttggtcgattaggacacattctcgaatataataccgaaacagacaaatgggttgccaactccaaagttcgtgcttttccagtcacaagttgtttaatttgtgttgtcgatacttgtggagcaaatgaagagacccttgaaacatgaaaaatgagtggacttcagactcatcagagactctaaaatatagccaccagtgctttgttccaggagtttggtgacaaagttttggtttggtgttttggtaaagaaagtttcaagtgaaatgaggttcctataaaatagatgtttcttttatatggatttccttaattcaaagatcatattttagctggccacaaaaccaagaacatatctagcaagaaaacttgaaaaagtataagcatttgttaaaaatgtgaatttcttgaatgaatttcacatttgtaactatgattttggcagaatagaagattggctcatcagtgaagcgcagtatcttagctctagattctattttcatgcatcacagaagtgctatacggttaggtctgtttgtgctcagtcaagaactaagaaatagtatgaattgtaagtcaagatgggcaactcagatggagcagcttagtctcacagtttgcttgtctatttattttatttagtgccaaatgtattccattttaaaagtaagccagagtgagtcaaggcatatacacactttctcacaaaacttcctaaacagatttgggggtttaatatgtccaactcctcatgaaatatattcaatccacttaaatatattccatctttttaacataaaatgtaaagcttagcacccatcattaatttatgtctctgttttatccagtggttaaaaaaggattctgcctctttagtcctcactgttaaataaaacccaatcatagtaagtgattaactagcaaaaggtaaagctatttatagcaaatttctagatcattagaaaagcactggtagttgtacaatatcagtgttgactttgaacttctttaacgagatcatgaattcttttcccttagccaaaacatgaaatatttaacctagttgtctctaaaagttttgtaatcatgagttagatatatgtcatctcctattcattgcttttatgtgatcaataaatcttttacaaacccaactactcatttccttcctagtaatactttgcctttttcactgtgtatggaatgaaacatgtaaagctgtcacaatcaatgtttttatctgataatattaaatattttttaacttaaaatag

SEQ ID NO: 1115 - DNA, 546 bp, Homo sapiens
ggcatatcacagcagaggcaagaaaggctgactaggaccaaggaaaataggactttatacatggatgtgtccacatgtgtacgtgtgtataatgagagatatatcaaaatttaagaaatccttctacccatatcttttccaggctttccaattttccgcatttcacatctcagcacctaagtataagaacttgcatggaatagatactcagtaaaacttaagtgaattaaatcatatttttagggtaacagctccctgaccctgcccacacacatataccgtcccatctgtgactctactgttatttgtccatcttcttgctaacatgagaactgcatattcctctagatttccctgtagatttccctattgcagggagcaataaatagcactgccttcacctgcaagcccaggttggaactagtttcatcactagggtaatgcccaacagtcatagccactgagctgacaagactgacttcccatctattcttccccaccccaccccccgccaactacatacagtatctaggtactataatcagc

SEQ ID NO: 1116 - DNA, 282 bp, Homo sapiens
aattgttttttgttttttgagacatagtctcactctgtcgcccaggctgcagtgcagtggcgtgatctcagctcactgcaacctccgcctcctgggttcacgccattctcctgcctcagcctcctgagtagctgggactacaggcgcctgccaccacgcctggctaattttttgtatttttaatagagacggggtttcaccgtgttagccaggatggtctcgatcgcctgacctcatgatccgcctgcctcggcctcccaacgtggtgggattacaggcgtg

SEQ ID NO: 1117 - DNA, 565 bp, Homo sapiens
gtgaggaataaatagggaaaggggaaaaactggaagggggaatcattaggacccagctgcacagacatttgcagctaaaggagtggagatccagacgatctccgtgggactgggagcagctgtgtttaggattgacactgggggaacaggcagagggaagcatggtcttggcattggcagttttcacattgttggcttctgtctgttgccagcttcattctcattctttctatccttgtatgtcctgtttttactcttcattgtcattttagtgggtttccaggaggcagcagtgataaactgcatgcgtttagtatgccatgttttcctggagatcccactgactttactttcagtaacagtggttttcatttgccaactctggtgtttccccaccatgcaggtaagatagttaggctctaaacctattgaaatctggggttttcattttcatagggcacttatttatccttattcatatatgggaagtttatctctctgtgccaataggcagagtttttggctcatttttatggagtttttagctataagagagaacttgctt

SEQ ID NO: 1118 - DNA, 902 bp, Homo sapiens
gtgaggaataaatagggaaaggggaaaaactggaagggggaatcattaggacccagctgcacagacatttgcagctaaaggagtggagatccagacgatctccgtgggactgggagcagctgtgtttaggattgacactgggggaacaggcagagggaagcatggtcttggcattggcagttttcacattgttggcttctgtctgttgccagcttcattctcattctttctatccttgtatgtcctgtttttactcttcattgtcattttagtgggtttccaggaggcagcagtgataaactgcatgcgtttagtatgccatgttttcctggagatcccactgactttactttcagtaacagtggttttcatttgccaactctggtgtttccccaccatgcaggtaagatagataggctctaaacctattgaaatctggggttttcattttcatagggcacttatttatccttattcatatatgggaagtttatctctctgtgccaataggcagagtttttggtctcatttttatggagtttttagctctgtgagagaacttgctttatacaggggtttcacttcaaaatttctgcctcggccgggcgtggtggctcacgcctgtaatcccagcactttgggaggcccaggcggacggattatgaggtcaggagatcgagaccatcctggctaacacggtgaaaccctgtctctactaaaaaatatgaaaaaattagccgggcttggaggtgggcgcctgtaatcccagctactgagaaggcggaggcaggagaatggcgtgaacccgggaggcggagcttgcagtgagccaagactgcgccactgcactccagcctggacgacagagcaagactccgtctcaaaaaaaaaaaaaaaaaaaa

SEQ ID NO: 1119 - DNA, 4813 bp, Homo sapiens
gcgcggttgtgagtagtaccgggagtggggtgatcccgggctaggggagcgcggcggccgcgatcgggcttagtcggagctccgaagggagtgactaggacacccgggtgggctacttttcttccggtgcttttgctttttttttcctttgggctcgggctgagtgtcgcccactgagcaaagattccctcgtaaaacccagagcgaccctcccgtcaattgttgggctcgggagtgtcgcggtgccccgagcgcgccgggcgcggaggcaaagggagcggagccggccgcggacggggcccggagcttgcctgcctccctcgctcgccccagcgggttcgctcgcgtagagcgcagggcgcgcgcgatgaaggcggtgagcccggtgcgcccctcgggccgcaaggcgccgtcgggctgcggcggcggggagctggcgctgcgctgcctggccgagcacggccacagcctgggtggctccgcagccgcggcggcggcggcggcggcagcgcgctgtaaggcggccgaggcggcggccgacgagccggcgctgtgcctgcagtgcgatatgaacgactgctatagccgcctgcggaggctggtgcccaccatcccgcccaacaagaaagtcagcaaagtggagatcctgcagcacgttatcgactacatcctggacctgcagctggcgctggagacgcacccggccctgctgaggcagccaccaccgcccgcgccgccacaccacccggccgggacctgtccagccgcgccgccgcggaccccgctcactgcgctcaacaccgacccggtgagaggccgggcgccggccgtgggcggacgccgcgggggatgggaggttggtggcgtggtggcgggacgcgggcgctcaccgtcctccgggcaggggcgggccaggaatgacagccccctccccctgctcctccgggctcccccgggccgccagcagccggccgggctcggcgagcgcgggtccgggagaacgcgcagggcgggactcggggctgtgggcgccctgggctgtcaagtcccgcctgagcccggaggggcccccccggctacaggctggggtgggggcgtcggcgcgccagcctgatttccgaggacaatccaggaccgtgtcgagcgcgttgtttgcgcctgctaacctttcccttggtgttcggttgctgttccaggccggcgcggtgaacaagcagggcgacagcattctgtgccgctgagccgcgctgtccaggtgagcgcgcatttcccgtctcgggtggccggtcaccagagacgcccgtccccgagggcttccggggccaggcaccgcggtgttctttgcccccagcgtttctgagagcaaactcccaaggaagtaaatcccctctctccctgccacctaagtagcaagtaaacccgtacttagccttagaactcgaggttcagtctcggtggagacgggtcagcccttgtccccgccgtccccgtgttttttctggtggtcagcgggctcttctgccttccctagttcccgagggagggcaccctcgtgggcatgggagctgccccggtgtcctcccgtgcagtctgtcacccacaaagggggacgcgggcagggcgccggagtgggtcccctctccgggcttcccgagggccgcagctgcctgctcggcgcctggcccggccgcgggcgggtgttgtctgacctggtggtttgttttgggttgttgatcaagcatgtcttgagtttggtcggtggcgccagttagtctgcagcgagaaggttcacacaccccctctattcattcctcttccacaggtgtgcggccgcctgagcccgagccaggagcactagagagggagggggaagagcagaagttagagaaaaaaagccaccggaggaaaggaaaaaacatcggccaacctagaaacgttttcattcgtcattccaagagagagagaggaaagaaaaatacaactttcattctttctttgcacgttcataaacattctacatacgtattctcttttgtctcttcatttataactgctgtgaattgtacatttctgtgttttttggaggtgcagttaaacttttaagcttaagtgtgacaggactgataaatagaagatcaagagtagatccgactttagaagcctactttgtgaccaaggagctcaatttttgttttgaagctttactaatctaccagagcattgtagatattttttttttacatctattgtttaaaatagatgattataacggggcagagaactttcttttctctgcaagaatgttacatattgtatagataaatgagtgacatttcataccatgtatatatagagatgttctataagtgtgagaaagtatatgctttaatagatactgtaattataagatatttttaattaaatatttttttgtaaatattatgtgtgtgtttttttttaatctatgggaatatttcttttggaaaatcatttttcagctcaattacagagctcttgatatcttgaatgtcttttctgtttggcctggctcttaatttgcttttgttttgcccagtatagactcggaagtaacagttatagctagtggtcttgcatgattgcatgagatgtttaatcacaaattaaacttgttctgagtccattcaaatgtgtttttttaaatgtagattgaaatctttgtatttgaagcatacatgttgaaaatacaccttatcagtttttaagtacagggttttatagtgtaatatatacagagtaagtgtttgtttttgtttttcaactgaggtcaaaatggattctgaatgattttgcatatgggatgaggaaatgcttggatccttaaggagtttacgaaatctgctgttttatcaaagtgaaaaaaaattgcttattactcttcattttacactaaagcttaatgtcactaagtttcatgtctgtacagattatttaaatcatggaaatgaaaaaaatgttctctgcttgctaccaaaggacaaactcttggaaatgaacactttctgctttccttcctccaaagaattaataggcaacagtgggagaaaaaaaaggcataatggcaaatccttcaagcagggataaaagtcgatcttcaaacattaacttaagcagaccaaaaattctgatgaccgcatctagattatttttttataaaaatgattttcactatagctatgttacgctaagctactgtccaatctcttgtgatgtgtaacttttacatgtgaatattaaagtagatttctctgtcttgtactgtgatttctggtctcatttctttaaaaccttactcttatttttcttttaaggctcttttttctccttaaggaaggtaatattttctaggttagataggactatcagggtttgtgaacattatgcatttaatgttatgggtactttacacacaagttagatggaatttttagagtgaaagaattaagtaggatttaattgggtgctttgtaaatagtcaactgtgtgtataacgtggtctgtttgatttttaaaaggaaaggatttgtttcagattatacaagaataaaagtattatagacccaagggacttcttatgaggtcaaattcagatatttatatgaatatgaaataccatggtccctagtagtcagttgaagtggcaatgtctaaacagaaatgaacaaaactaatgctagcaggttaaaatcaatcaaaatgtttaaaaattgattctgtcctcagcatgttatttcctcagctctgataatttactggtcttgagtattttgagaatttgatgttgaacgttataaagtcaaagaactgcttgtttagatgaggtttatttttatttttgatattattcattcttgtcacacatcaagaagaaaacactagagtgctgctggaattccaaatctgaagaattctaacgactgcattctttgttattaaaaagggcacaatccttcctttttatttggcagtttaatttcagtaggaagcatgtcacatgtgcactgttggttagaattatgcatctgtcatgcctgactgctgaaccctacctaagccttttggcgcagtttaaaacttatactggtggactgtgaacctcaaaacaaatgggtatttttgggttttgaggatagatgttactccttaaagtttgtatttggggcatgaaaaactactgaaagaagaaaagtgctacagatactacatttcaaagagttggcattttccctttggccactcaagcagcatttgatgtatctaaagaaacaaagtcattgtttattttttaaaaaattatatgcagttgtacaagatactacattccattgaaatgttggctatgtcctaaccaggcaaccagataacaaaaacattttgagtcttttatctaggtagttctaattattcagctacttagtttaacaaaggaaaatatcctgacttctctcatttcatttgtagacttttcattgtataggcacaaccaaagagtcagactggtttaaaactccagaaggaaaaaaagtatcccacacagtggatgttgtttctaagaatgctacaaaatcctgacatctcagacatctcaatgttaaaggaagaaaaaaaataccttttcatttcaaagaactaatatactttgatattgtgtaaaccttactcaagtttattgtcaagctttaactgcctttttagaactttttaaaatttcgagcccacaaatctattgtattagttgccttctataacaataaatcttcactgagcaaaaggc

SEQ ID NO: 1120 - DNA, 509 bp, Homo sapiens
ttgctaagctttagcattttttaaaaagaaaacggaaaggctacacattccattccatcattatggtttcggcaaatgtgaaaaggcgaataatgaaacggaggagggaaatatagaacagaatgaacgtgccttcttgaacagcgcgtctttcttaaggcactggaatcccacggatggagtgatgggtggcggagggtccctgggcgccgtgctattaggagtggcagggtatccgcgagcagggcccaggcgctccctcagcagcctagtcgggataaggggggcggtggagagtgaattccggccgcacattcccgcagttcttcgcaggaacttcgctctctcttttcccctcccttgggcacacatcagcctggcccgactcccactcagctctcttttctcagaaccccgacccacagcgttgacggaatggagtgcccttcccattggcccgagcgtcattccccgaggtggcactgcccgcctgattggctggccactcc

SEQ ID NO: 1121 - DNA, 2017 bp, Homo sapiens
gattttactgtttaatagtacaaaatttttgcaaaattagcagataatactcatcatttctaacttctgaaatcttttgtttaggtgagacatggaatccattaaaattgcattatcagttaagaaatgtacgggaacgattagctaaaaacctggtggaaaagggtgtattgacaacagagaaacagaacttcctactttttgacatgacaacacatcccctcaccaataacaacattaagcagcgcctcatcaagaaagtacaggaagccgttcttgacaaatgggtgaatgaccctcaccgcatggacaggcgcttgctggccctcatttacctggctcatgcctcggacgtcctggagaatgcttttgctcctcttctggacgagcagtatgatttggctaccaagagagtgcggcagcttctcgacttagaccctgaagtggaatgtctgaaggccaacaccaatgaggttctgtgggcggtggtggcggcgttcaccaagtaactctgctcggggtgaaccattctcctttctctcaagtaaaccagtagtttttcttctgttgacttctggttttctgtaatttgtactttcccacactataattggcttctgttttacaaaatggtgggtggctttttcttttttgtacgtgtacaggattctgctggtacgagaggccttcctctttctgtttttaaaaaaagttttactgccatattggcattccattccctgttgccatcctcactgttacctgttttgggtttctggtctactttgactttcaaagtacctccagcctcctcatacgcacagcttttggatgacctcagcttgagtttctccatatgtgcatgtacatctagcattctgcctacagttcagacagaagtcacaaaaaggccttcaactcaccaaaggtaaatatctgtatctattaggacattttttacatagacttcagttgagatgtatacttagcaaaattatttttaaattgaaacagcacagtaaatacttaatataaaatgtcccttggattttgcttcccatgtaaatctattgtattattacacttgttataattttaactataaaggtccaattgtttcacagagccagtttgggatgggctgcattccatttatgctgtatatagtttgaattatatataaattaccccttcttctggccacccctgctcccatcttagtattttgcaagatctaatcagttgtacacctggtgcccctcgcttgcttcaatcatggttatttgatggcaaaatcgacctcttgtcgctgaaggagagagaaaagatgtgtgtctgattggtcctgggattttttgagctgtgccatttatggtactctttgcctatgcatcccctttttagattttttttaaattttatcttactgtttttataatttctattgggaagaggcttgtgaccagtaccaatcttgagtttctttttctgtccacaagtaaattaatatctgctctgaaatgtcatttatctactcacacattcttggggaaaaaaatcaaatgtcagtcctagcagatgttgcatgtaaattggtagcaagtaatgattacaacccagaggattaagaattttgtaacagaaagctctatgttttaattttttatatacaattaggataattagcattgtcagactataaacctttgctttttaaagtttatttttactatttctttatcactttattgtatcatcaccattggtttcataatgtaaatactatatgttgaacaaattaaatgtcaaaattttttattaccatagtccatgttaatagtggggctttcaggtgtttagagattttttttgttgttgttaacattcattgcaaaagtactagatggtgtataactctagagttgaattttaagggattccctaatatgtatactatctttttatctgaagtaataaataaacaatgatcttgaaagtgcctgaatcagagcaagca

SEQ ID NO: 1122 - DNA, 2017 bp, Homo sapiens
gattttactgtttaatagtacaaaatttttgcaaaattagcagataatactcatcatttctaacttctgaaatcttttgtttaggtgagacatggaatccattaaaattgcattatcagttaagaaatgtacgggaacgattagctaaaaacctggtggaaaagggtgtattgacaacagagaaacagaacttcctactttttgacatgacaacacatcccctcaccaataacaacattaagcagcgcctcatcaagaaagtacaggaagccgttcttgacaaatgggtgaatgaccctcaccgcatggacaggcgcttgctggccctcatttacctggctcatgcctcggacgtcctggagaatgcttttgctcctcttctggacgagcagtatgatttggctaccaagagagtgcggcagcttctcgacttagaccctgaagtggaatgtctgaaggccaacaccaatgaggttctgtgggcggtggtggcggcgttcaccaagtaactctgctcggggtgaaccattctcctttctctcaagtaaaccagtagtttttcttctgttgacttctggttttctgtaatttgtactttcccacactataattggcttctgttttacaaaatggtgggtggctttttcttttttgtacgtgtacaggattctgctggtacgagaggccttcctctttctgtttttaaaaaaagttttactgccatattggcattccattccctgttgccatcctcactgttacctgttttgggtttctggtctactttgactttcaaagtacctccagcctcctcatacgcacagcttttggatgacctcagcttgagtttctccatatgtgcatgtacatctagcattctgcctacagttcagacagaagtcacaaaaaggccttcaactcaccaaaggtaaatatctgtatctattaggacattttttacatagacttcagttgagatgtatacttagcaaaattatttttaaattgaaacagcacagtaaatacttaatataaaatgtcccttggattttgcttcccatgtaaatctattgtattattacacttgttataattttaactataattgtccaattgtttcacagagccagtttgggatgggctgcattccatttatgctgtatatagtttgaattatatataaattaccccttcttctggccacccctgctcccatcttagtattttgcaagatctaatcagttgtacacctggtgcccctcgcttgcttcaatcatggttatttgatggcaaaatcgacctcttgtcgctgaaggagagagaaaagatgtgtgtctgattggtcctgggattttttgagctgtgccatttatggtactctttgcctatgcatccccttgttagattttttttaaattttatcttactgtttttataatttctattgggaagaggcttgtgaccagtaccaatcttgagtttctttttctgtccacaagtaaattaatatctgctctgaaatgtcatttatctactcacacattcttggggaaaaaaatcaaatgtcagtcctagcagatgttgcatgtaaattggtagcaagtaatgattacaacccagaggattaagaattttgtaacagaaagctctatgttttaattttttatatacaattaggataattagcattgtcagactataaacctttgctttttaaagtttatttttactatttctttatcactttattgtatcatcaccattggtttcataatgtaaatactatatgttgaacaaattaaatgtcaaaattttttattaccatagtccatgttaatagtggggctttcaggtgtttagagattttttttgttgttgttaacattcattgcaaaagtactagatggtgtataactctagagttgaattttaagggattccctaatatgtatactatctttttatctgaagtaataaataaacaatgatcttgaaagtgcctgaatcagagcaagca

SEQ ID NO: 1123 - DNA, 2017 bp, Homo sapiens; identical to SEQ ID NO: 1121

SEQ ID NO: 1124 - DNA, 1584 bp, Homo sapiens
caagagaaaattttataattatgataggactcctagctcttataagaagtggcctttataatgccacctttagtacttttcagcattctacaggtggacaattcaagaactatatttgtaaaataatgttttaaagagagccaacggtaaaggcaggaaatcactcaaaacattttgtatgttccagagactactcaaatattaatcctgttttcaggagtaacttcgtaggcgtggaaaagatttttgtttatttagaccaattcattatttattaacttcattcaataaatagttacattgtacctactacatgccaggcactatgttagtgagtttgttcactcagtcagccagctctgtaacatggaaagaaatgggaacaatttcacctatctcatagccacctgaaatagctcagcatagatagttttctgttcatttgcttctcaggctgttccctcactcactcattcactcattcatttgcttattcatcaagtacccattgagggcattctgggtgctgaaccctgtgctgggtaggcactgtgcgggtgtgagttgtgttctgaagggtgaaggctgaggatcttgagagcccagaggagggatccagcccgacccgagggaccaggaagagtggtctggaaccagcaccctttggacctaggctagaggccgagcaggaaccattgaggagagaggcaggaggtcagtggcccaggcgggaaccctcacacccaagccccaacatttttattttgttttgggaaatgtataggattaaagtaataactggaaaggaaataaatggaaacacggaatggaaacatttcctattttccctattgttatctgaagacaaacttaatttttatgttgctactttctctcttaaatatcctcttactaaatagtctgtcgtattaattagactgggtagtcctaactcaagaaagcatttggcaattaaaagatggaggactcagggtctgaccgttttccttggccttcatttggctttctctctcttttctcccctccttcttcccaggcctggctggctggtgcctggacaccatttggggctctgagagggttgtggctgccagcccccagtcgccaatgcctggtcaggcactcgtatcccctgtcctgttcaccatttctcctttctcattgttctcataatttgtcctgcttaaaactcctaggttctaagggacacccctgcattgcttgcctttcctttgctagacaccagagagaggctaaaaagtgaaatgtggcctggtgcagtggctcatgcctgtaatcccaacactttgggaggccaaggcaggcagatcacttgaggtcaggagttcaaggccagcttggacaacacgacggaatcctgtctctactaaaaatacagaaattagccaggcatgatgacccatgcctgtagtcccaactacttgggaggtaggaggatggcttgagcccgggaggtcaaggctgcagtgagctgagattgtaccactgtactccagtctgggtgacaaagcaagaccctgtctcaaaaaaaaaaaaaaaaaa

SEQ ID NO: 1125 - DNA, 1876 bp, Homo sapiens
caagagaaaattttataattatgataggactcctagctcttataagaagtggcctttataatgccacctttagtacttttcagcattctacaggtggacaattcaagaactatatttgtaaaataatgttttaaagagagccaacggtaaaggcaggaaatcactcaaaacattttgtatgttccagagactactcaaatattaatcctgttttcaggagtaacttcgtaggcgtggaaaagatttttgtttatttagaccaattcattatttattaacttcattcaataaatagttacattgtacctactacatgccaggcactatgttagtgagtttgttcactcagtcagccagctctgtaacatggaaagaaatgggaacaatttcacctatctcatagccacctgaaatagctcagcatagatagttttctgttcatttgcttctcaggctgttccctcactcactcattcactcattcatttgcttattcatcaagtacccattgagggcattctgggtgctgaaccctgtgctgggtaggcactgtgcgggtgtgagttgtgttctgaagggtgaaggctgaggatcttgagagcccagaggagggatccagcccgacccgagggaccaggaagagtggtctggaaccagcaccctttggacctaggctagaggccgagcaggaaccattgaggagagaggcaggaggtcagtggcccaggcgggaaccctcacacccaagccccaacatttttattttgttttgggaaatgtataggattaaagtaataactggaaaggaaataaatggaaacacggaatggaaacatttcctattttccctattgttatctgaagacaaacttaatttttatgttgctactttctctcttaaatatcctcttactaaatagtctgtcgtattaattagactgggtagtcctaactcaagaaagcatttggcaattaaaagatggaggactcagggtctgaccgttttccttggccttcatttggctttctctctcttttctcccctccttcttcccaggcctggctggctggtgcctggacaccatttggggctctgagagggttgtggctgccagcccccagtcgccaatgcctggtcaggcactcgtatcccctgtcctgttcaccatttctcctttctcattgttctcataatttgtcctgcttaaaactcctaggttctaagggacacccctgcattgcttgcctttcctttgctagacaccagagagaggctaaaaagtgaaatgtggcctggtgcagtggctcatgcctgtaatcccaacactttgggaggccaaggcaggcagatcacttgaggtcaggagttcaaggccagcttggacaacacgacggaatcctgtctctactaaaaatacagaaattagccaggcatgatgacccatgcctgtagtcccaactacttgggaggtaggaggatggcttgagcccgggaggtcaaggctgcagtgagctgagattgtaccactgtactccagtctgggtgacaaagcaagaccctgtctcaaaaaaaaaaaaaaaaaaaaaaagtgggccaggcacagtggctcatgcctgtaatcccagccctttgggaggctgaggagggtggatcacctgaggtcaggagttcgagaccagcctgacctacatagtgaaatcctgtctctactgaaaatacacagttagctgggtgtggtggcgggtgccttgtaatcccagctattcaggaggttgaggcaggagaattgcttgaacccgggatgcgaaagttgcagtgagctgagatcatgccattgcactctagcctgggcaacaagagcaaaactccatctca

SEQ ID NO: 1126 - DNA, 1876 bp, Homo sapiens
caagagaaaattttataattatgataggactcctagctcttataagaagtggcctttataatgccacctttagtacttttcagcattctacaggtggacaattcaagaactatatttgtaaaataatgttttaaagagagccaacggtaaaggcaggaaatcactcaaaacattttgtatgttccagagactactcaaatattaatcctgttttcaggagtaacttcgtaggcgtggaaaagatttttgtttatttagaccaattcattatttattaacttcattcaataaatagttacattgtacctactacatgccaggcactatgttagtgagtttgttcactcagtcagccagctctgtaacatggaaagaaatgggaacaatttcacctatctcatagccacctgaaatagctcagcatagatagttttctgttcatttgcttctcaggctgttccctcactcactcattcactcattcatttgcttattcatcaagtacccattgagggcattctgggtgctgaaccctgtgctgggtaggcactgtgcgggtgtgagttgtgttctgaagggtgaaggctgaggatcttgagagcccagaggagggatccagcccgacccgagggaccaggaagagtggtctggaaccagcaccctttggacctaggctagaggccgagcaggaaccattgaggagagaggcaggaggtcagtggcccaggcgggaaccctcacacccaagccccaacatttttattttgttttgggaaatgtataggattaaagtaataactggaaaggaaataaatggaaacacggaatggaaacatttcctattttccctattgttatctgaagacaaacttaatttttatgttgctactttctctcttaaatatcctcttactaaatagtctgtcgtattaattagactgggtagtcctaactcaagaaagcatttggcaattaaaagatggaggactcagggtctgaccgttttccttggccttcatttggctttctctctcttttctcccctccttcttcccaggcctggctggctggtgcctggacaccatttggggctctgagagggttgtggctgccagcccccagtcgccaatgcctggtcaggcactcgtatcccctgtcctgttcaccatttctcctttctcattgttctcataatttgtcctgcttaaaactcctaggttctaagggacacccctgcattgcttgcctttcctttgctagacaccagagagaggctaaaaagtgaaatgtggcctggtgcagtggctcatgcctgtaatcccaacactttgggaggccaaggcaggcagatcacttgaggtcaggagttcaaggccagcttggacaacacgacggaatcctgtctctactaaaaatacagaaattagccaggcatgatgacccatgcctgtagtcccaactacttgggaggtaggaggatggcttgagcccgggaggtcaaggctgcagtgagctgagattgtaccactgtactccagtctgggtgacaaagcaagaccctgtctcaaaaaaaaaaaaaaaaaaaaaaagtgggccaggcacaggggctcatgcctgtaatcccagccctttgggaggctgaggagggtggatcacctgaggtcaggagttcgagaccagcctgacctacatagtgaaatcctgtctctactgaaaatacacagttagctgggtgtgggggcgggtgccttgtaatcccagctattcaggaggttgaggcaggaaaattgcttgaacccgggatgcgaaagttgcagggagctgagatcatgccattgcactctagcctgggcaacaagagcaaaactccatctca

SEQ ID NO: 1127 - DNA, 2595 bp, Homo sapiens
caattatgtttgaaaataggatttgcactgctttattttaggtggctgggagttttgattgcatattttgttatagttcatagttggaaatatttgcgtaaatggttttcaacaagcctgaaagtaatttcaagaatgtttcagttatagaggtaaaatttgcacacaaaacatcttaggcactttttaacattctcaatcatgggaattttaacttttgggatttgttgaaatcttttttattatccttcacaatttcaatgcttcttttagtcagaaatgattcagggttatttgaggggaaaaaaccccatagtgccttgattttaattcaggtgataactcaccatcttgaagtcattgtccggtttccgtagcagttttgaaaccttagtacctttttaacagcatgtgggtgtcagtgtcattattagtctcctaataagttcctctgaagactgctatcagtctcttggactggaggtacaaataatttagaaataaaagatgataacctaacactatcatagttattaatgtgatcctaaaattgtttcctaaatcagcatttttctttagtcatttaagaatttaccagaaatatttgctcaatatgatcttgatattcctacaaagaaaaaagaaggggtagggatttggctatgccttcactacaacattagaatattgtaactcacatgccttctaaacgtgaactaagatttcctttggcaatatcatattctaaaagtaataaattccaatacaagttacatacatttaaaaaacattttacagattttatggtactaatgaaatttacagtgatagaacaaaagaggattagtagaaaatacattattagaatataaaaaatgttattactgaggaaagggaggagaggacaagtgtaataaatcaaaattgacctcaaaagaaaatgtgtaacagagttgaggttgttaaaacagaaaaggttctgaataatgaagattaacctaatgcagaattgctaggtaaagaggtcaggggaatgctaagccagttcttaagacttctctgtcctctgctttgctgttatccttaaggcatatactttgtctttctgcagaaaattctacctggctacaattactttgaacattaatgttgaaaaagaaaacaaccaaagaaaattggtacttacccttctacaaaagaagtgtgactagatatcaatcagtaattaacatatcaaggagctcttctagctaaatgaccatccagtagagatttcccacattcccatgaatatcaagaatagttgtcagaatatgtatgtacctgagcatatgtacacagacaagggggatgttgtggaatatggcaatagcattgttcttctcccctttcaaattgcctttcttgaccttatgccattccatatatatctgagttgtgcctcatttatttattggcaatacctagtgatacggatttagctaacaaaagatatgaagaactattatattgaggcctgtcctctacataccacacttaaaagatggtgaactgtgagtactacttaggttgacagcaacaaagcataagacaagccccaggtaaacgtctaaactgtttactcacattgtcctactccagccccttcaattatttcccatctccacaaatagtcgggggaaaaaattaaaattttcctttatgattcttactgttcttcgcagctcatcttttcctgcttagaattaaccattgctaatttaaaggagcagctagctgcttttctgtcagtctgaagcgtagtagtggaagaggtagtaagcaccagctgcctctttgctgctttgttttcctcctgattctcttaaatttgggttgcaaagctatcccgccccccaccctgccccatgaaacttgagcattcaaatgaagattcagcagtgtctgttcttcatttctatagccaaagctgttagttaaaatcccaaatctatagcatttaaagataccaaatagaaacaccttccagctttaaaaaaaaaaaaaaaaaagtcttccctctgctttattctcactttcttaaaaacacttattctgggtggtactttttaggtaagaaactactgagtttcaggaaaaatgctagctactctgcagttaccgtgctttggacttgcagttatcatagttttgggagagtcagtattgtttaacaaatgcaagtgagaactagaagggttaataaagttgctccttagagtggtgtcaaaccagaaccgagacacttaaaaagtacttcattttttgaatggaaaatattggagaaaagtatgggagatgcaggtagcatgtgagtaaatactacggtctagccttcgagcatcccaaattccgggggtaacttgacagtgctgtgctctcctttgtcatttatatctggcttaggaatggaatagtaataacaagatgccagtgatttggaatagtttgttatagaacattcagtgcaaaatagtgaaaatgtttggtcttcagaagtgctgtagttgttggtcattgccttaaagcagtctgcttgacgctaggagcactgaa

SEQ ID NO: 1128 - DNA, 3998 bp, Homo sapiens
gaagggagaagaacccttgttcaggaagccttagaaagggatccttaaaatagtactctacgcagacaagtgaaaattcttttaaactggatattactcaacatgttttcagatgtttccactacattgaggcaaactttttaaaagtggaatgcaaatagcattttactttagtatttctgcttttttctttctgtttctttggtaattgaaagtttgttgatgaatatttgtgtaaaacgcattcaagtctataacctttccaattacctgtggcccttagtcccacaggagtccctgttggaagggggtaaacactggatattaatgttgctgagtgagtctttctagccaggacaagctgattggaatttttgaatggtagagaagaaacagcacaaaggcacttgccattttaagtgtttggagaaagagaaccttttaagtttggattgggtgagctttcttctaaaaggagcttctgaagtaattgcaaaggaatagaatcgactatttttatagtatatttaatatatttgtatataactataataggaaccctctacatgcctcccacttttctaatttacttccccttttgccatagcactagtatagcctcatccgcatgggtaatgtgcctattgtcagcctaccaaaagatagtgctgctgctttatgagacaggtgagaagacccaactctcatgcctggggatcctttacggaaggaatagcacacacttttaaaacaacataccacagtctaaaagcatcattttgaaatgtaacaagcactttattgcaattactcattttgataaagtttattcttaggcgttaaccatttctaaaggatccccaaatcatcacttacttaggtgaaattatataaaatgacacatttctgagaaatgtttaggtccagtgaaccgtagttggtttatgggagtgatttcaagatagccaaatgaactttgatttttgttttgaatgtggtggagtcaagagattgtagatgcctagtttgatttaaacactattgtaaacctatcttgcctattgtgtggacaccaaaagagaccaatgagcctgtttatttttcagaggtctaggaaaattgcatccgtgtgagtagatgtacagaactaatctaaaagtgattgctagtaacattttagaatataataatttcaagaattattctgagtgttttaaatgtgccctgaaatgttggcatgtcatttcagcatttccatttgaattgctcttgtaatatttttgcacaaaaaggactgagaaaaagaatactttggttaaaggaaaaaaatagtataatttggtctttaattttaatgtctcctgtggaaacactggggatgaattttgttggcacagttattcaggatatttaaaacagtgttgaacagttcacaagaaattaagcaaacttggattttaaaaattaaaatactttctttccatgtgactgttttgcatagttttttccccctatgtcataacactacattccttgtttttcttaaataaaatactctgcaggttttgttgtgagtgtttataacagtattttgtaagctgcctgggtttcctcagggaaacattatttagtggaataggatatagtttatggagagacaactaagtgaaattccatcaccaccaccagcaaacactgaggtgctgcattaagtgacaatcaaactagtaagtatttatgaaagaatttagaaaggggttcaaagaagcaattgcttttaaagcagttctctggggttcttgaataaaaatggctaaatgtatttatttatattttaaaatacctgtgtgttctgttttctcatcaaagtgatttcggtgtcatgtatttaatgtgtggtttgttttgttttgcaccatattcttcttagggaactggctctgatttggggtgcagtcaccaactctcatgataatctttacggacagtctgaatctactttacttcaggacggcagtggaggggccaactccagatgcccctgcacttccctcctcaagtcatctaagaaagaattttagaaataactcctttcaaatctgattcatacagttccaacctttttctagtttcacttgctgccttctttgttttatgggcactttttgtgtgattacttccccaacacagtcaaaggccagtatgacagaaccaatggcacatgatgcctctattttgcccatttggggaaatgttagtaaaagaaatagcatcttttaatggctgtcattatcatatccatattaaaatccatttaaagttcttaaatttggcggaataatgtatacaggctgtaaacttctacaaaaaatgtttgctgtctttaatatggtgtcaagttacttggtcctttgaaaacaaaacaaaacttccatacacagcactgcccagtaaagcagtgttggaatattggaaacctagacatttgaggatccttcttgctcacaagcattggaacagaatcctccactttaggactcagagaagctatggagtcccacaggctaggtatagcacacaacttagagaacggtagttaaagcacgtcaaccacaattgaatttaatgatctaaaaaatatttcttaactctgagggttaaactgaagatacgttttcaaataaaagcttttaaatttcttaggaaacaaactgtgacatcgcttttaaaaatgacattcaaatgtttataatgtgtgtttttgagttggcttggactagtgcaagttcactgctggcaatggttatgccagtagttaagttaaaataagttgttaccttcagattgatgtcttgtataaccagacaatcatcttcaagcaaaaaaattggccaggaaatgtctttttaaaaaaaaaaaaaaaaaaaaagatgtgtcagccagaacagttaccattcagaccatactggaatgattttgaaatctttactatggtttaagttggggaaggcctcagtatggcattttcatattcactctatgtaaagattgaagcccaaagatgagttaaattcagtgctgtattgaaccagtcagtgcaaaaaaaaaaaaaaagtttacctttgtaatttttcatggtaacatcagttggtagtgtttaaaacatgcaccaaatcctttataatgttctgtgtggtcctcaatgtgatattcttgacattgctgtccttactgcttggttcttggttttaaattaaaaagtagatgtagctcatcatttttacttccaaaacggtggagctaaaaacggctaattgatcttgagataagaataccctttactaaggcaaagatttaattgaaatccaaaatgatttatagaaacgaaaggcattttccatttgttgtcttctgccgaaattctgaattgcatacacacatgaaggataatgaatggtttcaacggtgctatattaggttctctgattttcatgacctatgtatgtttggaaatacaatattgtataaaatgtggatcgttttgttaccgatttaatattgccattttaatttggtgtaacaattggttacacttgtttttcaaagctatcctttgaggagaaagtcaaaatgtgttgttagcctacctccactcaggcctcttgctgtgtaatcattattccaggttatgatgtgcatagcttttaaaactgcgtgtactattattctgctctttcccatactcttgtcatgtattcagaacctaaacttatagcaaaagagccaagcagtagcagtttttgtaaatgtaaaaataattagatccagactttgtttccttcaattttaaaaataaaaaatacctcagtgctatgtttttcagttatcacctgcatttctcaaaaaataacacctgcttcatgtggcacataacttgtaagaatcacattttggattttaaagaaagactattaaatattttaagatcactatcaatg

SEQ ID NO: 1129 - DNA, 777 bp, Homo sapiens
tttttagacttctaggttgctccatgggaatccctcaactcaactcattctctctgctgcatttcctctacaacagagcaccttccctcagtcacatcaccagcaacatcagtctcagcaacagcagcaactcagccggcacaggactgacagcttgcccgacccttccaaggttcaaccacagtagcacacgtgcttcctctcttgacatcaagggaggaaggggatggcccattaagagttactcagatgacctgaggaaaggagggaaagttccagcagtttcatgagatgcagtattgagtgttctagttcctggaattagttggcagagaaaatgctgcctagtgctacagatgtacattaaataccagccagcaggaggtgatcataggggcatagccagttctgacagtgttttaggtgcctggatattttttgatggaaaaagaatatattgccaaatattaagaagctcagctatgaaatgacctccagggaatcagaaaggcactaatgatgttagtaacttttagtggttctgtgcctcttatcaagtgttacagaggacataccactgccatgtcaggggtttgcttacagtgatgccatgaagacagtccagtagacttggtagcgaccccctcccccaacccctctcccttttcagataatgatggaacagtaattactttcagaatgttgtgtgggttcaaattctctatgtacagatgatgtaaaaatatgtatatgtctagataaaaggagagaaagcaa

SEQ ID NO: 1130 - DNA, 3089 bp, Homo sapiens
ggggggtagtcggtctataagcctcgcccgttccgctccctggggcttccccgagcgccgtcggtggtcatggctgccccagcctcccggcaggtccgacgcagagcccgggcagcgccgcggccccgctcggccgaggattggtggtgggaccggctggcgccgaggggctcggggtaccacctgctgcagtccgacagcatgctgctggtgctgtctgaaccaggccccgcccggccccgcgcacagcggcgcgattcccgccgcattccccggcagccgccccggggccccagcgccgcggccaagcccaaggccgggctcaggtccgaggcggcggccgcgcccgcacccgcaccggcacccacgcccacgcccgaggaagggcccgacgcgggctggggagaccgcattcccttggaaatcctggtgcagattttcgggttgttggtggcggcggacggccccatgcccttcctgggcaggtaacgctggtgccgggcccgccgccgagcgtagcggcttgggccagacgtggtccgagcggtggcccgggcgggggcggagggcgaaagcatcggagcgcgcaccgctcagtccgagagcgcagccccttaggcgcccagttggagtcccaggagcccggctttgagccggggtgtctactgcgctgcgagaggggggcatcgcctacggaggggccggcaccctcagcacgctgtcctcccagggctgcgcgcgtgtgccgccgctggcaggaggccgcttcccaacccgcgctctggcacaccgtgaccctgtcgtccccgctggtcggccggcctgccaagggcggggtcaaggcggagaagaagctccttgcttccctggagtggcttatgcccaatcggtgaggggttccctcttttccttacccctggctccaggctccttccgtctccctgcaccaaggtgttgggtgggaaggactcgtgtgggaacattagtgcagctctgcctccgctgtcggcccaggttttcacagctccagaggctgaccctcatccactggaagtctcaggtacaccccgtgttgaaggtgagagctccaggctgtcctgcacatcagctgtgacactctgggactgttcagtactctaggaagtgggtcaggcaccttgggggcccaacgctgctccgtggggatgtctgcttgcctgcctggttctcttttcctgctgtttcctccagcagggaggtatcagaggcggggacacccaagtaggcctggcatgggcagaaaggaggtcacagctaaggcggtagagtggggttggcaccagccacttgtctgtttcccttgtggatcttagcctgttgtttcccaaccccagctgcccctctgtctccccgcagctggtaggtgagtgctgtcctcggctcactttcctcaagctctccggctgccacggtgtgactgctgacgctctggtcatgctagccaaagcctgctgccagctccatagcctggacctacagcactccatggtgagccctgtgtcccaaggggccctgaaaaaacccaggccggggtgacgggtgctcttgtattggggccccaggtggagtccacagctgtggtgagcttcttggaggaggcagggtccctaatgcgcaagttgtggctgacctacagctcccagacgacagccatcctgggcgcactgctggtaagttggcattggtgggagcagaggcagatgctgagctggggactgccaggccactgaccctgtgacctaccccctccccccatctctgcagggcagctgctgcccccagctccaggtcctggaggtgagcaccggcatcaaccgtaatagcattccccttcagctgcctgtcgaggctctgcagaaaggctgccctcagctccaggtacctggcgccctgcctctcccacctgtcacaccctcccccatctacagcctggaccttgcccccaggtgctgcggctgttgaacctgatgtggctgcccaagcctccgggacgaggggtggctcccggaccaggcttccctagcctagaggagctctgcctggcgagctcaacctgcaactttgtgagcaacgaggtcctgggccgcctactccacggctctcccaacctgcgcttactggatcttcgtggctgtgcgcgcatcacgccggctggccttcaggatctgccatgtcggggtcagcagtcctgggtggtggccgggcgggtgaggtgtgggggcccttgtcaccttgtagcttatgctcactcctttcactgcagagctggagcagcttcatctgggcctgtatggcacgtcagaccggctgactctagccaaggagggcagcccctttttgacccagaagtggtgccatacactgcgagaactggacttgagtggccaggggttcagtgagaaggacctggagcaggccctggctgccttcttaagcacccctgggggctcacacccagccctgtgctctcttaacctcaggggcacccgggtcacaccaagcactgtcaggtcagcatcccctaccccagtccctggagccagtgtggctgtcactgtgtctgcctggggcctggaagttgtgtcctgcctggcctgagacctccaggggtcagaggggcatgcatactgtccaagcccctgcgtggggtgggcctgaggacaccaggggaactgggcttggccttggtggctatgggtggcagagccaggtgtcgaacaccagcaggcacagctccctagcctggcccagcccttctgaggcaacagctcaacttcctgtggtctgccctccccacagctctgtgatcagcagctgcccgggcctgctttacctcaacctggagtcctgccggtgctttccccggggtttgaagcgggcctaccggggcctggaggaagtccagtggtgtctggagcagctgctcaccagcccctcacccagctaggcagccacagacctgggacacctcagccagcttgcccaccctccacctttgcccaatttcagatatttgagcattttgttaaaataaaacatttttaggagtt

SEQ ID NO: 1131 - DNA, 2722 bp, Homo sapiens
ttaatgccaactcattaaatacaaatgttttattacgcaaaccacatgtaggtcccaggctcaggggcttaccctacagcccccactggtccctggctccaagcctgctccttgcccttgcccaccctggaaagccaggatctcctatggagtgtgtaggtgtccacgagtgtaccggtgtgcgggcctcctgggctgcaggcactcaggcatggtggcagcattgagggaaagacaggtgttggggagcggggtccccacctgcccaggctcaggagtcacaggggtctgcacagtcctttctgctgtggaacacgtgatagatgctggtcggggggaacatagcaacagcgccgagcagagagcccacctggatggccacgccggctgccagcaatgccggccggcccccgccatgcagcagggagctggctgccaccttcacgtaggagaacacgccaagacacagcacccacgacagcacctgagggggacacagcaccagctgagcgtgagatgtgcctgctccagggcaacgcccccccaccccacttcatgtccccctgtgctcaccacgaggaccacccccgccgaggtgcccaccaggggcgggcaggggctcaggactgccagcgccatcaggtagcccccacagaacacgcccagcagagagaggccgcccagccctgccaaggacctgcagtgagcgagcagaatgtcagggctgactgcgccaggacctggctcccagccctgagttccacccgcacaggggctgggggtccttgtgtacctgcacagcacacccatggccaggaagcaggccaggggattggcagcactgcccagcaccacagccaggtggtaggccagacgcccgtagggtaagcaggaaaagctctgcacggcaggcagcacgccattggtcagcgcgttggtggcggccaacaggcccagcaggcaggcactgcgggctgatagaagctgataggccttagggtctggaccaggggtggtgcctgctgcctggcttggtggctcttgcagtggtgaggactcttccacctcttcctctgctcctggggctcccacctggaggcctgatcctaactcccctgtgggtacagatggtggtggcggcaacagcagcagaagaccctggaaggcagcagctgaagcgaccagaagggcagtcagtgcccagaagaaggtgctggcgggaaaacgctcaaggaagtcgagcggggggccaggggtgccgttgatgggggctggcgggcactcgaggcggcccacaccctgcactagggccagcacgcagggcagcagggcactcaggccttgacccaggaagaatgaccgtaagaagcgaggtggcaggtggctcaagaagggcaggaaagtgacattcgaggcacagcatgccagtgccagcacaaaggccagtgctaagaaggccacagaatgcaactgtcctgccactggggccacatggtgccacagagaggccagcagggctgtgcccaccatgcccagcacctgcaccacccggatggggacctgctcgtcctttcctggggccagcctcctccagagggtcaccaccagcagacccaggttccccagagccacaagcacagagacgtaagaggggaggctccaacctgcagggaagggaggaggccatgtcagggtcatgatgcccaagggaggaagagtgccaaagcccaccttcctgggcacacctgcacctcctcccactcaccctctggaagctctctgaccaccacaggtagctccacccagatcccactgaccgcagcccaggagtcttgggcacacctgcacctccctcccactcaccctctggaagctctttgaccaccacaggtagctccacccagatcccattgaccgcagcccaggagcccatgccgaagagagccaccagcaggtgggtcagcaccggacgggcgggcgtgggtgctgccattcagcccaaggctgggcccttccaggtcagggcaaaggtcacagccagttcttttcccacctagggccagacacgctttggctctcctgggaagtgaagacttcttctagcttgaaagaaacagagaaacagataggatgcagagccggagtcagaacagggtgagaccaggggaactgggggagccccgggcaggagcgcagatggggaggattggctaaaacgtacccagcgggaccgccggcaggcagggaagcaggaagccggcccgagtcgctgcggccccaggggaggaggccgaaggagcgagtggagccctcctctccagggagaggcggggctggagtcaacgccaccaccaccccaagccggacgccgggaaagggcgcctaccaggaggagccacgcacaccccagggcttcacggtgcccgcgaccgcaagagccaagtcagatcccaggggagtggccgggacggctctgctcggaggggcgccgccctctcggtaccgtcaggtgggcgactcgggagccgtccggtccctgcgcctcccggtcccgcgcccagtgcgctcccgctccagtgccggcttcccgccacgccgggacaccgccgtccggcccagggacgccacctcagtccggagcgcgcaggacccggcagcagccacgacccgactcacccgtggcggttccgggcccgcccccggcatggcccacgaccggaag

SEQ ID NO: 1132 - DNA, 2263 bp, Homo sapiens
tccattctttcttaaccatcttcttctgcccccatctttaaaaaaaaaaggcagtaggctttatggctctaaaatcaaatgcttatgttggattctaataagggggttttatttcaggtatttgtaggcaaaataccaagggatttatatgaggatgagttggtgcccctttttgagaaggccggacccatttgggatctacgtcttatgatggatccactgtccggtcagaatagagggtatgcatttatcaccttctgtggaaaggaagctgcacaggaagccgtgaaactggtatgtgataattatccactgtcttagcaagtcactatttgaggaaataaactttaattcaaaaatgtttgtagttaacattattttgatttcttcagttgttgcttggaatgtttttatactgaccaagttggtatgtgacgtttatttttctctgactataaaagtaaaaaagaactgaaaatacccaaaaagtaatgttttatagaaagtctcccattgatttaagaagttatctattagattgatatcagaagtttcatatgagtatttggcttatgcatttctgtcttttggttttaggcaaaaggatgtcaattcttgatgttaaactttaggattcttaaagtataatgaagactggaatgggctgtggggaacataatagtggatgacagtgacttaggattcaattcagaaaatagttgtgaatctgttttattttggttacagcctactcatacgatttatttcatattttctaagtgtatttttgttcttcctgtatgtttcttggcccttgagtcttctctgtctttaatctttctctcctctcctactatttatagccagtctcatattaatttcctttctctagggcctttaaccacttggtgctcatttcagaccagtagtagtagcaacaaagttctgcaaatcaaatgtatcttcactcctgctgtatttaagacacagctatctcagtatcttaaaataacaatgtaattattttttggcatacccttgcctgacttctgaggacctcactaagtctagttctagcctttgtagaatggtcaacttctttcatcaaggctttggtttcattactggtgtctgaattagttccactcctagcttgacccagattttagtttttattatggattttttcttcaaacttgtttatttaatattaagttttcatttttggcagcatatggatgattttatttttaataatcatatctcttagtaaactaatggttaaataatattaaagtataagaagctaaaattggccaggtgtggtggctcacgcctgtaatcccagcactttgggaggctgaggcaggcagatcacctgaggtcaggagttcaagatcagcctggccaacgtggtgaaaccctgtctttactaaaaatacaaaaattagctgggcgtggtggcgcatgcctgtagtcccagctacttgggaggctgaggcaggagaatcacttcaacccaggaggtggaggttgcagtgagcaaagatcatgctactgccctccagcttggatgacagagcgagactccatcttaagaaaaaaaaaaaagggctacaatttatcaagaaaatccactatagtgatttaaataaaacatttttcaaaattttataaaattttgaaagtattgtgtttggtagacaatttaaaactatatatttagaattctgtgacttctgtagaatttgaaatttttctaatatctttgcattgattaaacatagttgttaccctttacatattgttattttgagtatggcttacctatatgcaattacatttccaaggaccctgaatgatcagtctcaggtatttttttctgaaaaatctgtggaaaaacattttcagatagataaaattaaaatatgaaataagatattttaaacaataaagtgagtcctttttatatggaagagtagtgaaggttaacaaaaccaaactaaaacaagagactgtaacaatgaagtttaaaatatacattcatattatggaaagcatgagggaacttggtgagttgatgaagcagggagcgtttggccttaaattgttgaattttttagattaagatcaattgtcctgagtttggggtggttttggggtctctggttcttttcttattgcagtgtgacagctatgaaattcgccctggtaaacaccttggagtgtgcatttctgtggcaaacaacagactttttgttgg

SEQ ID NO: 1133 - DNA, 14327 bp, Homo sapiens
tccattctttcttaaccatcttcttctgcccccatctttaaaaaaaaaaggcagtaggctttatggctctaaaatcaaatgcttatgttggattctaataagggggttttatttcaggtatttgtaggcaaaataccaagggatttatatgaggatgagttggtgcccctttttgagaaggccggacccatttgggatctacgtcttatgatggatccactgtccggtcagaatagagggtatgcatttatcaccttctgtggaaaggaagctgcacaggaagccgtgaaactggtatgtgataattatccactgtcttagcaagtcactatttgaggaaataaactttaattcaaaaatgtttgtagttaacattattttgatttcttcagttgttgcttggaatgtttttatactgaccaagttggtatgtgacgtttatttttctctgactataaaagtaaaaaagaactgaaaatacccaaaaagtaatgttttatagaaagtctcccattgatttaagaagttatctattagattgatatcagaagtttcatatgagtatttggcttatgcatttctgtcttttggttttaggcaaaaggatgtcaattcttgatgttaaactttaggattcttaaagtataatgaagactggaatgggctgtggggaacataatagtggatgacagtgacttaggattcaattcagaaaatagttgtgaatctgttttattttggttacagcctactcatacgatttatttcatattttctaagtgtatttttgttcttcctgtatgtttcttggcccttgagtcttctctgtctttaatctttctctcctctcctactatttatagccagtctcatattaatttcctttctctagggcctttaaccacttggtgctcatttcagaccagtagtagtagcaacaaagttctgcaaatcaaatgtatcttcactcctgctgtatttaagacacagctatctcagtatcttaaaataacaatgtaattattttttggcatacccttgcctgacttctgaggacctcactaagtctagttctagcctttgtagaatggtcaacttctttcatcaaggctttggtttcattactggtgtctgaattagttccactcctagcttgacccagattttagtttttattatggattttttcttcaaacttgtttatttaatattaagttttcatttttggcagcatatggatgattttatttttaataatcatatctcttagtaaactaatggttaaataatattaaagtataagaagctaaaattggccaggtgtggtggctcacgcctgtaatcccagcactttgggaggctgaggcaggcagatcacctgaggtcaggagttcaagatcagcctggccaacgtggtgaaaccctgtctttactaaaaatacaaaaattagctgggcgtggtggcgcacgcctgtagtcccagctacttgggaggctgaggcaggagaatcacttcaacccaggaggtggaggttgcagtgagcaaagatcatgctactgccctccagcttggatgacagagcgagactccatcttaagaaaaaaaaaaaagggctacaatttatcaagaaaatccactatagtgatttaaataaaacatttttcaaaattttataaaattttgaaagtattgtgtttggtagacaatttaaaactatatatttagaattctgtgacttctgtagaatttgaaatttttctaatatctttgcattgattaaacatagttgttaccctttacatattgttattttgagtatggcttacctatatgcaattacatttccaaggaccctgaatgatcagtctcaggtatttttttctgaaaaatctgtggaaaaacattttcagatagataaaattaaaatatgaaataagatattttaaacaataaagtgagtcctttttatatggaagagtagtgaaggttaacaaaaccaaactaaaacaagagactgtaacaatgaagtttaaaatatacattcatattatggaaagcatgagggaacttggtgagttgatgaagcagggagcgtttggccttaaattgttgaattttttagattaagatcaattgtcctgagtttggggtggttttggggtctctggttcttttcttattgcagtgtgacagctatgaaattcgccctggtaaacaccttggagtgtgcatttctgtggcaaacaacagactttttgttggatccattccgaagaataagactaaagaaaacattttggaagaattcagtaaagtcacaggtaaaacaaaaatgtatttagaaattacttttgcgaaatatgttgtactacttacaagtgctcaaaaaaactgaggggttgtatgtattaaattaagaattcaggtctgaagtatctaaattgcttcctttctgctttatagtggtttgggtttaagcaagttcccttatatccttcatttcttggaatgtccccttcacttctttgtcttaattgaaccttggcttttgctggagcttttgctctatagccctcaagtgaatgctttttttccccttgacaattagtgtattttaggaccaagaggatgaaagtttttactctctccctgctgccttgtctagatcagattttttttttttttgagacggagtttcgctcttgttgcctaggctggagtgcaatggtacgatctcggctcactgcaacctccgcctccttggttcaagcaattctcctgcctcagcctcccgagtagctgggactagcatgtgccaccacgcctggctaattttgtatttttagtagagacggggtttctctatgttggtcaggctagtctagaactcccgacctctggtgatcctcccgcctcggcctcccaaagtgctgggattacaggcgtgagccacagtgcctggctgatcagatttttttaaatatccaattctaaatccatggaattgattgagaagtagattttatatcacagttctatacacatttatatataactgaaacaatttaacaaaactgtacttttatttattatacatgatttattttgatatttcttattctatttcattttttaaaatgccaattgtgatctaatactacctatgatttaaaaacactgcgttagaccgctgcctccccttgtaaaaaccactgtttctttacatttttatcatccagacatatcctttcccttttgttgaagctgtcattcgttgctcttgtggtttcagcctttcattaatctaaagattgcttctggctcactgtcttcctcttctgccctaaattggcttctttctaatacctttaacatctacattggtgaaccatccagggctttagactcctacctacttctatgtctacctcatctttagtcctttacttcagctccaccatatccagattacattctggatctagtcaccagaaattctatgcactctgaactcttgatttctagcgtcccactttgtaaccactgctaccacccgctatattgtgttgtcaagtattgtgttgtcaactgctggcacagttctttgacctcatcactttattatctatagctccttctggcttcatgatcatttattcattctttcagcaggtgtttattaaagttcctgttaagtgctggcattgtgctatgtgcctgggatacactgatggctaagagacatattctctgctttcatagatcctatatcctgagaaaggagataagaccaagaatataaaaaataaaaattaaaggaatatttagacattgtgataagacactgaagcaggaaatacaggatatttagctagagaatagctactatccctgtttccatggttttggaagacttttctgataagatgacatgtcaaccagcacctgaaggatgaagaggttgtagcatacaaagagcaaaaggaagtgcattccaagacagcaacacgtgccaaggttccaaggcaagaaagaagtcagtatattacagtaactgaggaggccagtattattaaaaggtagaattaggagtagagttgtatgaaatgaagtaggcagggcttctgtaggccatgtaaggagttgggtttttattgtatatataatgagaaggtatttaaaggttttaagcaggaaataacacctatttcttgtttatgggatattattcctagcgctctgtggataggggcttggagagaaggggtgtgagtggaagctgataaattagttgaagctgtcatactagtacagatacaggattagactagggtaatagcagtggagatagaaagaagtaaatgagtttggaattggataggagagatgaaggaagaaatcaagaatggctaaccaatttctggcttcagaaccaggtggatggcactgtttattagataggaagtctagggaaggcagattttggccatggtggttcagttttggaaaagttaaatttgcaatgtctaagacatcaaagaggatacatcgggtaagaacgtaggcacatctagagcttagagaagtctggggtaggaaaaaaatctaagtatttataagggtataggtaacatttaaaagtagggctagctgacattatttagaaagaacacatacggagagataagggcaaaggactaagaccagaggaacactaatatttagtgatcacttccattcttggtaaaaatagtaacttttaagttagcttcaaggaagatttttggccatgattagttgtcaaaagttagttctcttgggtttatattactaattttgtttttaagatccttgttagtgctttaataaagtcatgttatatcaaacgctctaaaacattgtagcatgttaaatgtcagaatatagtagatttgttgtatatggctgtaccttcagaacccctaaaattaaaaaggaacatcaaatactgtcccaaaccccatatctaattatgttgatctaattgtctacaaaattagtgactcatgttgaggctgcttcacttatattttgctcatcgtcaagtggatttaggtctgcctaatcgctagatgtgtggtggatgcttttggcttatatatctggctgttggtttaacagagggtttggtggacgttattctctatcatcaacccgatgacaaaaagaagaatcgggggttctgcttccttgaatatgaggatcacaagtcagcagcacaagccagacgccggctgatgagtggaaaagtaaaagtgtggggaaatgtagttacagttgaatgggctgaccctgtggaagaaccagatccagaagtcatggctaaggtaaatacagttgcttggaatgggcatagggtcatcatttaaattttgtactcagaataaagctcaaatattttgagttttatgataaatagaaattgtagctttagacttcaactgtttggcaaggagcggctttaacactaaagttaacagcctgtcttggtatccaggaatttccattaacaatcccttttcctgcagattaaatgtgcaaaaggaactgaaatgaaattccttcaattaagtagtcccatacacactgggtgtttgtttagtgctaggcactgtgagggatagaggttttttttttttttaaaagtcctgagtaaagagagaagtaatgttttggagattataagttataatcttcattgactatattatgactttattacttggccatgaattatgttttatttagatttatagctaatttttctttttttaagctttttttgtagtttttatttttaaaaatattttatttattattattattttttgagacagagtcttgctgtgttgcccaggctggagtgcagtggtacgatctcggctcactgcaacctccacctcccaggttcaagcgattctccttcctcagcctcccaagtagctgggactacaggcgcctgccaccatgcccggctaaattttgtatttttagtagagacagcatttcaccatattgcaggctggtctcgaactcctaagctcatgatctacccgccttggcctcccaaagtgctgggattaaggcatgagccaccgtgccccgcctcttgtttttaaatgatcagattcccttagtgtattgtccccatgaagaaaggcaaaagattgtcatgtttgctcttatttgttagtggcaaaatatgcatggcaagtcctgtaaagggccctcaattccctcctgattcctgtacttgcgttgccaggatcttaatagtggtgccttgagtactggttcttaagttttcctttgggcgactcctgggacacatcagagttgcatttctttttttttgagatggagtcttgctttgtcccaggctggagtgcagtggcgcgatctccactcacggcaagctctgcctcctgggttcacgccattctcctgcctcagcctcccaagtagctgggactacaggtgcccgccaccacagctggctaattttttgtatttttagtagagacggggtttcaccatgttagccagggtggtgtccatctcctgaccctgtgaaccgcccgcctcggcctcccaaagtgctggggttacaggtgtgagccactgcgcccggcctcagagttgcatttctgctgcttgcaatgagctcttgagcattttagttgtctcttcccttcacagggaggcagcaactctgaatggccatgagttaatggttggattcttcttgataagtcagaagtcaaggtttttattccagaatttgaggaggcaaaccctcgttctaagtagtttggaggagaactctggtttatacttgtataaagtctgggttggcagtgacatctttgggttaatcagataagttctattcagaatgaaccagagaggctctcagaagtgctactcagtatcttttatctcatattccttgagtagatgggtgtctaggaaagggatagagaatttaaatagctctgagtttttattttgattttttactagcttgattttaattcctattgtttcttctcctaatacaactatgactttgggtaaactactgaacatgaatgtcatctattttattgagcctggatcaatctctaagatccaccacaactttgaatctacctgtagtaactaagtatagcctgtattactttttctgtaaaaatattttaaaatagtattatagatgtattataatagaggaataaaatattataaaagaggaataaaatcccatgaaaaccaaaagtatagcttgtaatttgcttaccagccacttctcacataacctttagtaactgctcagatggaagttcatcctaatctttttttagggttagaaaacttcaagatttcattctggtaactcctttttcctagatctaaaacaggtttcagaatgaaaaggaggtctctataaacttaggattaaatattatggagccctttattgtttcttttttttaaaagatggggtctcatgttgcccaggctggagtgcagtagctgcccacatgtgcagtcatagcacactgcagccttgaactcctgggcttaagcgtccctcctgcttcagcctcccgggtgcttgcaaccccatccagctcctttattgtttcctaattgaaaagaaaagtttatccatttgagtaaagcttctgttattcacactatcaatttacaattcactgaagattttttttgccaagttgggtcagttttacaatgtaccataacctaaaagcctaaatatatgtctcttaaagggaccctttttcctgttgaacattttaaacacaatttcagtaagtaattttcacatagtatgttatcgtttcatcatagaaaagtccatgttgaattttttttaaaaagcaactaaaccagtgggagtctgtgtaacatagaggctggaccttagtatgacaaattgagaataataaaggggatggagcgtttgtggaaaatgttagtttttttcctccttaaattagtatcttcttattagatagccctttatctgaagcaacaatttgttcaatatgttagttttttatttggataggtactatgttttcttagttcaaaagttatatagaaaagtatagacaaagaaatttcctttctacccctatccctgtgtctaccaaatcccctttgtctcctataaggcatccagttttaatagttgctggtttccttttagtatttccttcggcaaatatggatatacttccttaattcttagatgagtggtagtaatgttggtagcctaccatatccactgatctaccttttgtttattcaccatcctgtttcatcagctctgaggaaatacatcattactatatgtactactaaatagttaaaaaacactgccaactaaactatggcacagtacttgcttatcacattgactgtaagttgtcctatcctacaactcatagagctcctcttcattttttgggtttttgttttttttttttttttttttttttttgagacggagccttgctctgtcacccaggctggagtgcagtggtgtaatcttggctcactgcagcctctgcctcccgggttcaagtgattctcctgcctcagcttcccgagtagctggggttataggtgcctcctaccacgcccggctaatttttgtatttttagtagagacagggtttcaccatgctggccaggctggtcttgaactcccaacctcaggtgatctgcccacctcggcctcccaaagtgctgggattacaggcgtgagccaccgcgcccagccctcttcttcattttttatgactacatagtagtctattctgtggaggtactatagtgtatttaaccagctggatattgtttctaatcttttgctcttacagtgctggaaggaataagcttatgttagttgatacaagtggagatatatctgtaggatagattcttaggggtagaattgtgggccaaagggtagatatatctgtaattgttaagatactgccatattcctttctgtaggagatacactattttacattcctaccagcaaaatacaagagaattattttcctcattcttgacaaaatagtgtataatcaaacttttgaattttgccagcctgataacaaatgtctcagtgccattaatgattaatgatttgcttctcttactatgaatggtttgaactttaaatatattttaagagccatatgtgtttctgtgtatgaaccatgtattcaggaattttgcctatttttctattcagttgttgagctttttgttattttctggtgctctgatataaaagagagattagctgtttgtgatacatgttgcaaatttttcatccatatttattgtctttgcttatagtatttttttgccatatagaagtcatttatttttagtagttgagtataacattcttatggctcctagattttaagtcataaggtcatccccactccagtgttatataaaggaatcattcttgttctaaaatttcacagtcctccctccacccttttattatttaaattttcaatctatttggagtttatccttgtgtatagtgtaaggcatggaccagcttttctcctttttttctaatttaacactacctgatttaatgatttaagcattatagtttgtttatatttggtagggccagcctctaaatttcactcttttttttcctggttattcttgcttatttattttttcatatgaacttttgaaagttactcagttttagaggaaagaaacagaaaaacttgttttgaaagggactttttgttgattaacttggtaataataattatgtgttggttccttgaaggttctactcagtgttaggtgctttaatgacaacataggagaaggcaggaaccaataatttttgtaaattggtgactgatatcagtgtcattttcctagcaatttctcttactacctgtaacaacacttttagcacttaatgttttagaggagaaaagctatgctatgaagacaggaagaaacacttttcaggtaaaattaagtagccaatgacggttttgtttatttgttgcttactaggtaaaagttttgtttgtgagaaacttggctactacggtgacagaagaaatattggaaaagtcattttctgaatttggaaaactcgaaagagtaaagaagttgaaagattatgcatttgttcattttgaagacagaggagcagctgttaaggtaggaattttgaaattttggttcttgatatttgaattttgtttttgaaacttgccaaacgcaaagtaactttaaaaactgaaacaatattggttgtcagcttttgctgaactctttctatttaatctctgtaaagtggtaatagtatgtaacagataagactccatatttcaaagccaggttattactgagtttgtgatcttaggcaagttatttttaatctctgtattgttttgtaagattcgatagcatgatgccttggaagtattacaaggtataaaaattagctgctgtaaacactgaataggtaatgaatgcattataactacttagttgacctcagtttgtgtacctatgaaggaaactgagtggtgtacatgactcatacagtataccatgtttaattgagtagatagattttgagggtatgattagttttacctttatttaatcattttagagttaaaatagcattcactatgttttactgatttcggtaattgttagagatatcacttgtgtataatagttgatttagtctttgatgataatgaaaagtttgaagaaagtattttcatatggtatctggaacacaaaacctgctttctatcgacaatggtttaggactatctttaatgggtgaaattttcagtttcttttttttattcatctctccttccttgggggggtgggagcaagacaaaacactactaaaatcttatttatgttattaggaagatagatccagaatgcttagtgacacaggcatggttctttttctgcatgtttggtcggtgggatactgccatctctaatctgagcattttttggttttgttttttgcccaggctactgcttttaaaacaggctttatagaatccctgattggtttataattaattggcttgctcattgatggtagctaattaatgaggcagtattgttcataaaattcataacttgtccaagatcacaaactcagtaataatctggctttgaagtatggagtcttatctgttatgctgttatactcttatccgttcatttgtggcttctgaaatttcactggtatagaatgcagataactaataattttatgctgtctaaatattcctcctgactcgactggtttcaaataactggttgtcctgattgaaaatatttataggatggtttgccaaagaagcctatgaaattataaaatatctagtccaggaactgggagtcaccaggatggtcagggcagagggtagatgtttcattttttaatttatgccaggaagcttttgtaaacttgtttagttgctttaactgaagcaacgcaaagctgaggtggtaaaagggaaaattgcagtcttgaggactagtttcgtttttgtctagatacttataaatcactgatagctccaatagaacatttttttatgtgtgcccagagtggggaaaggtatagggaaacaaaaaataaaatatcatgaggaggtgacattttgttactgagtacctgaaccttttgatgtatggcagaggttgttaggtggaacaacgtgaacaaagggctagaacatggaatgtttgattactgctttctacataattgcttgagtcttcattagtccaggccttttctggctctgtacttttaactgttcaagcaaagtacattttgggttaagcattgtgagggaaacctaggcttttttgtgttagtatcttcttgaattttacagataatctcactcagtaacctcatttgtgcttcaaatccttgaaattgtcgtataagaacagtggaagacctgtatgttgtatgctacatgtttattttaaaattctaatcctgagaagttaatctttgtctggctcgtattaatactggcatttttccccggtatggatttgcttctttggtatggcttatcttttaaggagttatttggaattaaggagcagcaataggtggcagcccttttaccttttaaaatataatatcaggtggtcggttttgttctaaatgtaatttatgtataaaaagataacgtcaagggaaacgtattttctttgtgtgttagtgtttaactttctggctagattcaccttttgccatttaaaataattgtgaagtaaattgttaagtgtattaaattacacaagtataatagcttacatactatataaaacaaaatacagttttatatcgttgtaaaataatttttctaattttttataggctatggatgaaatgaatggcaaagaaatagaaggggaagaaattgaaatagtcttagccaagccaccagacaagaaaaggaaagagcgccaagctgctagacaggcctccagaagcactgcgtgagtctacattttagtagatatatctttggacaaggaataacgtgataatggagatcagattaataaaacaaaatcagagtcttgaagcaaactgatttgttttttcttttctcccttctctactttgctaggtatgaagattattactaccaccctcctcctcgcatgccacctccaattagaggtcggggtcgtggtggggggagaggtggatatggctaccctccagattactacggctatgaagattactatgatgattactatggttatgattatcacgactatcgtggaggctatgaagatccctactacggctatgatgatggctatgcagtaagaggaagaggaggaggaaggggagggcgaggtgctccaccaccaccaagggggaggggagcaccacctccaagaggtagagctggctattcacagaggggggcacctttgggaccaccaagaggctctaggggtggcagagggggtcctgctcaacagcagagaggccgtggttcccgtggatctcggggcaatcgtgggggcaatgtaggaggcaagagaaaggcagatgggtacaaccagcctgattccaagcgtcgtcagaccaacaaccaacagaactggggttcccaacccatcgctcagcagccgcttcagcaaggtggtgactattctggtaactatggttacaataatgacaaccaggaattttatcaggatacttatgggcaacagtggaagtagacaagtaagggcttgaaaatgatactggcaagatacgattggctctagatctacattcttcaaaaaaaaaaattggcttaactgtttcatctttaagtagcattttgctgccatttgtattgggctgaagaaatcactattgtgtatatactcaagtctttatatttttcctcttttcataaatgctcttggacattattgggctggcagagttcccttattctggggattacaatgcttttatcgtttcaggcttcatttaagcttcaaaacaagctgggcacactgttaaatcatgattttgcagaacctttggttttggacagtttcatttttttggatttgggatagattacataggagtatggagtatgctgtaaataaaaatacaagctagtgctttgtcttagtagttttaagaaattaaagcaaacaaatttaagttttcttgtattgaaaataacctatgattgtatgttttgcattcctagaagtaggttaactgtgtttttaaattgttataacttcacacctttttgaaatctgccctacaaaatttgtttggcttaaacgtcaaaagccgtgacaatttgttctttgatgtgattgtatttccaatttcttgttcatgtaagatttcaataaaactaaaaaatctattcaaaacattacctatttcaaattcaattgtgtcctaaaacattattttattcgtaatccttgcaaggaatattgttttcaaagtataactgcctatgtgagtgatcaaattcatgcaaaatttcttgtttattccaacatgtgttgtggatattagactgaggattagtctaaattcaagtatttattccaattagcactttcattgattggtgttctctcatagtctcttctaattttgaaattttatcttttattaaaaaaaaaaaaa

SEQ ID NO: 1134 - DNA, 482 bp, Homo sapiens
tcacgccattctcctgcctcagcctcccaagtagctgggagtacaggcgcctgccaccatgcccggagaattttttgtatttttagtggagacggggtttcaccatgttagccaggatagtctcgatctcctgacctcgtgatccacccacctcggcctcccaaagtgctgggattacaggcgtgagctgccgcgcccggccgaggttgctttttaagtagtaaagattttagagttgaggagataacttgaggagagctatgtcaatcttttattcaattattttatttttattcatttttatttttaatttataaattaattttttaattttaaataatagaaatggggttttgccatgttgcctaggctagttttgaactcctagactcaagtgatccgccttccttggcctctcaaagtgctaggattacaggcgtgagctgctgcgtccagcctcctttattctgtttttatgagaa

SEQ ID NO: 1135 - DNA, 188 bp, Homo sapiens
tcacgccattctcctgcctcagcctcccaagtagctgggagtacaggcgcctgccaccatgcccggagaattttttgtatttttagtggagacggggtttcaccatgttagccaggatagtctcgatctcctgaccttgtgatccacccacctcggcctcccaaagtgctgggattacaggcgtgagc

SEQ ID NO: 1136 - DNA, 2154 bp, Homo sapiens
gtgagtaaattgtctccctttttctatagatcattaggttagagtttttttcttcttttttttttttttttttttttaccacttctgctgttcatggtagtagtggaaggtaaatttggaaatggcattgacataaaatgaaaatgtttacggacacttttcttttttgcttttttattgtatttggataaagatccacttaaaagttatctgttttttcctgttttttttttttttccccaaagtgtagttatgttttcactattgctgcttctatagagggcattgtgatagagagttacagatgaaacattaaatgccacagtgagtagaaataattactacaaaaagtaataaatatgattacttggtaatatcattctccatctaaaatactagtttcacctgtgagcagatttcagctcagtttatagttaaaaacaatgagggtaaaatgggattcatgctcagggaatgaatcagccatagttagagtgggaaattattattttcttcatttaaaggtagattttatgtttatttccctaaattgcataagataaaattgtctgtttaataaaaagacatttattaccattattaacagtcattttagagccaaatttaagaaaaggatattgaaagggtctttattggccttgtttgggtaactctatgctgttagatagaagagacttaggtaaataactttttatgtctgaggtgagtacacaatattggttcttggaaaaatagctgtttcttcataagatacccaagtgataattttttttcccctagactgtcaggcctatgagtaaatactaaatctattagctgtccccactcataaaccaaaccaaaccaatacaaacagatgaggagaggaaatgtagtaaaaatactggctgggtcttatgattgggatgagtgattttataagataatatggtgataattttattctaggattttatttttggcctaatataggaatgtttaaaaaaggcttttctatgaaaattagaaatttatacttgaaattaaaagtctagaagggggaggaccttaaagctaagctaccagtaagacaatgaataattcagaagagaacactattcttttactgactgagtgcccaagatgccaatttccatgaagtcttgatttatatatatgtacacatgttatgcacatacatgtttgttttctaacagttattttttaagcttttgagataattttagacttacagaagagttgtaaaagtagtagagttcttgtatactctgcacccaccttgcccttatgttaacatcttacgtaacaatagaacatttgtcaaaattaagaaattaaccttgatataatactaactaaagtagaaagtttaaaaagtagagattttagtcttttcactaatgtccttttactgttccaagacccagccttgcatttagctatcatgcctacgtcctgtcttccagtctgtgacagtgtatcataacaggggatacctgatgttgtaatgtatttctggtgttgttaaccttgatcactatgctaaggtggtgtctgctaggattcgctactgtaaacttactgtgttttccttgtaattattgaatatttgctggagatacccggagactatgcaaatgtcccgtttctgcttaaacttttgctcattttactatccattggcagatcttgcttgtggcagttactactgtggtgttctaatggtgattttctatttctctcaatccttctacatttattattggaattcttctgtaaggaagagttgtcagttctggatttatatttttaactataataagatattcaggataagtatagatttagaacttaaagatgttaaatcatgttaaaattattccaaataccaatatcaaagaaaactaagttggtaatctatctcagaaaatatatgaacttaagaaggaaaatagtatttatgatttgtagaattggttcaacttttgacttaatactgactttggactgaattcaaagttttcttgaaatttcacatctggactttttaaagtgtctacatttatattactttggggatcattttgtcaaagtcttgaataaagttacccagtcctggcatgataaacacaa

SEQ ID NO: 1137 - DNA, 1205 bp, Homo sapiens
tgataattttattctaggattttatttttggcctaatataggaatgtttaaaaaaggcttttctatgaaaattataaatttatacttgagattaaaagtctagaagggggaggacctcaaagctaagttaccagtaagacaatgaataattcagaagagacactactcttttactgactgagtgcccaagatgccatttccacgaagtcttgattatatagtaaacgtatgccatatatgtgtgtgttttctaacagtatttttaagctttagagataatttagaccttcagaagagtggtaaaattagtagagttcttgtatactctgcacccacctgccccttatgttgacatcttacataacaatagaacatttgtcaaaattaagaaattaaccttgatataatactaactaaagtagaaagtttaaaaagtagagattttagtcttttcactaacgtccttttactattcgaagacccagctttgcatttagctgtcatgtctatgttgtgtcttccagcctgtgatgtgtatcataacaggggatacctgatgttgtaatgtatttctggtgttgttaactttgatcactgtgctaaggtggtgtctgctaggattcgctactgtaaacttactgtgttttccttgtaattattgaatatttgctggagataccctgagactatgcaaatgtcccatttctgcttaaacttttgctcattttactatccattggcagatcttgcttgtggcaattactactgtggtgttctaatggtgatattctgtttctctcaatccttctacatttattattggaattcttctgtaaggaagagttgtcacgtctggatttatatttttaactataataagatattcaggataagtatagatttagaacttaaagatgttaaatcatgttaaaattattccaaataccatatcaaagaaaactaagttggtaatctatctcagaaaatatatgtacttaagaagggaaatagtttttatgatttgtagaattgattcaactttttacttaatattgactttggactgaattcaaagttttcttgaaattctacatctggactttttaaagtgtctagatttatattactttggggatcattttgtcaaagtcttgaataaagttacccagtcctggcatgataaatttaaaaaaaaagaaaaataa

SEQ ID NO: 1138 - DNA, 1969 bp, Homo sapiens
ggtaatcgtagtgttccacaatcaggaccgactgtacgaccacaagaagatgcgtgggcttctcctggtgcttatggaatgggtggccgttatccctggccttcatcagcgccctcagcaccacccggcaatctctacatgactgaaagtacttcaccatggcctagcagtggctctccccagtcacccccttcacccccagtccagcagcccaaggtaggagacctaaatgttgttcctttaatgtgtgtgtaattaggagaacataacatggtttatatagtttctgtactggtttgtgttaaatggggactaattacaaaaagttggtgactacttatctatagctttacctcagctcggtttcctttttcttttttttaatagactttatatttagagaagatttagattcacatcgtttttgttaaaagacagaaagatacacattttctgtttgttgtaattcttctaaacgttaaatgcaaagatgcattttactacttcaaataatctatgaacagaagacaaaaccaatgtgaaatatctgtagcatgagcttgtatttaaaccacagacttgaacattatcacttgtggctgtgttccttttcaagaccttgcttgaggtttttaaccttttaggggaaaaactaattcttattaattaggtcacaggatggactatgaggtgctcatggtgatggacctgccacagggcaggttccagccattataactcaaaaattctgtgccttttgtctgacagggcactcccttttatcttcttaggactgtgtttttttgcaaatgattaaggagaggggtccaattttattgttagggaatcttttcatgtacctttctggtcaagtgaaagatgtgggctaacaaatttgatgttgatgcattcccattaaaacagctcttttcctctttttgctctcccactccaaggattcttcatacccctatagccaatcagatcaaagcatgaaccggcacaactttccttgcagtgtccatcagtacgaatcctcggggacagtgaacaatgatgattcagatcttttggattcccaagtccagtatagtgctgagcctcagctgtatggtaatgccaccagtgaccatcccaacaatcaagatcaaagtagcagtcttcctgaagaatgtgtaccttcagatgaaagtactcctccgagtattaaaaaaatcatacatgtgctggagaaggtccagtatcttgaacaagaagtagaagaatttgtaggaaaaaagacagacaaagcatactggcttctggaagaaatgctaaccaaggaacttttggaactggattcagttgaaactgggggccaggactctgtacggcaggccagaaaagaggctgtttgtaagattcaggccatactggaaaaattagaaaaaaaaggattatgaaaggatttagaacaaagtggaagcctgttactaacttgaccaaagaacacttgatttggttaattaccctctttttgaaatgcctgttgatgacaagaagcaatacattccagctttcctttgattttatacttgaaaaactggcaaaggaatggaagaatattttagtcatgagttgttttcagttttcagacgaatgaatgtaataggaaactatggagttaccaatattgccaagtagactcactccttaaaaaatttatggatatctacaagctgcttcttaccagcaggagggaaacacacttcacacaacaggcttatcagaaacctaccagatgaaactggatataatctgagacaaacaggatgtgtttttttaaacatctggatatcttgtcacatttttgtacattgtgactgctttcaacatatacttcatgtgtaattatagcttagactttagccttcttggacttctgttttgttttgttatttgcagtttacaaatatagtattattctcta

SEQ ID NO: 1139 - DNA, 635 bp, Homo sapiens
ggaaattttagtgggaagaggaatatatttaagataactctacaaaaataagatgatactcaatctgagcttttaatttttatattgttatgctgcttcattttgatttaaatatctcaccaataaaatgtacttaaattttatttttaatagtaattttcacgtataaacatgattttaaatgtttataagaaatatgaccaaaggcaagaaatctttaaaaagatatgcagtatcaccttaaagagttacattcaattgtcagtgtttcagaagacaagaaacaatctctgcaacaaaacaaaccaaaagaaaacaacatttaataattaggtaagtgacttccaggaaaatccacatgttatttaggacaacaacatatattaatagagtactattaagtattactaaaaagggaagaagaaaacaattaagattattgaaaaatgttttcatagaggtaaaagaatgggtgggaggaacttctgacaattaaaatttttactttgatagacttaatgaaaaatgtaattagaagggagtaaagtagttatgaaaaaaataatgaagaataatgtaacgtgacttttatatagctttataagaaatttgtttttaaacttttagaataaaaa

SEQ ID NO: 1140 - DNA, 1169 bp, Homo sapiens
gattgttatattctcttgctcagttgacctctttattattatatagtgaccttatttttctcttcttacagtttttgtcttgaaatctattttgactgatacaagtgtagctactccagctcttttttgcttttgtcgccatggaatatctttttttcatctgcttattttcagcctatgtgtgtctttataagtgaaatgtgtttcttgtagacaacagataattgggtcttgtttttttatccattcagagccactctgtgtcttttgatttgagagtttagtgcgtttccattgttattaagaagtaaggatatgttctgccattgtattgtttgtcttttgcttgttttgtggtcttctcttcctttcttcattccttcatttcttttattgaaggtgattttgtcttgtggtatgatttaatttcttcctttttattttttaggtatatgttatatggtttttgatttgaggttatgatgagtcttgcaaatattatcttacaacctattattttaagctgataaccacttaacattgcataggcaaaaacacacagaggcaaaaagaaaaccaataaaagctctacactttagcctcttgctttttaactttttgttgtctctgtttatatctcattataatttctatgtcttgaaaagttgtcattattagttttggttggttcatcttttagtctttctccttaagatcagagtattttatatatcacatttacagtgttataatatgctgcatttttttgtgtacttactattaccagtgagttttggaccttcagttgatttcttattactcatcaacttccttttctttctgattgaaaaactcccaggctggacacggtggcccatgcctgtaatcccagcactctgggaggctgaggtgggctgatcccttgaggtcaggagttcgagaccatcctggaaaatgtggcaaagctccatctgtactaaaaatataaaaaattagttgggtgttgtggcgagcacctgtaatcccagctacctgtgaggctgaggcaggagatcgcttgaacccgggagacgaaggttgcagtgagccgagatcgcaccgctgtactccagcctgggtgacagagcgagacgccatctcaagaaaaaaaaaaaaaagaaacagaaaaa

SEQ ID NO: 1141 - DNA, 1169 bp, Homo sapiens
gattgttatattctcttgctcagttgacctctttattattatatagtgaccttatttttctcttcttacagtttttgtcttgaaatctattttgactgatacaagtgtagctactccagctcttttttgcttttgtcgccatggaatatctttttttcatctgcttattttcagcctatgtgtgtctttataagtgaaatgtgtttcttgtagacaacagataattgggtcttgtttttttatccattcagagccactctgtgtcttttgatttgagagtttagtgcgtttccattgttattaagaagtaaggatatgttctgccattgtattgtttgtcttttgcttgttttgtggtcttctcttcctttcttcattccttcatttcttttattgaaggtgattttgtcttgtggtatgatttaatttcttcctttttattttttaggtatatgttatatggtttttgatttgaggttatgatgagtcttgcaaatattatcttacaacctattattttaagctgacaaccacttaacattgcataggcaaaaacacacagaggcaaaaagaaaaccaataaaagctctacactttagcctcttgctttttaactttttgttgtctctgtttatatctcattataatttctatgtcttgaaaagttgtcattattagttttggttggttcatcttttagtctttctccttaagatcagagtattttatatatcacatttacagtgttataatatgctgcatttttttgtgtacttactattaccagtgagttttggaccttcagttgatttcttattactcatcaacttccttttctttctgattgaaaaactcccaggctggacacggtggcccatgcctgtaatcccagcactctgggaggctgaggtgggctgatcccttgaggtcaggagttcgagaccatcctggaaaatgtggcaaagctccatctgtactaaaaatataaaaaattagttgggtgttgtggcgagcacctgtaatcccagctacctgtgaggctgaggcaggagatcgcttgaacccgggagacgaaggttgcagtgagccgagatcgcaccgctgtactccagcctgggtgacagagcgagacgccatctcaagaaaaaaaaaaaaaagaaacagaaaaa

SEQ ID NO: 1142 - DNA, 702 bp, Homo sapiens
tttttttttgaatttttaaaattattattatactttaagttttagggtacatgtgcacaatgtgaggtttgttacatatgtatacatgtgccatgttggtgtgctgcacccattaacctgtcatttagcattaggtatatcacctaatgctatccctcccccgtccccccaccccacaacagtccctggagtgtgatgttccccttcctgtgtccatgtgttctcattgttcaattcccacctgtgagtgagaacatgtggtgtttggttttctgttcttgcaatactttgctgagaatgatggtttccagcttcatccatgtccctgcaaagggcatgaactcatcattttttatggctgcatagtattccatggtgtatatgtgccacattttcttaatccagtctaccattgttggacatttgggttgattccaagtctttgctattgtgaatagtgctgcaataaacatacgtgtgcatgtgtctttatagcagcatgatttataatcctttgggtatatatccagtaatgggatggctgggtcaaatggtatttgtagttctagatccctgaggaatcgccacaccaacttccacagtggttgaactagtttacagtcccaccaacagtgtaaaagtgttcctatttctccacatcctctccagcacctgttgtttcgtgacttttaatgttttctt

SEQ ID NO: 1143 - DNA, 702 bp, Homo sapiens; identical to SEQ ID NO: 1142

SEQ ID NO: 1144 - DNA, 8143 bp, Homo sapiens
ctgcatcctccgtgcccggcctgagctggagtcccccgcgccccccgcgttccgcccggccatggctgcggtggcgctgatgccaccgccgctgctgctgctgctgctgttggcgtcgccgcccgccgcctccgcgccgtccgcccgcgatcccttcgccccccagctcggggacacgcagaactgccagctgcggtgccgcgaccgcgacctcggcccgcagccctcgcaggtgaggcgcgtgcggtgccaggtgccagcgggggacgcgggatctctccgaaggaggaggcgttgggatgggcttctcttggatgacagcaggagactttggtgggggtgtccgtggggaggtgggggtcgggaatggggagatctctccagtagttgacgggctggggttccctctgatgggggagtgcttggggatgcaggtccttgcgataaggggccgataccacctcccgggctccttccgcactctgctgggtaaggaccctctagcacccaacccccagctccctcaggcctgatggtccccccacctcattcctcctcctccacatcgtgttccctccccactcagagctaccagcccctactcataccaccactccccaggattcaagcctgatctgcgtgtgaccaaaaccccctcctctgagcctccccctcctcctccaggtctgagaatccttctccatgtctcccctcctccctggaacctagtggggggaaggctcatttctctccaccttcactgtccatttctcttctcaagctccctccccatctccctcctcagagctaagagcccccactaatatttgtagcctctcccaacttcatctccatctggctagatgtcgtggggagcggggaagcctttccctgcctctgctgaatgctccggtccccccaccctcctcctgcccctccccatggcctgagccccctgtcctcccctcccccaggcggggctggagggcgcctccgagtctccctatgacagagccgttctgatcagcgcttgcgagcgtggctgccgcctcttctccatctgccgatttgtggccagaagctccaagcccaatgccacccaaactgagtgtgaagcaggtgagggcccgccggcagggtgggccagcgtggggagaggtggcctgggaagggccgtccccagtcacccgctcccacctcccacagcctgcgtggaagcctatgtgaaggaggcagagcagcaggcctgtagccacggctgctggagccagcccgcggagcctgagccggagcagaaggtgggcctcccactgcggcctggggtcccttttcccaatacccccaccctcttcaccccgtgggaaatcttcattcacgtgcagaggctctgccagactctgcgttctataccaggcctgcagggcaacctccatccagccccgtcatgtctccagccttagttacatgcaacaacgccccccatgccccaccaccttttcaggaataagtggcagaaaacagccatcatttatcaaacatctgtcctggttcgggcctgacttcaacctgtcccaaatgtttttgtgtcacttggaggcacaaaggacaatgtcacccccatttagtgcccagggggcaacctcccaggtcatacacagggctgtgcaaggggcgagatttgaagccaccagagctgtggccactcctcacctcactcctcttaggcgcccccagagctgccaggtgctggtctaagcccttcccctgtgatgagctggtggtcactgtcacctggaggggctcagaactgcggctcagggtagagcaggcttgcctcgcaagcacgcacacactgccttatgggagaaataataacggttcatctattgtagtccaagcaatgctgcatcatggggaaactgaggcacagaaaatcatgtagcatagccagagacctaggggctgggactccccagaaagccctttccccacttcccccattttcctccaccccttcccagctttcactgctgttcagaaaagctcactgcactgtcagcccttccaattcagagctccctcttatttatttatttattttttgagatgaagtcttgctctgttgcctagcctggagtgcagtggtacaatcttggctcactgcagcctccgcctcccgggttcaagtggttctcctgcctcagcctcctttgtaggtgagattacaggcaccccccactacaatcggctaatttttgtatttttaggagagacagggtttcatcatgttggccaggctgatcttgaactcctgacctcaagtgatcttcccacgtcggcctcccaaagtgctgggattacaggcatgagccaccatggccggccatcagacctccgtcttgacgctgtcaaaataagaataatgaggatgatgatatttttagtaatagggactactacgcattaagtgcctgtgccgtgccaggcacctggcaggcatcctctagttgaaatttcatggctactccatgaaggaagagaacgatacccattttagggctcagagagcacaatccacttccctaagggtacacaggaagccaactgccacgctgagatctgtgttcactataagaagtcctattggcccaaatcacttagccacatccaatccaagtgaattctcctagctcctctcctgttagtttatttattcatttatttatttgagatggagtctcactctttcacccaggctagagttcagtggtgtgatcttggctcactgcaacctctgcctcctgggttcaagcaaatctcctgcctcagcctctggagtagctgagattccaggcgtgcgccatcatgcctggctaatttttgtatttttagtagagacagggtttcacgatgttgtccaggctggtctcaaacttctggcctcaagtgatcggcctgcctcagccttccaaagtgttgggattacaggcgtgagccaccacatcctgccccctcccattcattggttaatgccctatttcggtgccatctttgtgtcttggaccttttttcaccagagaaaggtcctggaggctccaagtggggccctctccctcttggacttgttttccaccctctgcaatgaccttgtcaactcagcccagggatttgtctcctccacctggacatactacttgcagactgacaatgggaaagtggtggtgtttcaggtgagacctctgacaggggccacgccagagtggcagatgggtgggcagggtaagaagatgggatgcattggctcttagctcatgagatgcaaagtccacagtgggcgagcttcaggcacagctggatccaggggctcagtgtctcactccatgccttgactctgctttcttttgtggtggcttcattcccaggcatttacttcttcttggcagtaaggtggatgccagaggctctaggttacaaacgctgtggtttttttttgttgttgttgttgttgttttgagatggactcccattcttgttgcccaagatggagtgcaatggcatgatcttagctcactgcaacctccacctcccaggttcaagtgattctcctgcttcagcctcctgagtagctgggattacaggcggccaccaccacacccacctaatttttgtatttttagtggagacggggtttcgccatgttggccaggctggtctcgaactcctgacctcaggtgtttcacctgcctcggcctcccaaagtgctgggattacaggcatgagccactgccccggctccctctggggttttaactgagctgggatttactctgattggccctggctggatcatatgaccatctctcaggcaattcactggcttggtctggatcatgttcctacttctggagctaaaggatggggttaaggcaaatggaggagcccatgaaagcagaaaacaacatccctgacatcaagcccacccctgatacccaggggaactgggtatcagctgggcgtgggacatggcagtcacagagggcctgcctgggcccaggggtgctgttctcacaagcctctctgtgctgtcttgttcctggcccagactcagcccatagtggagagcctcggcttccaggggggccgtctgcagcgcgtggaggtgacctggcgaggctcccaccctgaagccctggaggtgcacgtgggtaaggtgcaacctagaccagtgttccttccatgggtggccccactgccacaaggagtcggcctggcaaacagaccttctaggatcgggatctccatctctcaagtcctgggttccatggctcatcccccaggtctccatggtctatttcccagggttccatggtccacctcccagggttccatggtccacttctcagggttccgtggtctacttcccagggttccgtggtccatctccccgggttccatggtctatttaccagggatccgtggtccacctctcagggttccgtggcccacctcccgggttccgtggccacctcccagggttccgtgttccgcctcccagcgttctgtggtccacctcccagggatccatggttcactttccagggttctgtggcccatctccctgggttctgtggcccatctcccagggttccatggttcatctctcagagttccatgggttcatctcctagggtcatctcctagggtccatctccaagggttctttggtccatctctcagggttccatggttcatctcttaggattctgcagttcatctcccagggttctgtggcccatcccccagggttctgcagtccatctcccagggttccatggtccatttcccagggttccatgttccatctcccagggttccatgttccatctcccagggttccatgggttcatctcctaagggtcatctcctaggatccatctcccagggttccatgggttcatcttctagggtcatctcctagggtccatctcctagagttctttggtctatctctcagggttccatggttcatctcctaggattctgcagttcacccccagggttgcatggttcatctcctaggatccatctcccagggttccatggtccctgtctcagcattctgtggtccatctcccagggctctgatctccattccaggactctatgccccaggtcctgacctcctccctcctggtcatggttattgtggcctcttagcaaagacctggtggtcgctgagtggcagctgatctctcagaccctgtaggccccctggacaaggtgaggaaggccaagatccgagtcaagaccagcagcaaggccaaggtggagtctgaagagccacaggacaatgacttcctcagttgcatgtcccggtgggtggcaggaccttgggggtgggaggggggtgggactggaggtacgggtctccctggtcccggcctgggcagctgagtggtgcctgccgggcggggcaggcgctcgggtctgcctcgctggatcctggcctgctgcctcttcctctccgtgctggtgatgctgtggctgagctgctccaccctggtgaccgcgcctggccagcacctcaagttccaggtgggtgggatctgtgaatggcgctgggccgagggagggggtgaaggcagagagagctgtttgctggtcctggatttggccacctgctcccatggaggccaggacctcagacatttttttcttttttcatgtatatacatatatatacatatacgtgtgtgtgtgtgtgtgtgtgtgtgtgtatatatatatatataatatatatatatatattttttttgagatggagtcttgctctgtcacctgggctggagtgcaatggcaccatctcggctcactgcaacctccacctcctgggttcaagcaattctcctgcctcagcctccgaagtagctgggactatgggcgcgggccaccacacccagctaatttttgtatttttagtagagacggtgtttcaccatgttggccaggctggtcttgaactcctgacctcaggtgatccatccgcctctgcctcccaaagtgctgggattacaggcgtgacccaccgcgcccggcctatatatatatttttgagacaggatctcactctttcacccaggatggagtgcagtggcatgatcacagctcactgcagcctcggcctccctggctcaagcaatcctcctgcctcagcctcctgagtagctgggaccacagtcacgtgccaccatgccccgctaatttttgtattttttgtagagatggggactatgttgcccaggctggtcttgaactcctgggctcaagtgatccacctgccttgccctcccagaataccgggattacaggcatgagccacctcacccagccaggacctcacacttgctgcatgacttgggccagtttcttcactgccctttgaattggtgggaagaaaatccactcttagttggggcgacatgaagtcagaggtggccacacttctgtggtgttggcctcacctctatcatgcccaggtgtgttggtgacacctctgtggtgcccagagcctgggcaacatagtgaaaccttgtcactacaaatcatttaaaaattagctagatgtggctgggcatggtggcccatgcctgtaatcccagcactttgggaggccgaggtgggcggatcacgaggtcaagagattgagaccatcctggctaacaaggtgaaaccccatctctactaaaaatacaaaaaattagctgggcgtggtggcaggtgcctgtagtcccagctactcgggaggctgaggcaggagaatggcgtgaacccaggaggaggagcttgcagtgagccgagatcgcgccactgcactccagcctgggtgacagagcgagactccatctcaaaaaaaaaaaaaagaaaaaaaaaattagctagacgtggaggtgcatgtttatgatcccagctacttaggaagctgaggtgggaggatcacttgagcctgagagttcgaagctgcagtgagctgtgatggcaccactatactccagcctggacaacagagaagaccccatcacacacacacacacacacacacacacacacacacacacacacacacaaaagtccaggtgtggtggctcacacctgtaattccagcactttgggaggctgaggtgggcagatcacttcaggagttcgagaccagcctagccaacatagtgaaaccccatatctactaataatacaaaaattagctgggcgtggtggcgtgcacctgtagtcccagctacttgggaggctgagaaaggagaatcgcttgaacctaggaggcggaggttgcagtgagctgagatggcgccactgcactccagcctgggtgacagagagagactctctcaaaaaaagaaaaaaaataaaacaatcagaggtgggaaggagacagtcagggttgggggctcggcctctccccgtccctccacttccctcctcccctctcttcctgcagcctctgaccctggagcagcacaagggcttcatgatggagcccgattggcccctgtacccgccgccgtcccacgcctgtgaggacagcctaccaccctacaagctgaagctggacctgaccaagctgtaggcctccactggccccatcactgccaactgcagggggcccctcgggcctcacttgccctgagcccaggagtccaagggcagggtgggtccagccttgagcccctccacccccaaatccttcctctcctcccagtcccaccccttgccccacggagtcctggggacgcagtgccccagctgggaagagggcgggatcgggcactggttcctccttgtccccgctttcttgggggcttgctactttttgtcttctattgtgtggctttctgagtatttgaaccccagtcctgtgtcaccttcctttttccttctatgtcccctctctgcggggggggcgctgaggctgagggggagctgcgtcttgctagggcttcccccttctccccatcccggtctccagagacccagcttctgagagacagggtgtgggcatctccatgcccctataaagcgtgcctggggcttgtctggggctggggaggaataaaccatgtatataaaagag

SEQ ID NO: 1145 - DNA, 13275 bp, Homo sapiens
gcgaaagtccagcttcggcgactaggtgtgagtgagccagtatcccaggaggagcaagtggcacgtcttcgggtgagtgtgcggctgtgctggagcccgggttaccagctcttgcccgcgcggaataggctttaagaaatcggagctgcagccatctgtttttctcttaatgctgcatctctgttctcacggtggtccttggggtgaggttagagaaggagccgagggatcctgacaccacctccacagcaccggcgggcgaggtgccctactttaggcgtagccttctgcttttggagccagatgtctgtggacttctgttcgcgttcagaaatgccgcctcaaacttctctcaattgttcattaagtgaacttctctcattcccttcccctttgccgataattggaggggaaaagaagtaggaagcgggacacggtgtcctggggcaagggacttattacctaaaattcgcggccccttctgtccctaaaggttcttctccctgcccactttttggtctctttttagacctaggctgcccctgccgtcatgtcgcaagggatcctttctccgccagcgggcttgctgtccgatgacgatgtcgtagtttctcccatgtttgagtccacagctgcagatttggggtctgtggtacgcaagaacctgctatcagactgctctgtcgtctctacctccctagaggacaagcagcaggtaaaggaactggggagtggctggggcggaaagtgatatcctcaggccaataattgtccatacagggtagtatgaggtcaaagactagcaatcctaaaggtctgagatcaattcaaaattaagggcatttaggacaaaatggctatgaaaagaaaaaaagaaaaaaaaattaagggcatgacaagtaaaaaaaaaattgagttgtgtgtccagaagaactataatttgcattgcattaatgaaataccctcaaatgcatgctcttagttaatctttcagggaataatagttatctctctttgccttgaggcccagttgtgctaaataatttgcacaaggtcatataggcattatgtaagtggaatgtatgttcaggttttaatagtatcaccatagcttcaatttgttgtaggtttcctgctaggccagggtttctcagttacagcattattgacatttggggctagacagttcttgtagggatctgtcctgtacatttcaagatgtttaatagcattcttggcatttacccactagatgtcagtagtgccttcccatttgtgacaatcaaaaaatgtcttcaggcacttcaggcattgctaaatggcccttggagtggaaatgaccctggttgagaaacactgtactaggtcctatgctaaacattaacatacattgtcagattttgtgctcttatagagtttctcttagagacttataaagttccatgagagcatggtccttgatgatgtctctcactatggactatcagagcttctcagttcctaggccatagtagacactctaaatatctgggttttttttgttttttgggtttttttgttttcgagatggagtctcgctctgtcccccaggctggtgtgcagtggcacaatctctgctcactgcaacctccgcctcccgggttcaagcagttctccctgcctcagcctcctgagtagctggaattacaggcacctaccaccaagcccagctaatttttgtatttttagtagagatggggttttgctgtgttggccagactggtctggaactcctgacctcaggtgatccaccctctttggcctcccaaagtgccgggattataggcgtgagcccctgcacccagcctctaagtatctgttgaatgaatgacataggtgctattattaaccccattctgcagatgaggaaactgaggccaagaatttcaagaactcataattcaaggtctcatagttactaagtcatggaattgggactcaaattcaagtgtttgcctctgctttgctttaatatcacatactaattttcataccagtcaataaattcgaactcagatcatcggtgtggcaagccacatttgcaggataatgacgagacagggaagggtgacaaagtagtaaaaatgtccatgtgggttggaatgattgtggaaccaaagagtagctgcacagagacatttgaggtgaaatggggtagtgttatcatagttcctagaaactactgtttgcccatttgctcagaggtaactgctgaaattaatctgtggttctgggctgggattctgccacaggttccatctgaggacagtatggagaaggtgaaagtatacttgagggttaggcccttgttaccttcagagttggaacgacaggaagatcaggtaagtgtctgagaagggaggattcaaggtgaaatgatgcagtacaaaagattcccaggaatgccttctgtgacaactgtattttctcccttctcagggttgtgtccgtattgagaatgtggagacccttgttctacaagcacccaaggactcttttgccctgaagagcaatgaacggggaattggccaagccacacacaggttcaccttttcccaggtatggagggtactggtttgtgaacaaaagaccaacatgtaagggcaactttattccctctttagagggaaagcttctcttcctgactgtgagttccttgtatatgcacacctacaattttgagggccctagttatgtgttagtcaatgtgtcaagtaacatatgtatatcagttctgaaaaattctattgttattatcattatttccttattttcctcacaaggatagtgtggctcaatgaatgtaatattgctgaagccatgtagctagtcactagtagagttaggacctgagtctagatccatgtatctccaaagcccatacttgtgggccattatattgccccattgtgtgtgcagcatcaggcctagggcatagcattccttaagtgtttgttgatttggtggaaagatggactagcagagagtgcttgagtcctcagtgtttagggaacagccagcagcattgcaggaagaagctgcttgagtggtctccagagccaaccactcaggaaggaatatatctgctggctctgcacaggaggcaagtgggagatgaaggagaggcctctaaaaaactgggtctctctctagatctttgggccagaagtgggacaggcatccttcttcaacctaactgtgaaggagatggtaaaggatgtactcaaagggcagaactggctcatctatacatatggagtcactaactcagggaaaacccacacgattcaaggtgagtagtaagccttcacgggattcctgattggctggtaatggtgttgtttttaccttttgagactctgagttagggggagaagggcacttgcctcagctgtccatctttcatatgcctccaggtaccatcaaggatggagggattctcccccggtccctggcgctgatcttcaatagcctccaaggccaacttcatccaacacctgatctgaagcccttgctctccaatgaggtaatctggctagacagcaagcagatccgacaggaggaaatgaagaagctgtccctgctaaatggaggcctccaagaggtaaagcattggtatccatggcagtgggggtagggggtacaaatctcggggaagttttgtgcttaccttctccctgtgcccctccaggaggagctgtccacttccttgaagaggagtgtctacatcgaaagtcggataggtaccagcaccagcttcgacagtggcattgctgggctctcttctatcagtcagtgtaccagcagtagccagctggatggtatgtaccgtgactgggctctgccaaaaaatagtaggaactcactccctgttcctaatagctgccaggagtacagaccagaggttgcaatctaaggtctgccttccaaggcccctgcaggccaaaagagaggtgaactgctctaggttgatgccctatacattggcttcttctccagaaacaagtcatcgatgggcacagccagacactgccccactacctgtcccggcaaacattcgcttctccatctggatctcattctttgagatctacaacgaactgctttatgacctattagaaccgcctagccaacagcgcaagaggcagactttgcggctatgcgaggatcaaaatggcaatccctatgtgaaaggtaaaggaacatggggaaagctggcatgaaccctggagggcaactggggagagactggcaaaagagttggatgttcccatcttacacccctctcctttggccccagatctcaactggattcatgtgcaagatgctgaggaggcctggaagctcctaaaagtgggtcgtaagaaccagagctttgccagcacccacctcaaccagaactccagccgcaggtgagtagattgtaagaataaactcttcactgtgttccaggaaacattagtcctctgcctggtcatggaaaatgtgcaatgactttttgtttttcttaacttccagtcacagcatcttctcaatcaggatcctacaccttcagggggaaggagatatagtccccaagatcagcgagtaagtttatccatttagaaatttgggcttcttggccataaatgatagttgggaaagcatggaggaggtcctcaggggaactatgtgttctccttctttgggtacagagattcttagtgggccgtcccctctccagaattatacaaagggccagaaggctcataacatgtgaggcccttatgtcagatcctgtgcatcattctaggctgtcactctgtgatctggctggctcagagcgctgcaaagatcagaagagtggtgaacggttgaaggaagcaggaaacattaacacctctctacacaccctgggccgctgtattgctgcccttcgtcaaaaccagcagaaccggtgagcttttgactataattcctgggctctgcaatttgctaagagacttcctggacaccactggggatggtgctaggatacccaaagggctggtgttctgctcacagctctattatctctgattctctgccaggtcaaagcagaacctggttcccttccgtgacagcaagttgactcgagtgttccaaggtttcttcacaggccgaggccgttcctgcatgattgtcaatgtgaatccctgtgcatctacctatgatgaaactcttcatgtggccaagttctcagccattgctagccaggtgagaagctagaggtgtgatgggtgtgcgcacttggaactggtaactctaagaaagctcctagggactacttatggagtcaagtaagatattttttttccctctagcttgtgcatgccccacctatgcaactgggattcccatccctgcactcgttcatcaaggaacatagtcttcaggtatcccccagcttagagaaaggggctaaggcagacacaggccttgatgatgatattgaaaatgaagctgacatctccatgtatggcaaagaggtgagaatacaagaaagctttagtgtagcagcttagtagctacacatttttccatggtgccttccaggtgggcttgtgccttctgagggcatgagcatctgatgacctctgacatgtgtgtctctcctaggagctcctacaagttgtggaagccatgaagacactgcttttgaaggaacgacaggaaaagctacagctggagatgcatctccgagatgaaatttgcaatgagatggtagaacagatgcaacagcgggaacagtggtgcaggtactagctgagtgacccctcttgctctgtcacctgagacagagggtgggaagtaaggagttaggtggagttgtgcctcaagatctgttccccaagttcactcctcagaaccttcacttacctctcttttctcctctgtttctgacagtgaacatttggacacccaaaaggaactattggaggaaatgtatgaagaaaaactaaatatcctcaaggagtcactgacaagtttttaccaagaagagattcaggtgagttgccctgagccagctccaattagctgctcagatttccatcactagcttgcctgaagtaaagagattttataaactactccagtaagggcaggaatatataactcccttttctctattccccatagtgctttgggttcaatctatgtttggtgaattgattaagggtttagttggccaggaaatcgtattaagtgctaacaacaggttttcaagggatcagtgtcacaagtgctttgtttgttcagtcatctgtcttagcaatatttttctggctctgcaaagaattgtgctctctgcttccctcttaggagcgggatgaaaagattgaagagctagaagctctcttgcaggaagccagacaacagtcagtggcccatcagcaatcagggtctgaattggccctacggcggtcacaaaggttggcagcttctgcctccacccagcagcttcaggaggttaaagctaaattacagcagtgcaaagcagagctaaactctaccactgaaggtgaggaaagagacaggcaggaaacataacagtggttcagggaagagctgttacttaaacccaggccttctaactcctgctctaacataatttcctaaactgcaagctacatccccctgacatttcaatctaggatacacatagcctcactttttatatttgctgcaagctactgttacctcagttaaagaggttagtccaaggctaaaaaaaccccacatattttaagtttcctgtttccttccctcagagttgcataagtatcagaaaatgttagaaccaccaccctcagccaagcccttcaccattgatgtggacaagaagttagaagagggccagaaggtaattaccaccattctctgtttaccaaactcttacctaaggcaatttcccacatccaacactctatcactggttcatgtgaagacaagatgttttttgtgcacagttctggagagtggctatttcactcagctgactagcctttctaattttacttctcttcaaatggctacctgacccctccagatcattatcctggttgctcttggccacaatatgattcctacttcccctttttcagaatataaggctgttgcggacagagcttcagaaacttggtgagtctctccaatcagcagagagagcttgttgccacagcactggggcaggaaaacttcgtcaagccttgaccacttgtgatgacatcttaatcaaacaggttagggcaaactatatacccacttctgtcctaccagcccactccagtgtatatgtgagaaaggaaagaggaccagaagaaaaaggtaaagatttttaggctgaatttatagtgagagcagtatatttgcaaaataaaaataactattctttgttaagcatttactaagtaccaggcactgtgctaagtaatttataggcattttctgtcacaaccaccttagggaggtagttactgtcatatttcatctaagatgctactgattataagaaaccattattttatgtactactaagaaaaaagtaacaatttctcatcagtaagatgcatcctgattccaaagagattaaaatgttaaaattgtgtatcttaaactaaactcaacatttaatttgacatttagagactgaggcacttagaaattaaatttactcaagctcatactaccttatgtgttagaagatgtcctattcagcactgcttatgttttgttctcagaaaatgtccccttattcagttataagctccgaccttaaagagttttaatctttgaagaaacagttgttagtaactagtaatggatggtatgtattacccttagccctctcgtttctctaatataccagacaaaagtgttttctataactttattgatcttccttaggaccagactctggctgaactgcagaacaacatggtgctagtgaaactggaccttcggaagaaggcagcatgtattgctgagcagtatcatactgtgttgaaactccaaggccaggtttctgccaaaaagcgccttggtaccaaccaggaaaatcagcaaccaaaccaacaaccaccagggaagaaaccattccttcgaaatttacttccccgaacaccaacctgccaaagctcaacagactgcagcccttatgcccggatcctacgctcacggcgttcccctttactcaaatctgggccttttggcaaaaagtactaaggctgtggggaaagagaagagcagtcatggccctgaggtgggtcagctactctcctgaagaaataggtctcttttatgctttaccatatatcaggaattatatccaggatgcaatactcagacactagcttttttctcacttttgtattataaccacctatgtaatctcatgttgttgtttttttttatttacttatatgatttctatgcacacaaaaacagttatattaaagatattattgttcacattttttattgaattccaaatgtagcaaaatcattaaaacaaattataaaagggacagaaaaattaagaatcaaacatcactctggaccatgggaaccttgaaaaggcatggcagtggagaccagtaactagtatacagcttgcctgagaaggcttagtaacaaatgaattcaagtcgtattagatattctaaaccttccttaatataagatgaagtgtcatatgttaggaggtaaaaacgtaacacaaaattctgggaataagaataaagtctggaccctgagctcagaatgatccatagcatctactgtgcaaatatattacagcagacattatagcatattacctcctgctgtacacacatgcacaggcctgaaactctccaagagcaccataagaatgattccctttacctcatctagataaaggctgaaaaaaatgtattctgttgcagatgggagggaaaaaaatagacaattacgttgaaaatttattaaaacagaccagcttgaagtgagtttattcttgtctgtataatcaccaatgttatttccaaatgtccgtgaaattatctataatcctatctccttgcttgctttggtaggagtatagctaacaatatagccatcttttgccctcagtaagggctatcagcagttccaagctctgtgagattatttttgcccttcttttattcaactctagttgaataaagttacttccaatttgaaagctttagaagacccccccaaaactgttttggaagattgtctccctagagagtaagaacaaatggatagctctattccatttaaacctaatctctgacatcagaatagggatcatgctcagcaaatccaagagcaaggtcatttgtatccattgctctgacttcttcctagggtactcagtgccctactgccagctcagggtagagtggcagactttcctcctttctttcactctcagcagcattgaaactttgttcctgtagcattgcctgtgctaaagtgctataaaagggactttcttgggggccaaaaaaaaaaagcattcagggaagaaggccaagatctatagccactctttggacataagtgagacagaagtacttctaactggcaagataatgtctgttcctgccaggattctgtcagttggcctctgaaggtaattatacaagctgtccctatggagctgttgccatctgtagaaacaagaagagctgaggtccttggaacagacgtgctgttctttacatggaggtaaggcttaattaagatgggtctaacaatgtgctggcttgagagtagccaactatggcgtgacagaagacaagttgagtggagaaactctgcgtgtgggggtattgttagcagagagtgaagcaggtaggaaaaagggagcaggcacctcggtggtaggagtctcgccttggttccgaagctgtaggatttgccggagtaaggccttaccttcttcccgggtctgcaacaaagtcagggaaatgtttcaaaacatgtccaaagctagtctcgaaaacaagttattaagatgctgttaaacaagttccacagatcaaggaggcgggaggcttgcttgttttttttttttgagatggagtctcactgtgtcacccaggctacagtgcagtggtgtgatcaaggctcactgcagcctcgacctcactgcagaggatcaagtgatcctctcacctcagcctcctgagtagctgggaccacaggcatgcaccaccaaacctggcaaaatttaatttttgtagagacaagctctcccttttttgtccaggctggtcttgaactcctggacacaagcgatcctcctgcctcagcctcccaaagtgttgggattataggtgtgagccgcttgcctggccaaggtaggctttccacttaaatatcttatgttctagcctaaaattcaaaccttttattaaagaactgatactcacatcattaaatgcacaacacttttgtgcacaagttgaagcttcatcccacagtttgcacttaaaatagtactgggccagatagcgaaaggcagtgctttcctccaagtgttctactatttcctagaaagggaaagcaaaattactgaggtgacagtaataatatcagcagtacaattctcatggtatgatacataccccacaggaatagatatcttggatatatttgatgtaacactgggcagcctgttctgactcagtcaactgttcatgaagcctacaaaagaaactgatctttaaataccaatgatatcccaaagcaacttagtgataaaaaaagtaaaagtacataagaccaaaaaaaacaatacataggtaagtatcaattttgacataaatgacactcttggaactagaatagtattagatgtgatagttactgttatcaaagcttagaatcattactctgctaatgatggaaggagagtcagtaaatattaatatctaagctagataaaccatccttgcaaaaattatctagtaatacccagagtaaagtggctcatgcctgtaatcccagcactttgggaggccaaggagggcagatcacttgaggtcaggagtttgagaccagcatggccaacaaggtgaaacctcatctctactaaaagtagaaaaattagccgggcgttgtgacacatgcctgtaatcccacctactcaggaagctggagcaggagaattgctttaacttggaaggtggaggttgcagtgagccaagatcataccactacactccagcctgggccacagaatgagactctgactccaaaaaaagaaaaaaaaaaaaaaaagctgggcactgtggctcacacctgtaatcccagcactttgggaggccaaggcgggtgggtcatcagagatcaggagttcaagaccagcctggccaacatggcaaaactctgtctctactaaaaaatacaaaaattagccaggtgtggtggcaagcgcctgtaatcccagctactcgggagactgaggcaggagaatcatttgaacccaggaggcagaggttgcactctagcctccgtgacagagcaagactccgtctcaaaaaaaaaagataacaagtggccaggcatggtggcatagggccataatcctagctactctctaatctggctgagaccaatgacttcaagaccaacctggtcatcacagcaagatcctatctataaattacaaaaaaaaaaaaaagataccaagcaactcaatttttttcctaagaatccagacaggaacctctttacatttaagaacctctttgcctactatttgagttattcctaatttttctggcccttagcaggaaattaatactgaaagtagtttgacacaaaaatgttatcctttcttcaaatcaatcttgatctcttgctttaataggaaagcaacggccctccttcaagagaagtagcattctctttttattttttttattttgagatggagttttgctcttgttgcccaggctggagtgcaatggcgcgatctcggctcactgcaacctccacctcccaggtcttgaactcctgacctcaggtcatccacctccctcagccgcccaaagtgctagaattacaggcatgagccactgcacctggccagaagtggcattctctaggaacaagatggctacattcacaaaccagcattcacacaccctgctacatccctacacctatgtagaatgatgggtgtatgggaggctctagaccatgcaggacccaccatcccagagaagccaacagaaatatcaatagcatttcactcctttcactcactttgccagtttcaccagagccattttctccacatctcccacggcgtaagctctccaataacactgtcaaaaaaataaactggtcattttgaccattgtcccatgtgtcacaactaaatcatatgaaggttaagaccctgcaagcctcccagaagttcagatttatagaatgcaagacatttttactagttctgataggtctaggctacacactgacattcccactgatgaccttggcccagctttgctttcagactatgtatctataaatattcagactttcctatgcacctagatcagaataagggaaaaattagagcacagatagcccaaccttcatctaaacagcagatttccactcaaattcttcaggacccaatttaaggtacctttttggcttccactagttgattgagtttctcgtaacattctcctaaagcaaccagcatgcgagaatcattgggtctgagaaagaagaacaggcagtctgagcaaagactttacagaaactgaagttctcttttgaggaaccagtacaccactatttcaaatctatgcaacaactggtctttaacctgatgctccatataatagattactttgtgttcataattatactattaacccattagtgaaatatactaaatgaaaataaccaaacagccttcagcaactttaacctcagatccccaagagccaaaaccatccactgtgatttgtcaatagctatcaaaagaggaaaaaaaagttattagcccttcccatatcagacgcattgtcaagtgaccaggcttaccgaagctggtgggcccgtctataataataaaggcagtaaaatggcatcttaaggatttcataggtctgcccgaggccataccaagctctgtagtcccgtttgttgacctcaatggcatgtctaagaaatggaaaagac

SEQ ID NO: 1146 - DNA, 39119 bp, Homo sapiens
ttcctattgtgtaaatacatttatttatagagtaaaaggcttagaaaagatctaatggaattgtctttaaatcaagccgatggaacaaagatgtgggcaacatttatggcataaatccaaacctcagcttcccctttttttctttatattatgtccacatgcatctttgactcgttggttgtgagttaaggtattattcttgttggaaaagaaaatgaggacatggcaaagaagtaccaggatcctctctaggtcagagttccgggagagattcaaactctagaaaaagtcaggatagcagctccaggttagaaaacaggttttccatcatctactgggttagctggttctccttccagactacttgagccttttcttttgtctaaccagatattcagtacctaaagggttaaggaacacatagcaagctattatgaaccttaaacactaaagtattgcaagtttatttttttggcaaatagactcaactatacttttttctttaaagtatgatgctacccagaaaagaaacccacaaatgtcttctagctactatatcttatcccctaaagatgggaaagtgtgaacgtacattaataacaacagatgaagcaaccaaaaaatacacagtgactccagcctctttggagtttagcccttgacttgaggctctggaagcgggaattcccattacttgtctatcctcagctctcttgagagctcttcactgctgcctgcattcctagactacttcactatcagagctggacttactgaggctcagggttttccaaaccagcaggcacattatcaatccttcagggccttaatcacctttaaaaataaactctgagaacacagtcacctcgaaatcacctttattctcataggcgttctgaaatcaagattccagaggctacaggtatctgcatacagtacctgaatctgctccaggacttctcgccgcatctccacagccatatggtatacatgatgatcagagtcattgtacattacagcattttggaacatcagcatcaggtctcgcaggaattgggccatggtgcgaatccgacccttagagagatttctcttcaggctagttaagtccatgggtctgcaggtggccaagaaaaaacaaagaaaatcaaaccttcatgtggaacatatgataacctaacacgttctcttgaagaactaaccagttcttaatgaaaacagtagcaaagataacaaccctcatcagataataaaatagcaacagcagttaatatttgcctgtttacaatgggccaaacactgtatttctatactaactcacttaatcctctcaataaacctgtaaggtaggtatcattaatatctcattttttttttttttgagtcggagtttcactcttgttgcccaggccggagtgcaatggagcaatctcagctcactgcaacttccaccttccaggttcaagcaattcccctgtctcagcctccagaatagctgggattacaggcgtgcgccatcatgcccagctaatttttgtatttttagtagagatagggtttcaccatgttggtcaggctagtctcgaactcctagcctcaggggatccaccttccttggcctcccaaagtactgggattacaagtgtgagccaccgcccccggccttattatctccatttcacagatgaagaaattgaaatctaaagaggttaagtactcactgaaaggcacacagcctgaattccaattcagaggcagcctgactccagagcccacaggtcaagccactatattctactatcagaggaggagtgctggccccaggtatcaaagttgtaaagagcaccaatcatcagtttatcacacagtagttatttgctgtttacaatgtatagtcatatattatttcatctacttctcttactgcacaaataaaaagctaagaataatttttttctcctttcatggagatgaaaaaaggatcaagtgaatattaagacaatattaatgagacacagaaagtagatatataagagaaggcacagcagtgtagaaagaagactgaactgcaggtaagaatctggggcttagttctagctctgctattaactgttggttgatcacgagcaagtcatgaccaagcacctctgagctttagtttcctcattcctaaagaagtttgtctctgctgtttgaatgatggtatcattgtctctgctgtttgaatgatggtatcccctccaaaattcatgttgaaacttaatcccaagtgcaacagtattaagaggtggagcctttgggaggtaattaattcatgagtgctctgccttcatgaatgggattagcatccttataaaagggctccatatcgaagagagtgccctcttatccttctgtcccttctgccatgtgaggatacagcattcgtcccctctgcagaatacaacaacaaggcatcatcttagaagcagaagcagagagtaacccacctcacacaccaaaactaccaatgccttgatcttgcacttcccagcctccagaaccaaaacaaagaaacatagatttctattatttataaattatccagcctgtggtattgtgctatagcagcacagactagtgactctccaaaggtcctatcatgatcttttacattctattaccatacaggtttatgacagcattttagatgacctatgctataaaaacccaaaataggccgagcacagtggttcaagcctgtaatcccagcactttgggaggccgaggcaggcggatcacgaggtcaagagattgagaccatcctggccaacatagtgaaaccctgtctctactaaaaatacaaaaattagctgggcgtggtgacgtgtgcctgtggttccagctactcaggaggctgaggcaggagaatcacttgaacccgggaggcggaggttgcagtgagccgagatctcatcactgcactccagcctggtgacagagcaagactgtctcaaaaaaaaaaaaaaaaaaaatccaaaataggctaggattacctgcctgtaatcccagcattttggaaggctgaggtgggaggattgcttgagactacgagcttaagaccaacctgggcaatctagtgagaccccatatctacaaaaaatttaaaaattcctcctcagtgatattctgaagaaaaataaagttattaataacatttcaaacaaagaaaatattttattataataaaaatatcaggccaggcacagtggctcacacctgtaatcccagcactttgggaggctgaggtgggtgaactgcatgagcccaggagtctgagacaagcctgggcaccatggtgaaactctatctctacaaaaaatacaaaaattagccgggcatggtggcacacacctctagacccagttattagggaggctgaggtggaaggattgcttgaacctgggcagttgaggctcagttatccaagaaatgtgccactgcactccagcctgagcaacagagtgagacctgtctcaaaaaataatagtaagtaaaaatttaaaaaataataaatttaaaaattagctaagtgcagtggcacatgcctgtagtcccagctactccggaggctgaagtgggaagattgcttgagcccaggaggtcaaggctgcagtgaaccatgattgcaccactgcactccagcaacagagtgagaccctgtctcaaaaaaatttttttaaataaaaaataaaaataaaatcccaaaatactgagaggtgaagctggctgggcttctgggttgggtgggacttggagaacttttctgtctagctaaaggattgtaaacacaccaatcagtgctctgtgtctagctaaacatttgtaaatgcaccaatcagcgctctgtgtctagctaaagctttgtaaatgcaccaatcagcactctgtaaaaacgcaccaaaaaaggtttgtaaacgcaccaatcagcactctataaaaatggaccaatcagcactctgtaaaatggaccaatcagtactatgtaaaatggacaaatcagcaggatgtggaggaggccaaataagggaataaaagctggcccctcaaggcagcagtggcaacccgctggagtccccttccacactgtggaggctttgttctttcactccgcaataaatcttgctgctcctcactctttgggtccgcactacctttatgaactgtaacactcaccgtgaaggtcagccgcttcgctcctgaagccagcaagaccacgaacccaacaagaccacgaacccaacgggaggaataaacaactccggatgtaccacctttaagagctgtaacactcaccgccaaggtctgcagcttcactcctgaagccagcgagaccaccaacccactgggaggaacgaacaactccagaggcgccacctttaagagctgtaacactcgctgtgaaggtctgcagcttcactcctgaactcagcgagaccacaaacccaccgggaggaagaaactccggacacatctgaacatccgaaggaacaaactctggacacaccatctttaagaactgtaacaccacgagagtctgcagcttcattcttgaagtcagcgagaccaagaacccaccggaaggaaccaattccggacacaatactacaatcaaccaatgttcataacttccatttggatcgacatctgtgccttactatacctataactaactgaataaatacagggttccttttaaagttttgctccaaaagaatagtgtcaaaaacaaccaaaggctaatttaagattataattaatgatcaggctggacaccaaggctcacacctataatcccagcctttggaaggcctaggcaggtggattgcttgagctcaggagttcaagaccagcctgggcaacatggcaaagctccgtttctacaaaaaatacaaatattagccggacgtgatggctcatgcttgtagtcttagctacttgggaggctgaggctggagaatagctgagcctgggaagaggatgttgcagtgagccaagactgtaccactgcactccagcctgggcaacagagtgagaccctgtcaaaaaaaaaaaaaaaaaaaatatatatatatagaatggatcatattacttaaaagtcaatagtacaaaataaaaaccctatatcatccttttgttccctgcattccttcttaaatgaagatatgatactgagctcatcataactttataaacttgtttggctatgaaacatatcttgagtttgtaagttataaaaataatctaacagatgggaaataaaaaatgaaaaggcagatataaaagcaaccaacctttcttgacccctttttcactgaccttttcaccacatccttgtaccctggggcctgcctttctgacacaggcttcagaaatggactgctgaacctgttaagggacaaacccagagaggataaagaaaccctggcaaggcactctgaaggagaagagtagctcagttcttagtagacttcctttaggggaatgcagactgtcagcaccattaggaaaaaatctatttgttccctcttgccagagagttaaaaaaaacacaaaactataaaatatttcactattattacaatatactgatttagggctcagaaatttgttcaaagttcccaaggccctgtctctgtgaaaaaagagaatccaccagattgaaaagaagaatatacattttaaatataaattttatcatgtagtaggaaccaatttctagaggcaactcaaatggcacagcaactatttcttgtacagacttgtgaaagcagctgtgggtactttgggataaatcgggcttagatacagaatctacctttcaactatggctcatttgagggatgaacatatctccttttatgcttaaaccccaatatgtattactgcttcagctctgaacataatcctattaccactttggagacctacctgtgactggcaatcatcttccagactggcaggagagtcttcttaaatagcaaatgatcctgaacagggtcatcctggcttagatcagtcctatgaggataaaacatgaagaaaagagacagtaacttcacaaataatattctatctcccccaggtgggtaatgaggttttcttaagacatgctcctaattaatatctgaagctttttatctccccttatctggccaagcagacttagttattaatatctattgttttctcttttaattttttaattttatttttctgagacagagtcttgctctgttgcccaggctggagtgcagtggcatgatctcagctcactgcaacctctgcctcccgggttccagcgattctcctgcctcagcctcccaagtagctgggactaaagttgcataccaccacacccaactaatttttgtattttccatagagacggggttttgccatgttggccaggctggtctcaaactcctggccttaagtgatccacccgcctcagcctcccaaagtgctgggattacaggcatgaaccaccatgcccagccaattttttttttttttgagacagggtcttgctctgttgcccaggctggagtgcagtagtgtgatcgtggcttactgcagcctcaacctgctgggctcaagcgatcctcctgcctcagcctcccaagtagctgggactccaggcacatgccaccacgccctgcagctaatttctgtatttgttgtagagacaaggtcccactacgttgcccaggctggatatctactgctttctaataaagatttcatatttaatctaaattgtaaggtaagaatgtggaatttaccatccaagactatgaactgtcatgagataagatgtctcagattgggcccggtgtggtggctcacgcctgtaatcccagcactttgggaggccgaggcaggcggatcacaaggtcaggagattgagaccatcctggctaacacggtgaaaccccgtttctactaaaaatacacaaaaaattagctgggcgtggtggcgggtgcctgtagtcccagctacttgggaggctgaggcaggagaatggtgtgaacctaggaggcagagcttgcagtgagccgagatcacgccactgcactgcagcctgggcgaccgagcgaaactccgtctcaaaaaaaaaaaaaaaaaaaaaaagtctcagattgcagatttcctgctgtttgtacagtcacagtatgtcatctctgcactctattgctcatacttaaggagttaaagaaaagcaaatgaaggcattcctcaccaatctacattttaaactgtatcctatttgtgtaccaaaaattgaaatctaggctgggcacagtggctcaggcttataatcccagtactttgggaggctgaggtgggattgcttgaagccaggagttcaagacccagcttgggcaacaaagcaagaccctgtctctatgagaaaaaaaagaaatctgctcttcaaaaaatatatatatatatatatattcatatataaatatatgcatggttcagctgtatatcttaaacaaaaaaacactagaataattattagttttacctttccacagacaactgggtggatctgggatatactgaagaaaaaaaaaacagttcatactatattctctcaacagatggatctgacacaggctggaaaaagaacaatttatttattaccataacaaaaataactttgctggacgtagtggctcatgcctataatctcagcactttgaaaggctgaggcaggagaatcacttgaggccaggagtcacagataaaaacaactttgtttttctgctttaaaaagtaattcacttcatgccagatgcagtagttcatgcctataatcccaggactttgggaggccaaggcaggggatcgcttgagtccaggagtttgagaccagtctggtcaatgtgatgaaaccctgtctctaacaaaaatacaaaaaaatcagctggttgtggtggtgcacatctgtgttcccagctattcatgaggctgaggtgagaggatcacctgagcccaggaggcggaggctgaagtgagccaagatcatgccattgcactctaacttgggcaacagagtgagatcctatctcaaaaaaaaaaattaatatttttttggtttcctgttaaaaaaaaacagcccccattaagatttgaaaatgtgttatttagtcctataattatctatacaaagatgagacaattgcataaaccaggggtgtccaatcttttggcttccctgggccacactggaggaagaagaagaattgtcttggaccacacataaaatacactaacaatagctgatgagctggaaaaaaaaaaaaaaaaagaaaaaaaaaagggaaaaaaaaagggtcagtgcataaatctcataatgttttaagaatttgtgtttggccacattcaaagctgtcctgggctgcaggctagggattagacaagcttgacataaacaatcccctaagagatgtgaaaaagaaacaaagatcacaaacttcaaaataatttttttcttctcttttatttcttgttttgttttctgagacagggtcttgctctgtcacccaggctgtgtagtgacatgatcatagctcactgtaaccttcacctcccaagttcaagcagtcctcctgccttggcctcctgtgtagctaggactacaggtgcatgcccccacacccaataaattttgtttattttttgtaaagatgaggtttcactatattgcccaggctagtctcaaaatcctgagctcaagcaatcctcctgcctctgcctcccaaagtgctgagattacaggtgtgagccactgcgcctggcctaattttttctttaaaaaaaaatttttttatcctcttccttgtctccatcaaaataattttccatttcaagttcataaaatctattttaatatttttaaaagaggtatagtttgggccaggcacagtggctcaagcctgtaatcccaacactttaggaggctgaggtaggaggatcacttgaaaccaggagttcaagacaagcctgggcaatatagcaaggccagccctgtctacaaaaaataaaaaatcagctgggtgtggtggcccatggctgtattcccagctacttggaagcctgaggtgggaggatcccttgagttcaggaagtcaagctgcagtgagtcatgatcgtgcccattgcactccagcctgggtgatggagctagaccctgtctctattaaagaaaaaaaaagcaccatagtttgtatattaggcatagtttgtataatattagctccatcacccaggctggagtgatacagacttggctagagtacagtggcacaatcatggctcactgcagcttgacctcctgggctcaggtgatcctcccacctcagcttccggagtacctgagactatagacaagtgacaccatacctggctaatttttttttaatttttattttgtagaggcatggtctccctatgttgcccaggctggtctcaaagtcctgggatcaagggatcctcctgccttggcctcccaaagtgctggaattacaggtgtgagccaccacacctagccttgaaagacagtcctaatattgattaaacatatttgttttataacaggagagcatatagacttctatttatatgatgttaaaattatacttaattaattatattttttgtgttttccaactctaattttctttaacttataaaagtaatccatttcatgattcaaataggcataaacagaagtatgaatcttaacaaacttggatgaaagtctacgcttacagctttgaggaggtagcatggctgaaaagtgtatccaccaagggagtctccttaatgttaaaggcatcatcacactcgcctgaagggggctggtcttccatctctgacacatatacttcaccctggtcctcccctttggattcttgctgagcctccccctaggaatgccaggaaacaggaaactttagaaggagatttactttctgcatagtaattttacttgcatagagtaaatgaaggctgcccttaaggtgagaagaggtcaattacataaagctacaaaagaaattaaagaaagctgacttaactagatttaagttaatgagttcttggtaacaatcttgctggaggactttgactctgtgccactcacctccagcaaaatggaaaagcattatttgcccaattctcattggattctttaaaaaccatcatgatcacctgtggccctggagttaactactctagctggccagataattttttttttttttttgagacagggtctcactctgttgcccaggctggagtgcagtagcatcatcatggctcactgcagccttgcactcctgggctcccccgagactcctaagtagctggaactacaggaacatgccaccatacctggctaatttgttttttgttttttgtagagatggtgtctccctgtattgcccagactggtcttgaactcctgagctcaagagatcctactgcctctgcctcccaaagcactgggattacaggcatgagccattgcaccccacctgccagataatattaataatgatgacggtattctaaattttactgattgcttactataagccaggcactgtgctaagtgctttacatgaattatctcatttaaacctcacagcaatcccacaaaatagggtgctattattgcatttctgcagagaaaactgaagttctaaaatgttcactaacatgctaaaggtaacacagctaaaactggtgctaaatccaggatttggatccaggtagtttaactttctggagttagcctatgtgctctaactactctgttctgcttccctaggcagaagaccaacaagacagctgatttaagttaccttcttacctcttcactctctgtgagtagtccctgaactgtacaaataactgagggagctgaagccacctctggctttccattttctcccagtggcttttcagctactaaggggtctcctttagctgaaagctcttcagtctctctgcagagctccctttctccttcgctagctttaatttcccttccttcttgtctggtaccagatggagggcagcagccttcacttgattcgttgctgctgatgcacaagggctccattaaataagctacctgcaatcaaagtttattattagatgcacaggaacaccactgaaaatcatcatccacatatcaacaatgccacatgctaacactgtcacagtgactaagtctgagaggacaaaatggtttaattaatacaatcatctaaaatctgccaaaatatcttatatacacaggcactgggctggttggtggggacactacagtgaacaagaaagatatggttcttgcctcttccaggagtttatgttctactttttcatctcagctgtcaactctgatcaattgggagtggctgtctagaataaagtgttgaaaattttgtctaccacagacacttgtagagagaagtggcaacatttgaaatggatgcttgctgatcttgatctagggtcttctaaatgtgttcaataacagcatacatataactctctgtccaattctgtttatttctggtcctcagcccttaaccaaggtaatgacacttaaaaatactaccttaaagttacagcattttaagcttcaaggaaaatttgggcaagtataacttcccacaactccaaaagcatgaattacaaggatactcataaagcagtccttatgacccaggcccctaatgactgaagtattagaaattcagtcaaaaagcatgttttttttatttttaatttttttacttttgagacggagtctcgctctgttacctaggctggagtccaatggcacgatctcagctcactgcaacttccgcctcccgggttcaagcgattctcctgcctcagcctcccaggtagctgggattacaggcacatgccaccaagcccggctaattttttaattttaattttaattttaattaatttatttatttagagacagagtttcgctctgtcgcccaggctggagtgcaatggtgtgatctcagctcactgcaacctccgcctctcaggttcaagtgattctcctgcctcagcctcccgagcagctgggattacaggcgcccgccaccacgcccggctaattttttgtatttttagtagagatggggtttcaccatgttggccaggctggtcttgaactcctgacctcaagtgatccgcccgcctcggcctcctaaagtgctgggattacaggcatgagccactgcgcccagccatttttgtatttttagtagagatggggtttcaccatgttggccaggctggtctcgaactcccaacctcaagtgatccactggcctcagcctcccaaagtgctgggattacaggcgtgagccactgcacccggcccaaaaagcatgtatttggtgcatattctgtatcagcaccaagtgctgaggacatagcaatgaacttaatccctgccactgtggagcttatattttagtaaacaatattaagagtggtagaagcatgtaaggataagcattctcttagaaagttgaggcttttccagctttggaaataagagctcactgttacctcagagagaaagtggaggaggttctggtggctggctttccttgccgcttcctgagattcctcactgcctccatccccaacaagcagttcactaggttctctctccgggctgctttcctctagttcctcagcctctggatcctcagtttccctccagttgcccacatcaagatccagactggagtcccatgagctgaagagggacctgcagtcattgctcaactcagagtcattgggatgatcttgttcagaatccagccaaacccactcgtgtcccatctgtaaatacacaggaaaacatgcattaaattcattcaaataaatattcctgaggcatctccatctcccgagttcagtagaaaaataaggggccagaaatttatttgtattcaagtattcatcattaggaagaattaaaatcttgctgaagggagacatgagatgaaattatatttgtctttgggaataaagaaagccccatgtcagtataacagagatattgcaccatacaatacagtataatagagacattaatattacctaataattatttttacttggaattcctcatattcacaccaaaagaagggaaagaactggagcatagctagctcaattattttcctctagcccaaatcatccataactaaaccgtaaggcaaacaaattgagggggcaggggatattttcctcagtgtataaacatttttaacctatgaaccattaaaccttcaaaacacactttaggattgcctttggcatccttctggtcatatccaaattgatgttgagaaacattaagcttaaaatatatcttcccttgctctcattacaccactatcttggtttttttatatctttctttgtcctctcccttttacaactttcaataaatccctaccttctatgttcatgcttggtcctctgctttcttattaatgtattttaaaaaaatgtatatatactttgaggtttcaactttgacctctattcaggtggctcccaaatctctctacctttacttcttatatgaattctggtgtcatttctccatgcatccaaaagtcaattccctttagatgctctaccacctgctgtaacatttctaaaataaaaatcacatttcctttatctccaaaatcactgcttcttcccaatttccttatccccatcaccattttcttttcttttcttttttttttttttttttttgaacgaactttcactcttgttgcccaggctggagcacaatggcccaatctcggctcactgcaacctctgcttcctgggttcaagcaattctcctgcctcagcctcctgagtagctgagattacaggtgcccaccaccatgcccggctaatttttgtatatttatagagacggggtttcaccatgttgactaggctggtcttgaacttctgacctcaggggatccacccacctttgcctcccaaagtgctgggattacaggcgtgagccaccacacccgaccccatcaccattttcttagtctacagaacccacaattctgttttgacccttccttctcttatattcagtaagcaagtcctcttcccagttttctcccacaataagttttctcagtgtccatcctttcctgaataaatgccatagtctcctagtcagcttttctatctttaatcctatctgctctcaacaaatatagttattctactcaaggctttataacagctatcacctcaaatataaatttctcaatctgccaaagtcctccacaaatttagccttattttgttcccttcactcacatgtacacctccttattccttagtataatccctgttctaattacatttttctccgtattgccacccaccacccccaccagatgcctacaccttccattcggtttgctagtctcatttatcaccttctctaccaactcaaaacgtatgtcctttaatggaccttttccacacacttctcccagcttttagagcttgtgtttgtatctcatgcctgtttgcagactgctttgggactacaatgttattttttattttcctttcttgtttgcaacatgtccatgtaacaaggaatttcatgttctaactcctggactaattgaatacctttccattgcctcacaaagactgtatcttctcttccttagcatcctaatatagttctattaaaggcaaaaagatctgtgacttctaatcgtatcctcttaaacccttctcaagaagactttgactattagaccaggctccagtgtgacatattgtctaaatatttagttataaagtgatattcatctaatattttttcatcatagccatgtttataataaaaagttcataacttttttttttttttttttgagatggagtcttgctctgtcgccaggttggagtgcagtggcttgatctcggatcactgcaacctctgcctcccaggctcaagcacttctcctgcctcagcctcccgcgtaactgggattacaggcgcccaccaccatgcctggccaattttttgtatttttagtagagatgaggtttcaccatgttggccaggatggtcttgaactactgacctcaagtgatccgcccaccttggcctcccaaagtgctgggattacaggtgtgagccacggtgcccggcactatttcatttcactatttttaaaaatgttggcagggcgtggtggcttatgtctgtaatcctagcactttgggaggccgaagcgggtggatcacctgaggtcaggagtttgagaccagcctgaccaacatggagaaaccccacctctactgaagaaaccacaaaattagccgggcttggtggtgcatgcctgtgatcccagctactcgggaggctaaggcaggagaatcgcttgcacctgggaggcggaggttgcagtgagccgagattgcgccattgcactccagcctgggcaacgagagtgaaactccgaatttaaaaaaaaaaaaaaagtttagttggccaggagcagtcactcatcacttaaaaaaaaaaaagttattaacagaagttggaattgaactgagattttaaatttaggggtgttttttctctgttgcccaggctggagtgcagtggcatgatctcagctcactgcagcctcaaccggccagggttgtgatcctcccacctcagcctccaatgtagctgggaccacaggtgcgtgccaccacacctggctaatttattatttgtagagacaaggtcttgctatgttgcctagactggtcttgatctcctgggctcaagtgatcttcctgtcttggcctcgcaaagtgctgggattacaagtgtgagccaccgtgtctggccaaattcagtaattcttaaaactgggcttagccttcaaacagcaatgttaagaactatatttatttgagaaagggtcttgctctttcacccaggctggagtgcagtgatgcaattataggtcattgccaactttgaattccgtggctcaagagatcctccagccacagcttcccgagtagctgggactacaggtgcacaccaccatgctgggctaatttttttttttttgagaaagggtctcactttgttgtccaggctggtctcaaactcctaggctcaagcaaccctcccacctcagcctcccaaagtgttgggctattttttttttttttgagatggaatcttgctctgttgcccaggctggagtgcagtgacgcgatctcagctcactgcaacctccgcctcccgggttcaagtgcttcttctgcctcagcctctcaaatagctgggactacagacatgcgccaccacgcccagctaatttttgtattttttgtagagacagagtttcaccatattggccaggctggtctcgaactcctgacctcgtgatctgccagccttggcttcccaaagtgctgggattacaggcatgagccaccacgcccggccgccaagaactctttatacagagtctttaaccataaaaacaggaaaaaaatggtaacacactatcctagaaataccatctgcaaagatagcattaagtgagacaaatgttcctgaggtaagggtcaatgctacctatgtccatgctctaatcttctttaagcaatgccatgaacagaattctaaaaaccttacttttcccaaacattcaagaaaatctgagtaaggaagtctttcctgcgcaatgcaacaccttaaggtatattaactataaactcaattctggttgcttaccttctcacactacagcaagcagttcataagacttttcccctgtaacaatctcattcctacaaatgaaatagttatgcagaagaaacaagtttcaaatacacacacacacacacacacacacacacacacacacacacacagaacaagccaaaggctagttttttttttcagtttattgtatacacacacatttcactggtggttgttttttttaaaaagtctgtacaattgacaagacaatacaaactagctacgatctgctagctacacattaggacattaacatagcccatggtttctgccctaaaacaggcaattgtgctactccaactctctaagagagattttccagctcatgtcgtgtggcccaggtacctcctcttctgtaacttccacctctggaactgggcccgcaagcccaagctctatcttgtttacttttattttaggttcggctcaaagagggtaactctgaggcttcactttttcatcttcatatctgcttcaatggcacagcggcgtcccctggttcctccatcctagatgacaggcagagaaagaaagggagcatgagttggtcaggagacaagagacggtgcaacagaaaagttggggatttggtttcttgggggagagggaagagaatcagcagaaaaatccagagggatgaggggcatatttctgtcttcccacagagtggctaaagaacacctggtagtttgtgagaggaaatgtaggatggaatatcttgctcatgcccactacagaggtccttggaattcacctagggtcccacagaataactattagtcatcccacccaggcccaaatcatgtgcaaaggagcaggagagtaaaagaaaggtaggagagtcagaatgggcaatgggtagtgaggttcttgactaacatacctgtccaactgttggtccctataagaaaggcctttcctgcagactgaccctggcactagttccctagcacctcctgacagtggttttccatgagatcaggacaattagaaggcttctttccatctgctgctctctccctgcagcccagctccttcctcttgtgcaatattttgctgtcttcaatagataaaagatcccattaaccagccttgcaatagccagccaaatgctttgcttgggggatccagagtcactgttgtaggccaataagaaagaacggagattataatgttctgtctgtggtacagcctgtaggcaagatgaattactgaaacctttgctgggccaggccatttttacatttctaatatgcaaggactctaaaatttttagagtccatgaacataagttgcccatgaggcaacagtgaaaataaaaaggtggtaaccttgcatgtgtataatgcttttcttttttttccaagccagtttcatatctattatctcattttatcctcacaacatccctgtgaggtaggctggacaagtacctcattatattagcttcatcacacaccaaggaaaacaatgccccaagagattatccaatgaccttaagaccatgtagttttctagcctgatgcccttccattacatcatacctcactgtcccataatgaacaacacagagtcagagccagttaatttatggaggaaagtaataaaagtctttaggctagctctcctaagcttatctgtaattccagcagccactattgatgcagtggtcacttttttttttcttttttttgtttgagacagagtttcactcttgttgcccaggctggagtgcaatggtgcaatctcagctcacggcaacctccgcctcctgggttcaagcgattctcctgccttagcctcccgagtagctgggattacaggcgtatgccaccacacccggctaatttttttttttttttttagtagagacggggtttttacatgttggtcaggctggtctcgaactcccgacctcaggtgatctgcccacctcagcctcccaaagtgctgggactacaggtgtgagccaccacacccagccacagtggtcattattactgagattgtttttttttttcttttgagacaaggtctcgctctgtcacccaggctggagtgcaatggtatgaacagtgcagccttgacctcctgggccccagtgatgctcctaccttgccttctgagtagcttgtagttagggaccacaggtgcgcaccactccgctgcacagctagtagggttttttgttgttgttgccgtttttaaattttgtagagacagggtctccctacgttgcccaggctggtctcaaactcctgggctcaagcaatccttccacctcagcctcccaaagtgttggaattatagacgtaaaccaccacacccagcctatactgagttctttagcttaaattttactgtttgttacattagtcttgcaacttaattttaggagacaagagaaaaactatttgctgagtactgccattatgagaaacactgttaaaaagccagctagcagctcctgctctgaccaattttaaatttgttaagaaaagaattggtaaaaggtgaagtcaggaaatgacgagcaggtacatcctagatccttcacccctagaatacatttcagcccagtgatctcaaaaacagtccctacccagcccacacacacacacacatgcagaaagacaggaatgcagaagaaaagagtttcttattcaatgacctgaataaacagaagttcaagacactgccacagtctgcatgttggatttccctctgccacccacccccattaagagctgagaatctttgtggcaacaccaccccttgcagccattcaatacttacaaagagagagagaaggaaggcaggagagcccattgggacactgtcctgttagaggacaaacaaacactgatcaggttccacagaaactctcagccacaagcaccccaaacctcaggacagagacacaagcaccacacacacaaggacaaaattttaaaactcaagaacaagaggaaagagatccaaaagcaatctgtccattacgcctctagcacagaaactgatggtccccaactgctgcaggctaagccatttcccccgccttgagagcactctcccagaggaattaataattcccctactcatgatttctcccatgtgactgggcctttcggttacaataggcttattcaacgtttagatgggtgcaaaccaccatcattctaagatctatgtgtctgtatatcattggaatctagaagcccaataccaagtagtaacataagggtccttggatgcttcagacttctactactggaacactggcacacaggttccttcctgatcgcctcaccttctctgaagcatcctgtttgcgggtagaatctctccctcgaagacttttagcactgatcccagactcggatgtttgcataatcaactgcgtggccaagaattgctgtagggagaagaaacagggtaggccatggagacctgatttagtagggacaaattaagtacactttaagcactgtaaatagaactttgtatagtactcttctggctcaaatatattttgactgattggaagtttagcatattaagttttaattctagttgcaatagggatgctaaagaatcaagcagccctaacttttttttgctataacataggatcaaaatctctatcctccaggaatgagaaaaataataaaactagaatgaaccaaagatcattcagcaatttaagtaatttgacaaatcgtgcaaagatttgcaatattcttccaagttcaacaccccaaaaagtacctggtaacacaatcataggataaaagcagggaaaaggaaaggagaaactcttatttgctgatcacctactatgtaccaggtacttaatgtaattaaaaaatatacattcaccatttttaaaaaattttatttaaaaactttatgaaactgcaaataattgcccaagaaaggtagaatattgtatcacaactctttcaccacaccaaagaaaataaaagtaagaacaaaatattatgttttcaattgtgtccctgacagctatccacgtaaaagccacagcaacccttcttggcatcaatatgaatcctccccttgaagtattttaatttcatccttgctgaaacacaaaggatcctcaaagtacctggatctgttccaagacatctcgctgcatctccactgccatgtgatagacatcatggtctgagctattgtacattacagcattctgaaacatcagcataatgtcacgctgaaattcagctgtgcttcggatcagtccattttctatgtttttcttaatagttgacaaatccataggcctaaaaaaaaagaacaggggtaagtagcagtggggatggaaagaggacgcacctagatctatgaatacattatcatatagactttctcatatataccttaactcccagctgccaggacttaaatgctaaccccttatcccaaaacatgcacttaacccaagaaacaatctatataataagcattgagaaaggtaataaagggagtttatttaggttttttttggagacagggcctggatctgtcactcaggctgtagtgcagtggcacaatcatggttcactgcagcctcgaacttccaggctcaagcaatccttggttcactgcagcctcgaacttccaggctcaagcaatccttcccacctcagcctcccaggtagttgggactacaaatgcgcgacaccacacctggctaagtcttgtattttctgtagagagggggtttcgccatgttgcccaggctagtcttgaattcctgggctcaagtgattcacccacctcagcacccccaaagattacaggcgtgagccaccgctcctggtggagatttattcttttagactatcagtggtgatctagccactggaattatcagtttagcactcagtgccccttatagcaaaaccataaacttacttgctttaaactttctatcgaaagcaaaacttcactaagactggacaatttataattcaggcaagttaccatgctgggtggaccatggctcacctctgcacaatgctgtggtagccaggtgctatgtcatctgtaacaggctgcaggaagacattggcatacctgtccaaaaggaataaggtgcaattactgacattctccagaagtgcagggagggaacttactctaagtaactaaaggtagtaagaactaataccagcagttccacagaagcctactcagacttttttccagtcaccaacaatgaagagtaggagaaaatgaacctactgactggtaaagcccactcacctatgattagctgcagctctccatacaagcatgatggctttcttccaaattttctgtgcctgaatagcttcctgatcctcactacagacagagctgaaacagagatacagcaattccactaggcacaagttaaaaaataaaaattataattctcttttctttttgagacagggtctcactctgtcccccaggctggagtgcagtggcatgatcatgttcattgcaccctcaacctcccagactcaatcctctcacctcagcctcccaagtagctgggactataggtgcataccaccatgcccagctaattttttaatttttttgtagagatagggtctcactgtgttgcccaggctggtctcaaactcctgggttccagcgatcctcctgccttagcctcccaaagtgctgggattacaggtgtgagccactatgcccagccctaattatttcttgtcagctgtttattccaggtcaaaaaagggaaacactaaagaaaagatcaggccaggcatggtggctcatgcctctaattctactgctttgggaggtcaaggcaagaagactgcttgaggtcaggagttcaagaccagactggaccacatagatcctgtcccttaaaaaaatttttttaaaataaaaatttaaaaataaagaaaaaggccaggcatggtgtctcacgcctgtaatctcagcactttgggaggccgaggcaggtggaacgcttgagctcaggagtttgagaccagcctgggcaatgtagcaaaacttggtttctactaaaaaaattttttttaattagcagggtgtggtggcacaggctggtagtcccagctactaaggaggctgaggtggaaggattgcttgggcctgagaagtggaggttgcagtgagctgagatcgcaccactgccctccagcatgggtgagtgagaacaagaaaaaagagaaggaaaggaaaggaaaggaaagggaaaagaaaagaaaagagaaaagacaggaagaaagacggaaggaaggaaggaaggaaaagatcctctcctcaccttcactgccttggcctcaaagaaagaatctcagatactcacaactgtgaagaagcagggctgctggggatggagtctgccagtgtgtgtgactgcagtgtagcattgtgtatgctgaagccatcatcactctcgctcacaggaggttcattatccatttctgacaagtagccttctccttgatcctcttccttaggctcctctaggctggccgcttcactgacaccatcttcctcctcatcctcacctggggcatccttagatacagtatgctccagttaacaaatgcaagcaaagctatccagcaaagcatcattaaacatgatctgtcttttgggttagaattagttctagaaatgacctcacgctgtttcctgactcagctgtctatcacttatactaccatctacttacagacactgcgttaagtaatttagaacctggacaaagaataatacccaggatcttttaaaaagaaagaaaaaaaaaagctacttacttaagactaagctaagaggcgttccttctttccccttgctcgagagtaactctgaccctgggtacaaagttatcaaaaataatttttattttgtgtctcatttgatggagcaagctcacatcacattctttaagcctctgttactgctgctttaataattctaaaaagaaaactctggatgattctctttggatagtctaattaataaacttgattcctgtatgttctccttggctcaggtatccttattcactacaaatcactctaagtgtatcaagccttcttaaggactgtgtgatattcacatgctgtttcatatgggaggcacctgttgctatagtactcccattatgcctgtctactgcagcttttccccatgcaactccataccagtctcttatcagagaataaagatgtgactttactgaaattcattaaaaagtagtgctatagggaaatctaatcacatggcaagaggaataaagaaaagtctgaaatacctttatctggcttccaaaaatagtccctgattcttctttcaatgagtctgcagaggagagaaagactacctgaagatttttccaccttagccttccccttcctatggaccataatcccctgcagctctcctttacatgctgacctgttctacctcctctacttgcccacaacccacaacccctcagaagccaaagcaaatgatttcaagtcagtgaaagaggactttatttacctgacatttcaaacttgtgctgagtctctgcctctaaaggatcttcaatgggatttgagccatgtgatggagacaacatgctttcaggggatgcctgaaaaccagaaaagaaaaaacaccctaagtactgataaatcgctatagctcacacaactttattcttcagtgataatgagaccatagaagaaattctaagtcctactcatgtaatgtgactccaatggtcaccttaacaggaataagtatatataacactaatcacagcctatgggctttggacacatcaaacatgtcagaactcaggaatgcaactggaaaaccaaaaagcctaagctgtcacttcttatctaaggtataaacctccatctccccagccccgatctttcttaagtacctctgtcttcacatttgtaagtggagtctcatcgcctttcccaatggcaacatctgcttcaacaatctctccagctgcagtacttcccagttcctcatctaagtcctgactcctgagttctggtggctccatacttgtggctggaacaactccagctactatttcggctcctgaaatgactggctctggttctgcaggttccaccttgatctctgcactgggctccctgatgtccaccagttcatgtattcccttgttttccgtttcctcaaagtccagtctctcttgcttgaccgtcatttctggtgcagggagaggtactggcttgtcccgctcctgctggataggatgctcccaggggccaggcagggactgaggatcatcattttcttcacaaaatgacagtgctgcttccactgctgccacatccagcacttcaggatgatcatctacctgtcccacaaaacacaagactattgaggtcacagaaagaagcccaagtccttcaatttttgttagcaccaaatgtgatggcttgaatctgcagcttttcgctccattttttccatgtagtggaggcaaacaatgaagaggcacctgccctgtgcaaaccagtaacatgggtagacctgaggagatgactagtatgttagcaccaaagggctacaaagatggagatgggcagaagtaggagagttgtttaagtaattcttactgtaagaagcaaagcagccgagtatggtggctcatgcctgtaatctcagcactttgggaggccgaggtgggtggaccacttgaggccaggagtttgagaccagcctggccaacatggtaaaactcatctctactaaaaatacaaaaaattagtgaggcgtggtggcatgtgcctgtagtcccagctactcaggacgctgaggcacaagaattacttgaggctgggaggcagaggtaacagtaagccaagatcgtgccactgcacttcagcctggatgacagagcaagactctgtctccaaaaaaaaaaaaaaaaaagcagcagcagcaccaaagtgaggctgaaaagagaagcctatgtaggacccatgagattctctggggctttgctgaatagttaccttgtcctcaatgatggcaatgatgtctccaacagtctcaaaatccagctcttcacctgtgtaagacacagcaatatccatcttctcagccagatctaattcttccttcccatctatgctgggagcctttgatccaacaggagcctctgctacccctgatcgaaaacactcttctttgatagaattgatgatcatggatatttcactgctgtccatggaaacagtcacagtatgtggatcccccacagcctccatgggaacacagttgtcgggttgactcactgagtaacagaaagagaaaagcatctcagaagcttattgggtacaaagcgaccaccttgagatcacataagcgctacagacagatgtcaaatatccaaacacttaaggtcagaaagagtcatcaacatgtgcctatgttttcttctccccagttttatctagaaaggtgagaacatattttcaagcctgctcatatctgtatacttagcctcttcctgcaatacataaatgcccacccacctcttctcacatctatttctaaggatatttatttctaaggataaagatggcacatgtctatgtagaacagagaagaagcatctgaatcggagctgatgctcttggtcatttttctctaactaaagctcaaaatgaaattttagatctagtggctgctcagggacgcacctggagctacactttcagtagtggagacagccggagcagaggatggtgctggcagcgcaggcatcatgacaatggtagcttgggacacagactctacagggggtggcacaagtttaactggaggctcactggcaacagtagtgaaggaagcaagaggtgtggtgaactgtgtaggaccagcttctaaaagccgggaaagagtgggagcacctaacatataaagaggtacacaaaatgaagtaagaagaaagcacataaataagaagcaatagctacttgaagactcaactaagaaaattcttatggtctcaaaggatgagagcaactcctgcattgaataagttcatcatctatatccttactctaaccttacttaagatcttcctccaagttaggaatgaaccaaagcactagaacacacaacatatataaaaaatgggtggtaaggctaggtgcagtggctcacgcctgtaatgctagcactttgggaggccgaggcaggtgggtcacttgaggtcaagagtttgagaccagcctgggcaacatagcgaaaccctgcctctactaaaaatacaaaaaaaaaaaaaaaaaaaaaaaaaaaaaaattagctaggcgtggtggtgggtgctgtaatcccagctattcaggaggctgaggcaggagaactgcttgaacgcaggaggtggagattgcagtgagccaagattgtgccaccacactccagcttgggcgacagagcaaggctctgtctcaaaaaaaacaacaacaacaacaacaaagggtggtaatttttcctcagaggaaaattaatcaccaagaaacgaaaaactggtatgaataaatctgtcgcttctgctgaagttcagcatattgtaaaccacccaagttcaacaccattcaaataccaataaggtttgtatggtattctatggagctttttttatttccctgctttatactttctacctcattaaattctcatcacatccttgtgaagtatatatgttacaataaaaaaggaaactgaggctcaaaagctaagttacctatccaaggtcacaaaaccaatgtgtggcaggcctgagattcaagcccaattctctggttccaaatcttattccactattctataatcttaggtatctctagcaccttgattttgcaagccctaagaaagcagttcaatattactctcaatatccatgctgtggtcaatcagggctatcactatcttgaagatagatggctttataatatggagactacattgtttaccaggtaaagtagctccaaaaaaaagttagaaaaagttgggctttaaatctagcactgacaactgcttagtaacagtgaaactgaggtcagtcaatgtcaagttcaacacctttgaggttgataaaggaaaagtggtaacttacctgatgcagcaggggaggctgcaacagtattgggtgtttgctgtatctccccaccatgtatcatgggaaggaccccgcctacctccaggaggacacctgtactgttcaggtggccagaagccacagccatttcactctcattgacctaccagggaagaatagaggtgaaggctacactcaagctttccttcactaccatttcccaacaaagctccagcagttgatcaaacttcatgaaaactaatagctaatatccacagagaataatttaagacccaagggaaactctaaactataatgttcaaaacttatttgacaagagttctctggagaagagaaccaaaataattgtgattcagatacctcaggacccatgggtactatcaacttactgtatttttaaaaaattaacatttaattaggagatcttttcctcttttgaacttttattccccatgtcacattttaggtcccaggcactcccttccaagtactaaatcaccacagctctcaaacacccacagaagtctccataccagtctggggctagtaggcaggaggctgcccttcttcaagagctctgacagcagaggggaggggggtggagttgctttctgtccaagcatctttttctggggtgaatcatctgttactggggtcatgggggcttctaagggtgcagagcctggaggaagggtgtcaggaatcccaggaaacgaggtgactggggtactcggcaaagtcccgggggttacctaagagacaacagagaacctttatctgacttctcaaactatggaaggttccctactaatctgtatgggttagtgtgtctaactattattttattagtcctgagtggaattgcccagaaaccctctatccctcctgctcttagccatacttttcttccccacaatcttctctttcatccactcaaacccacagtgactcaaccatcccacccaacctgccttttatgaactccttacccactaccaatattacatttacaaggattttgtcccttatttcagcaggaatttcataagactagtatgaaacaatttcttaaaatagttttttacctatctctcaaaaaggtcaaaagcctcaatgcttttaggtccgttcttatctcagagcacagaacatggtaaattaagtctttagcattcagatcaagagaggaagttgcctctaggccaaaagtggtttcctcatcgctcagctctgccggcttattgccccttcactgatcaattcccacagatggaaatatactcaccccagaggtagcctcttccatagtggttggagtcaagtccccaagtggataatcacctcctggggaggcagaatctataggagagcgaaccatcacagtgggtaacctccgggggggtgtttttactgcttgacgagctagaacataaaagagaacaatgtccaaatcttcaagattaaataaatgaaacttgacactagtctgctattatacaataaaggacaaataggtatgttgcattactaaagcagcataataagtttggattagaaagctttaacacttctagagatggataactttttagcctaatttttcctaagggcaattctcacactaagaaactcctttaacaatctcaaactacttaattatcccaaaggtccttggagtgggaaagtagtttaaacatcctttaatattctctttagcaacttactaatattctgcttttaagaacaggaaggccaggtgcagtggctcacggctgtaatcccagcactttgggaggccaaggcaggtggatcacctgaggtcaggagtttgagaccagcctgcgaaaccccatctctactaaaaatacaaaaattagctaggtgtggtggcagccgcctgtaatgccagctactcgggaggctgaggcaggagaatcacttgaacccgcgaggcggaggttgcagtgacccaagatcgcgccactgcactccagcctgtgcagcaagagcaaaactccgcctgggggaaaaacaaaaaacaaaaacagggaaagacctcactggcgcacagcatgtattcctagagttgtaaatgcttaaatttctcctcatctaatgactgagctattctcaatcttttcacaggcccttgacttctaaaacattatgttcaatatctcatcaagcctttgtgtcctgaagttaatttaaggtctagtgagatctgagcacaacgcatgttctaggagtttcttcttaagacattaagggatgtttttattctggtagaagagaaaactgcaagtaaatttaaatcaatgtattctatgttacaaaacagtccaactgtcattagcatgcagtactgtgcaatcaattgctaaagaggcatactaggttcagcttaccctggtatgcagcatctgtagccttcctctttacttcagcctcctcttcttccaatttctttttcctaaacagggaattaagggttagatgctagacagctctggctcctccccagagttcacagaacccttacaaagtaattttttttgccaggccagcactttctggaagaaaggcctaaacaggaattctaaccagcaaaacagtgaattggggtatactgcctaactcccagttcttcacccaggcaaactatagccactcttaagttagaactaagttatgttttcatactgaaatgtcccattatattaccttctaggactcactcccccctcccagccaccaaaccactttgcagctttccccttccagaatctgtctcaagtctaaagggacggcaattggaggaaataagccagattacttgaggggaaaagagggtaaaaagaaagaagcacagaagaacaatataatataacccacgttgcaatgtcattgcaaagctcatccagtctgctgtccatgtgtccagcttgaattagttctgcatctctctttagccgtctataggaagaaagagaggtaggtagactgggttttttaatctgctattttaaaagttctgaccagtaccagaagacagtcccttatgtctttctcaattttttggcattctctctgataagtacctatatctctcctgggtttcctttatcactttctttagttcttcaactcgctcagcagtcaatttccgaacaataacatcttcaacagtttccaccacttctcccttttcacctcgtttccgtctgtggaaaattgaaaaaaaaaaattcatattcaaataacataacatttatcccctctcctacttgcttttaccacttaatcatagataacttctgctattttttaatcatccagtatcataactaagtataaaccagaattcctcagtaaatactctccactaaagaaatatggctgaagtacctggctttgtactcactttggtgtctcagtggtctctaaaagctccgagtactgggaagcacaatgctattaaaaaaaaaaaaaaagtgaaaatgtgatgagcaaggctggaaagaaatgacctttcaaagtttcaagagattagagtaagatttagagaagagaactatatgtaagacgggagtggtttactaggagggcaagtaactttataatcaaatcagttcaaaataatcaaaacaagacacagaaaaagacagtcttatggactggagtttgtgcatttgcggaaaggcaacctaactgccaatatttatagctaatatctaccaagtagttactacatgcaaggcactgtgttaaatgttttacatgtattacttcaattagcttcacaacaatcctgaagcaactcttttatctctattttacaaatgaaaaaacagaggatcatggcccaaagtttttagatggagtaataatgaacccagatctaattcccaagcttgggctcttaactgttatgcaacaccaataagaaaggtctaatatgatcatacatggatggattagcaaacagtaggaaaaagaaaaaggtattctcaactattttcccacatcatggtataaaagctttgtaactaaaagtcagggcctggtagagaacctactttacaacccaaagactgctctaaaagagcccttgcttgggaacttactttttgagagaaccagtctggagggcggccaggttctgcaaagggcttgattgctctgctaactgataccctacaaaatgaggaaagctttattacacaccaagcagaaaacaataggagaggtatgctgagagtgcaaggcttggagttcaaactttggaataaaaaagatgcgaatggccaggcgcggtggctcacgcctgtaatcccagcactttgggaggccaagacgggtggatcacaaggtcaggagatcaataccaacctggccaacatggtgaaaccccgtctctactaaaaatacaaaaattagttgggcatggtggcatgcacctgtagtcccagctactcgggaggctgaggcaggagaatctcttgaacacaggaggcggaggtcacagtgagccgagatctcaccaccgcactccagcctggggacagagtgagactccatctcaaaaaaaaaaaaaaaaaaaaaaaaagccaatgaatgcgaggtgtgcaatggaccgtgcctgtaatcccagcactctgggaggcagaggtgggaggacagctcaagcccaggagttcaagccacccgaggagatcccatccctacaaaaaaaaaaaaaaaaaaaaaaaaaaaaatcgacaaggtatggtggtgcgtacctgcggcctgtggtcccagctacttgggcagctgaggtaggaggatcccttgagcccaggaagtcaagaggctgcagtgagcccaaatcgcgccactgcactccagcctgggtgacagagtaagaccaccccctccgccattcaaaaaaaaaagaacagcatatatagtatataatcatttgtgttagaaaatgagggggatgaaggggaaaaagaaaatatttgctcacataaaattttgctggagagacacaagaaactgctaacactagtagacgggggatagtaacgggaggaagacactgcatataattttgaatcttatgacttagtatctgctgataaaataataaaatttaaaacttttactcaagtattcttatactatttttctatggctgggcgtggtgactcacgcctgtaatcccaacacttcgggaggtcgaggagggcagactgcttgagatgaggagtttgagaccagcctggccaatgtggtgaaaccccacctctactaaaaatacaaaaattagccaggcatggtggcgtgcacctttaatcccagctactcgggaggctgagccaggacaatcacttaaatccaggaggtggaggttgcagtgagccgagatcgtgccactgcattccaacctgggtgacacagtgagactccatctcaaaaaaaaaaaaagattcttaacactatttatctaataaaaatgtgaggaaatatacagattagattctatttcaaaccagtttacctgttttgtttaaaaatgagctcaatttatatacatatacaaatatatgtgatgtgtatacacacacacacacacacatacaaaacacacattgtttttgtttagacagtatctcactttgtcacccagacttcagtgcagtggcacaatcatggcttgctgttgcttccacctctgaggcttaggcaacctcccactgcagccccacccaagtagctgaaatcacagatgcaccatcatgcctggctaattttcttttttgtagggaacagtttctcttatgttgcctccctggctcaagccatcctcacacctcagcctcccgagtagctggaactataggcacacaccaccagacctggctagtatttttgtgtttttttatagttttgtcatattgcccagactggtctccaattcatgatctcaagcaacctcctgccttggcctcccaaagttctgggattatagatgtgagccattgcacccagccccattctattctctagttctgtgaggtctataatttttcctagattccacatataactgagatcatatggtatttctttatgtgtctggcttatttcactttacatactatcctccaggctcaaccatggaatcacaaatggaggatttaattcttttttatggctcaacagtattccattgtgtgtgtgtgtgtgtgtgtgtgtgtatacatatatattttttctttacccattcatctgttaatggatactataataattaccttaattgtggatagtttcacaaatgtatatatatttcaaaaataccatgtcttatgctctaaatgtgtgcactggccgggtgtcgtagctcatgcctgtaatcccggcactttgggaggccgaggcaggtggatcatctgaggtcaggagttcaagaccagcctggccaacatggtaaaaccctatctctaccaaaaaatacaaaaattagccaggcatggtggcaaaggcctgtagtcccagctacacgggaggctgaggtgggagaatcacttgaacctgggaagcagaggttccagtgagccaagattgcaccactgcactccagcctgcgcaacagagactccatctcaaaaaaaaaaaaaaggtgcagtttactgcacatcaattatatcacaaaaaagttgttaaaagggaagagatgtgacttttcttaccaacccccttccttcttgttgcatggaacaaggatgtgatagctgaaggtcaagcagccaccgtgaaccataagataaccagaagataaactatgcactgaggaaggtggaacagaaagagaatatcctgagcctctaatgtcactgtgaagttgctatgagagctgtggactgcctagacttcctgtatgtgtgacaaaaaataaactcaagttttttttttttttttttgagatggcgtcttgctctgttgcccaggctggagtgcagtggcacgatctcaaatcactgcaagccccgcctcctgggttcacaccattctcctgcctcagcctcctgagtagctgggactacaggcgcacgccgccacacctgatttttgtatttttagtagagacggggtttcaccgtgttagccaggatggtctcaatctcctgaccttgtgatccgcccacctcggcctcccaaagtgctgggattacaggcgtgagccactgcgcccggccttaaacttaagtttttaacccatttctttgttgctattgctttctatatagtgtttttgtttttatggtggccacatattacttcaaaaattagatttaaaaaacaaacaaaaaaaatgctaggaagcatgacaatcagcaaagtactgaattgtttataaatgtggcaagagagttaaattcataatggatgattcaaaagaaagggggtgaggggctgataccgagaaaggtaaaatgatgatagttctaggctgggagtgatggctcacgcctataatcctagcactttaggaggctaaggtgggaggatcacttgagcccaggagttcaagaccagcctgggcaacaagtgacaaaaaacacaaaaaattagtcaagcatggtggcaagggtctgtattcccaactactcaggatgctaaactgggaggatcacttgaggccaagagttggagaccagcctggggaacatagtgggacctcgtctctacaaaaacataaatatttaaattaaaaaaaaaaaaaaagttcagcctgggcaacatggcaaaaccccatccctaccaaaaaatacaaaaattagccaggggtgatggcatgtgcctgtagtcccggctactcaggaggctgaggccggaggatcacttgagcccaggaggcagaggttgcagtgaaccacgatcgcactactgcactccagcctgggtgacagtgagaccctgtctgcaaaaaaaaaaaaaaaaaaaaaaaaaagtcaaacataataaagttactacataacccagcaatttcactccttgaataaaaaactcaagagaattaaaaacattgtccacaaccttgtacacgaatgtgcacatcatcagcattattcataatggccaaaaagtggaaacaacccaattgtctatcaagtgatggataaataaaacttggtatattcatacaacagattattattcagctaaaaaaggaattaagtattgatacatgctacataagaatgaaccttaaaaagtgttatgtcaagtgattaaaaaaaacaaaaaaaagtccagaagagcacgtatcattccatttgtatgaaatatccagaataggcaaatctacagagacaagagagttggctgggtatggtggctcacacttgtaatcccagcacttttggaggccaggactggtgcattacttcaagaccagcctggacaaaacctcatctctactaaaaatacaaaaattagccaggccactcgtggcgcatggctgtaatcccagctacttgggaggctaaggcacgataatcgcttgaacctgggaggcggaggttgcagtgagccaagatctaactactacactccagcctgtgtgacagtgagactctgtctcaaattaattaattaattaatagaaagtagatgagtgcttgcttgggggtggtgaggaggggacaacatggactgacagttaaggagtaaggggtttttcttagaataaaatgttctaaaattagattgtggtgatggttgcacaactgtgaatatactaaaaaccattatattgtacattttaagtaggttaattttatagtatgtgaattatatctcaataaagctgtttaaaaaaagaaatacagctggcctggtggctcacacctgtaatcccagtaggttgggcggatcgctcgaacgcaggagttcgagaccagcctaggaaacatgatgaaacccccatctctacaaaaaaataaaaaaaattagctgggcatggtggtgtgcacctgtagtcccagctactcaagaggctgaggtggaggatcatttgagcctgagatatggaggttgcagtgagccaagatcacaccactgccctccagcctgggccacagagtgcaatcttgtctcaaaaaaaaaaaaaaaaaaataggcctggcagtggctcacgcctgtaatcccagcactttgggaggccgaggcggacagatcatgaggtcaggagattgagaccatcgtggccaacatggtgaaaccccgtctctactaaaaatacaaaattagccaggcatggccaggcgcagtggctcacacctgtaatcccagcactctggcaggccgaggtggggggatcacctgaggtcaggagttcgagaccagcctggccaacatggcgaaactctgtctctactaaaaaatacaaaaattagctgggcgtgtccgcaccactgcactccagcctgggcaacagaaggagactcagtctcaaaaaaagaagaaaaagaaaagaaagtctacttacagcttaatatgattaactatagaaatctaccgatgtgaaagagtatctaacaatttctaagacccagaaaagctgacatcctagataccttaccaattttgatcgccacttctcatgacagaagatgctaaacatagcttctctcggatggaccatggctctgtggggccagtgcttagcagcttgtgttctgggaaagggagaaaaaaaaaaaagccttggaaacaaccactgagactgtagtgctaagctccaaaatccccaaaaagaggactaaaagcctaatacaaaacatcccaacttgttaggacaaagtgagctactataaccaaatcttgattttcacctctccaagtgaaatatcaccagtgaccggggtacctattcgttgcatgtgaattattaacattttatttcttaaaacgccatggcttgaagctccgctttattaagaaacagggaatgtcagattaggcagttctccctaaaagcccagttttaagaatactggactttattccagtttgaacttattcagggcttatttcccaggaacccgagcggccagcccctcctactaccccgcctccctcttagcataaacttgtttacttctctcagatcctctactccaaatgtcgggggtaaaagagcttttcagtccaaaaaaagaaaaatggctgaaatccccgagatgcaatttcctgagtggcaagaaaagctcatggttaaaagaccccacttccactgcctcacaaacgtcagacaaaaaaatgaatggctctttgaggtgccggttactccgtctggctcataacatcttttcgtctgcacgcccaagtttctagagtgcttttacggttaacccgcagagttcctaacacactaggattcactaagctgcttctctcacacctccgctctctccctgagaaacaagaccccagatttctgggcccccaaacgttggtcttcacgatgctgtagagcgcaggtctctgaaaaccctgggctctcaagcaacccacttctcccactccctaagcgtgtaacaaaaatatggtgcctagcctcggatctacaaaggcctttcacgcaaaacctgctcagatactcactgcccgttcccgtcgccatcttggccccgaagtctccaaccctgaggagagacggtctggaagggccgaaaccctggaattctgggaaatagtgtaccggcgttggttcgcggtgcctcctgggaaatgtcgtttttccccttaagacaaagcaagcaccctaaaccagttaccctgtgcactcctgttaagattgttgctaaggaaggacaggagttggctgctgaagcctcaagatttcctttaggctcttaggtaagaaatgtctaaggttcaaggaaaaaggttaagttggaagaatcccaggcaaaataagtgcgaatccacgaca

SEQ ID NO: 1147 - DNA, 2241 bp, Homo sapiens
agtagtgtaatcacagctcactgcagcctcaacctcctgagctcaagcaatcctcccacataaggctttcaagtagctgggagcacaggcacatgccaccaagccggggtaatttttaaatttttttgtggagacagtctccctatgttgccagggtggtctcaaactcctgagctcaagcgatcttcctgcctcagcctcccaaagtgctggaatcaaaggcatgagccaccacatctggcctatatatacattttcttagattatgctttacatcggtggttttcaaactatattccttggagcctaggtttctaaagaggtacccaggctgggcatggtgactcacgcctgtaatcccagcactttgggaggccaaggtggacagatcacctgaggtcagaagtttcagaccagcctggccaacatggcaaaaccctgtctctactaaaaatacaaaaattagccgggcatagtggcgcacatctgtagtcccagctactcaggaagctgaggcaggagaatcgcttgaacctgggaggcagaggttgcaatgagctgagatcgtgccactgcactccagcttgggtaatagagcaaaacaacatcttaaaaaaaaaggaaaaaaagaggtatgattctgtctcaaaaaaaaaaaacaggtacctcaagggttaaaaaggtagcattctgaccaggagtggtggatcacgcctgtaatcccaccactttgggaggctaaggcgggcggatcacctgaggtcaggagttcgagaccagtctgaccaataggaagaaactcggtctctactaaaaatacaaaattagctgggcatggtggcacatgcctgtaatcccagctcctcaggaggctaaggcaggagaatcgcttgaacccaggaggcggaggttgcggtgagccaagatcgcgccattgcactccagcctgggcaacaaaagcaaaactccgtctccaaaaaaaaaaaaaaggtagcgctctaagtttccctctcacacaagaatcaaagcagttctattctcattggtcttaaaaagtggaagtgaaagatttcagctgaagaaagtataagagccatctgtcttatatcaactggtgaataaacaaaatgtggcatatccaaacatggaatactactcagcaataaaaggaactactgatacatgctacaatatggatgaacctcaaaagcatgctaatggatgggaggctgaggtgggaggatcacttaaggtcaggagttcgagaccagcatgggcaacatagtgagaccctgtctctaaaaataaaaagtatccaggtgtggtgatatatgcctgtagtcccagctactccagaggctgaggcaggagaaagcttgagcccaggaattcacgccactgcactccagcctggtgacagagagagaccgtgtctcaaaaaaaagctaactgaaagaagccagacaataagactaaatattgcaagaatctatttatatgaaattcctggaacaggcaaaactataaagaagcaaagcagtggttgctgggggatgggaatgggactgactgcaaatacacacgagggaactttttggggtgatggagtattctaaactggattatggtaatggttacaactgcataaatttacaaaaactcattgaaatgtagacttaacattttatggtatgcaaattatacctcaataaaactatgtgtttttttggtgtcttttttttttttttttttttgagacagagtttcgctcttgtcgcccaggctggagtgcaatggtacgaccttggctcactgcaccctccgcctcccggattctagcgattctcctgcctcagtctcctgagtagctgggattacaggtatccgccaccatgcccggctaattttcatatttttagtagtgacagggtttcaccatgttggccaggctggtctcgaactcctgagctcaggtgatccacccgcccaggctggtcttgaactcctgggctcaagtaatcctcctgcctcagcctcccaaagtgctgagcccctgcactggcctaagctatattttttttaaaaagaatgaagagctacaccaagactaagaaggattttcatgaaatactgttgaatgagaaaaccaaaatgcagagtatgtatataatatcctatttttgtaaagcaagcagcccattaaaccttgcatatgtatatatacatattccttttaatgtg

SEQ ID NO: 1148 - DNA, 38771 bp, Homo sapiens
  misc_feature (7892)..(9416): n equals a,t,g, or c
gtgacttgtagctttaacaaaaattaggttccctagttgcagctgccagggaaagctagtctaatatcaaagcaaaccatccttcttctcaagcacagagtttttaagataggagtgtgtgtgtattgacattttcctagcagtggctgaagtcaaggaccaggagatttagggcccacttggagttcttatggtgaaacagtagtagcttcctagagacctttaaagcttatctgtaatttgtatagttcagaagatactgtatacatcattatttctccctgctttcaaaacaggaagggggtgtggagagtaacacactaaaaaaaggataagtaattaatttctgggtaagaatttccttttggcttaaaatggactgatggtgtaagttcctccctttgcaagcagaagctttgaagatagtgagctagatgaagctctggacatcttgaatgaagtattctgtataagaaccaagtgtataataactgttagtaatagaggctgctcatagaaatgtcattgcattataattgtagggacagtttgtcagagagtaggtagaagattatcagacccaggttttgttcttggctcacatgaagtcatcaagtaggctatttaaatgcttcactttaaccataggctaagattaaattaaaaataaaaagcttttgtcatggccgggcacagtggctcatgcctgtaatcccagcactttgggaggctgaggtgggtggatcacctgaggtcaggaatttgagactggtctgaccaacatggtgaaaccctgtctctactaaaaatacaaaaattagccgggcacggtggtgcacgcctgtaatcccagctactcgggaggctgaggcaggagaatcgcttgaacctgggagggggaggttgcagtgagccgagatcgtaccattgcactccagcctgggggacagagtgagactccgtctcaaaaaaaaaaaaaaaaaaagcttttgtcaattaaagatgcttgtcagtactgagtattcatgttgctatggcacttttataagaaaactgtacacggtcatatctgcttccgaaaataatacatagtgagatagtaattttacaggcaattaagaatttgctggccaggcgcggtggcttacacctgtaatcccagcactttggaaagccaaggtgggtggatcacctgaggtcaggagtttgagaccagcctggccaacatggcgaaaccctgtctctactaaaaaaaaaaatccaaaaaattagccgggcatggtggcaggcgcttgtaatcccagcaacttgggaggctgaggcaggagaatcacttgaacccgggaggcagaggttgcagtgagccgagatcgcgccattgcactccacctgggcaacaagagcaaaaactccgtctcaaaaaaaaaagaatttgctataatagaagatccatgtgtacattctgtatgcaaatcttaggaagatattagatcccagaaggttaaagttccgatctctatatatttgtatatgctttaaggagaagtggcatccatgtagatgtggtaaatggcttataactctcgaggtttccaatttctgctgtggtagcaattctaaactcagatggacttggacactactctggattactgtccctaaatatcaactactgtttataagccagcagaggccaactgaaatagtacacataaagttcctacagcatatccctcagtcagaagtggaaaagattgattaaagttggagtataaacatatggggccctgaccaaaaatattgaaccgtactactagaaatccccattctttagctaaaggataatctgacttcacttttaattcttcattgactattggtgctctgaaagaataggaaataatagcaaaacatgggaactcctagatagcatacatttatttttaaaatgtataccatcggccaggcaccatggctcacgcctgtaatcccagcactttgggaggccaaggtgggcggatcatttgaggtcaggagttggagaccaccctgggcaacatggtgaaaccccatctctactaaaaatacaaaaactaactgggtgtggtagcacacacctgtaatcccagctactcaggaggctgaggcagtagaactgcttgaacctggaagacagaggttgcagggagccaagatcacgccactgtactatagcctgggagaaaacaaacaaaaaacatatggtcaacttcccaagtaaactgaccaatgtcagtttaggttcagtcttactgtaggagtgcctgccgtaggccagcgcctctcaacctttccactaagtacattaagatcctaacagtaatcattgggaccccaggtcatcgtctcaacagaagctccagatttcttcaagtcttggccctcttgttttatatcaaaattttatgtatattatttttatattttcaaaaattctccccagatcatcaagtaatattgagatgctgacatagaaaaaagtagatttccagctggtatgatcagtgataaattggacttcatcaaaattaaaagcttttgtgcaccaaaggatactatcaagaaagtaaaaagctatcccacagaataggagaaaatatttgtaaatcataagtctagtattcagatgtctaaagaactcttagaattcaacaataaaaagataacccagtttacaaaatggatatgaatagacagttctctaaaagagacatatacatggccaataagctcgtgaaaagctgtttaatatctttagtcattagggaaatgcaaatcaaaaccacaatgatatatcatttcacacctactaggatggcaataatcaaaaacacacaaacagatgttggtgaagatacggagaaattggaaccctcaagcattgctggtgggaatgtaaaatggtgcagccacttgtggaaaatagtttgtcagttcctcaaaaagttcacagttaccatatgacccagcaattccattcctagggttacacccaagggaactgaaagcatagattcacacaaaaacttgtacacaaatgttcatagctttattataatagccaaaagtggaaacaacccagttgtccaccaattgggacaaattgaatgaatacacaaaatgttatatccacacaatggaatgttattcagccataagaaaacaatgaaatcctgatcacatgctgcgacacagatgaaccttgaaaaattgtgacatgaaacaagccagacacaaatggccacatattgtatgattccatttatatgaaatacccagaataagctaattcgtaaagacagaaaatagattggtggttgctaggggataagaggaagggtgaattgggaatggccactatgcggtacagggtttctaatgttctggcattagatagcagagatgaaaatgttctggcattagatagtggagatggttgcataacactgaatatactaaaatccactgaattgtacacttaaaaaaatgaagaaagaaggactatgcatgatcaaagaaaaaaatgctttgtgctcaagtagggatagaataaacagtaagactggaaagactgtgaagggccttgaatggcaagctaaggaagttagctttcatcttatagatcgtaggaagccaccagagtattttgagcaggggtggcatgtttaaggtagtgttataggaagtttaatttgtgaaatgagaaagagatactatcagccaggagaggtagaaggttctataaagtcaaattgaacacccgaagtttcagatttcatgaatgaccctgggtatgtgtgtatacacatatgtatgggatttgtagtcatctggggaaggctgaggtgctaatatgaatactgaaaactagagagggtaatatagcagagtagttaaaaatgaaaacactctgaacccacatgctgtctgggttcaaattccagctgggctaccttccagcactgtgaccttaggtaagtcactaaccctgtctgtgcttcagcttcctcttccgtaagataaggatacctactcatcaaggttgttttgaggattaagtgggttaatacatacaaagtgtttacaatgtcaagcttaaagaaaggtccccaaaaatgtcagctgctagtctgaaactccagagcaggtttgagagtaacccgctgttgttctctgccccggataaactatgaagtaacagtcctaaagtgttaaaagacaaaacaaatttttctttgtgaaaaatgaccctttaaaaaaactccatctactaataatgaagcttagtagtagtaaaatgatgatttttagccataaaacgggttttctatatcttcacaaatatagtgtagagtttcacaatattctttgatatgaaccagtctctcatactttctgtatagcactgattcgctaagtaagatgccaaggcatgacctcccttcaggaattgggaatctgcatttttaataagcatcctaggtaattcttttttttttttttttttttttgagacggagtctcgctctgtcgcccaggccggactgcggactgcagtggtgcaatctcggctcactgcaagctccgcttcccgggttcacgccattctcctgcctcagcctcccaagtagctgggactacaggcgcccgccaccgcgcccggctaattttttgtatttttaatagagacggggtttcaccttgttagccaggatggtctcgatctcctgacctcatgatccacccgcctcggcctcccaaagtgctgggattacaggcgtgagccaccgcgcccggccgcatcctaggtaattcttatgcatgatacaggttgagaccagtgccatgtacagaagtgggaaaaatggcttatgaaactcagttgtatttagcacactgtgttagacataaaatttgaaaacccaacctggacaacacagtgagacccagtctctactaaaataaaataaataagtgaacattgaaaaccaatggatagtagaatgtattcagttcagtgagacatgaaacaatatttttgcttaattgaatcaaacatatgttaaaaaaaaaaaaaaaactcaccctactcccaaagcactcaataaattcttcagagaaaaggaagagctttttgtactacattgcctctaaaatcttctgtaggataagacattttaagatcacttaaaatcttgttttaagtttttaagtctcattttaataaccaaataaaatggtttttatttgagccagtttcaagttcttaaagtgacacataggacttaacaaaatccattagttgtcatttgtgctttgcccatttttactgatttcttcatactctgaaggaaaaaaaatgctacaaatgtatgttggtatataagagagtgcattccataaatattagaaattttttttttctttttttgagatggagtttcactctttcgcccaggctggagtgcagtggtgccatctcagctcactgcaacctctgccttccagtttcaagtgattctcctgcctcagcctcctgagcagctgggattacaggcgcccgccaccacgcccagctaacttttgtatttttagtagagatggggtttcaccatgttggccaggctggtcttgaactcctgaccttgtgatccacccacctcagcctcccaaagtgctgggattacaggcgttagccactgcgcccggccagaaaaatattttatagaattcaaacttgtattttcttttgaagggatataaaaagggtgagagaacccaacaaccacacttattcaaatttataaggataattaggagtattctcatggttatctttagaatcttagcagggtaaaaaagagtttattgtttcatttgctgaaactcctgagaagaagtctcaccacatttgtatttacagagattagatttggcaactctaaagacaagagaaattactcatgataagtgtttggaggggttggagagaaaacagctaattaggcacttggcagtgtggcagggcaacctttgggcaacccagtccagattaggttagaagaggagcacggaccttttgtccactgcaaaccagtgccacaaatgaagtgggaagagacaggttaccacatactggttggacttgagagagaaccagaaagtgtacaatcccataagcataaaaaatggggataaaacttcaagtgtatataagggtaagaacaggaggaagcagtaacagagagggcaggagagaaagatcagaaggaatcggacgcctgagaagaggaactgggggctgagtcctgtcctggcctggccgctccccattcctccctctgcctctgagggcttcagttttcccaagtgagaaacagctgtgctagattgcttctacagtcctttccactcctggaccgaaacagttgcccctgcatctaaaatacgtagctctagcatataaaatgcaggttacctcaactcccccccgactcccacatctcactcccttcctttccctgcctgccctaattctggctgcgttctgttcttgcctcatatggactctttttctcctccccttcttttccaatgtcatgcagtctcttaacactgggtttcaaccactatacagaaaaatgttagtgaaaaaggaagaggggttccatgctgcttgattctccctaaccaggcacactaaactaggggtgacagtgtatcacaaagtccagactcacagtcttgctgccccttctcctcttcaaagtttgtttccgaagtaccaccccttgcacctcacatcccagccaactctgcctacctgtcagccccagccctcctcaggcctgcctcagcctcacagccaggatcctaccaacaccaacaccgcgccaaataacccctcccaaaagcctcaccggaactaatctggggactctgcctattattaggaacaccttggatgaagcccctacccgcagaattctggcagtagcagcagaattttcaggcatgtgcctaattttgttggggtggtggttgattattttttttaaatctaggatttctgggatctgaagcttatacaatcttggatatcttctttaagaaaaagaatacaaaaatatcttctataagttttacaaaaatatatgaccatgtgagcacgttgctagctcccgcccccaccccaccccccagagccttggaaggggagtgaaactgaagcttttttagcttcatggcaaatatgcttcttcctgagagtactgggtacattcacagacctttattttttactttctatagatttaatttagttaagtcagttcgaagcgggcaaaggccaaaatttctcacccctaggtggctcaaatttctgagcctgagattttatatcttaaaatccattaaaagaatactcaattttcggccgggcgcagtggctcacacctataatcccagcactttgggaggctgaggcgggcagatcacgaggtcaggagatcgagactatcctggctaacacggtgaaaccccgtctccactaaaaatacaaaaaattagccaggcgtggtggcgggcacctgtagtcccagctacccaggaggctgaggcaggagaatggcgtgaacccgggaggcggagcttgcagtgagccgagatcgcgccactgcactctagcctgggcgacagccgtctcaaaaaaagaatactcaatttttaagaagttaggtgtaggtatgcttatataaaatatttagacatgcataagtattttaagtggcctgaaggaagtacatgtatgctacttttgcaaatattttcgctttttttttttttttttttgnnnnnnnnnnnnnnnnnnnnnnnnnnnnnnnnnnnnnnnnnnnnnnnnnnnnnnnnnnnnnnnnnnnnnnnnnnnnnnnnnnnnnnnnnnnnnnnnnnnnnnnnnnnnnnnnnnnnnnnnnnnnnnnnnnnnnnnnnnnnnnnnnnnnnnnnnnnnnnnnnnnnnnnnnnnnnnnnnnnnnnnnnnnnnnnnnnnnnnnnnnnnnnnnnnnnnnnnnnnnnnnnnnnnnnnnnnnnnnnnnnnnnnnnnnnnnnnnnnnnnnnnnnnnnnnnnnnnnnnnnnnnnnnnnnnnnnnnnnnnnnnnnnnnnnnnnnnnnnnnnnnnnnnnnnnnnnnnnnnnnnnnnnnnnnnnnnnnnnnnnnnnnnnnnnnnnnnnnnnnnnnnnnnnnnnnnnnnnnnnnnnnnnnnnnnnnnnnnnnnnnnnnnnnnnnnnnnnnnnnnnnnnnnnnnnnnnnnnnnnnnnnnnnnnnnnnnnnnnnnnnnnnnnnnnnnnnnnnnnnnnnnnnnnnnnnnnnnnnnnnnnnnnnnnnnnnnnnnnnnnnnnnnnnnnnnnnnnnnnnnnnnnnnnnnnnnnnnnnnnnnnnnnnnnnnnnnnnnnnnnnnnnnnnnnnnnnnnnnnnnnnnnnnnnnnnnnnnnnnnnnnnnnnnnnnnnnnnnnnnnnnnnnnnnnnnnnnnnnnnnnnnnnnnnnnnnnnnnnnnnnnnnnnnnnnnnnnnnnnnnnnnnnnnnnnnnnnnnnnnnnnnnnnnnnnnnnnnnnnnnnnnnnnnnnnnnnnnnnnnnnnnnnnnnnnnnnnnnnnnnnnnnnnnnnnnnnnnnnnnnnnnnnnnnnnnnnnnnnnnnnnnnnnnnnnnnnnnnnnnnnnnnnnnnnnnnnnnnnnnnnnnnnnnnnnnnnnnnnnnnnnnnnnnnnnnnnnnnnnnnnnnnnnnnnnnnnnnnnnnnnnnnnnnnnnnnnnnnnnnnnnnnnnnnnnnnnnnnnnnnnnnnnnnnnnnnnnnnnnnnnnnnnnnnnnnnnnnnnnnnnnnnnnnnnnnnnnnnnnnnnnnnnnnnnnnnnnnnnnnnnnnnnnnnnnnnnnnnnnnnnnnnnnnnnnnnnnnnnnnnnnnnnnnnnnnnnnnnnnnnnnnnnnnnnnnnnnnnnnnnnnnnnnnnnnnnnnnnnnnnnnnnnnnnnnnnnnnnnnnnnnnnnnnnnnnnnnnnnnnnnnnnnnnnnnnnnnnnnnnnnnnnnnnnnnnnnnnnnnnnnnnnnnnnnnnnnnnnnnnnnnnnnnnnnnnnnnnnnnnnnnnnnnnnnnnnnnnnnnnnnnnnnnnnnnnnnnnnnnnnnnnnnnnnnnnnnnnnnnnnnnnnnnnnnnnnnnnnnnnnnnnnnnnnnnnnnnnnnnnnnnnnnnnnnnnnnnnnnnnnnnnnnnnnnnnnnnnnnnnnnnnnnnnnnnnnnnnnnnnnnnnnnnnnnnnnnnnnnnnnnnnnnnnnnnnnnnnnnnnnnnnnnnnnnnnnnnnnnnnnnnnnnnnnnnnnnnnnnnnnnnnntcacgcctataatcccagcactttgggagtctgaggcgggcggatcaccagaggtcaggagttcaagaccagcctgaccaacatggtgaaaccccatctctactaaaaatacaaaaattagccaggcatggtggcacacgcctgtagtcccagctacttgggaggctgaggcaggagaattgcttgaacctgagaggcagaggtttcagtgagccaagactgcactactgcactccagcctgaggaacagagcgagactctgtctcaaaaaaaaaaaaaaaaaaaaagaatgtaagtaatttgcccaagctgcagagctaaattttaaactagataattctgattccaaagcccagataatctggctagaagttgcaccaggggattcactgatttacaaagaattagaatgtgataaaattccctgagtacaggcaagtgtgatttttatctttgctagtaaagccatttagatgtcttaaagtgcctcaatctgttgcacctgttctactaaaacaaagaaatgagtcaacggcctcttttagctttaacattctctctgtctatacatttttatagaataatttttagttattgcagcaggtttcaccagtcagccaacgggtgtgtataacattaatcactagcactacacctcagaagtcttgcttattaagagcactcagcttaagtgaagaaattaaagaattttggtaggcctttgggacagttcaagtttaggttgtttggctgggttgagagagtaaaaaactaacatttcttaacctaaccctttttctttctttctcacaggtaacaactatccaatagcttacctttaaaatgtcccctctattgttcctccctcagacatttttgatcacttgtcccagtttccatgagtcctgtatcacagctgtcacaatgcttgagctatttaggtggaggtaactttcagaaatgaactgctgaagggtgcagagtgctcaagaattagattaacaaagaaagtacacctaaatttagcattaaaatgaacttttaaaatatttttcaataggaggataagcaaacataaaaatgggtgtgcttatgtctataaacaggtgctggagcatagattgttatctggacatcaaagaataatagagctgtagctttaaaagagcacacagctggttattagtgattcactcccaggtcactgccaagtgccaaggcatgtggcaagaatagtagaatggaaatcaggtgatgtggattctaatttgagctctgctctgttaaccttgggcatgccagttatcccctttggaccttagtctcttatctacctaatgaagggtttggagcaggtaattcttcagttctaagtaagaatctgtattcatgaataactgttcagcatatgactcagcccaaggtgtacaggattgctggagtgtggaaggtatgttggctcctgcctgtactagcaacaaggcttaatctagtgaacagaaaggatcaaaggtggctatatccccacctaaatgtccatgatctacaagtgctcttctagctggcagagtgggtcagtaatgagattttgtatctcattatatgaagttctaagcactgaacctaatcagttacccatcacttaagtagacagtgtcaggcagagcttaactctccttcctattttcctttgtcttccttttctctgtaagttctctaacataaggaacttccattttggtgaaagaatagaaaagttgagggacaggccaggtgtgttgtaagtaagactgatccagctgattggtttgccatttagattgcatggcagacatctgccataagcacttaaaacacaccttcaataggcattagaaagcacacacacggccaaacatagtagctcacacctgtaatgccaatactttgtgaggctgaggcaggaggattgcttgagcccagcagttcaagaccagcctgggcaatatagcaagatgccatctctacaaaaaattttaaaattatctgaatgtggtagtacattcctgtggtctcagctactcaggggtctgaggtcggaagatcacttgagcccaggagatcaaggctgcagtgagccatgactgtgccattgcactccagcctttgcgacagagcaagaccctgcctcaaaacacacacactgactagggatggtggcttatgcccagcactttaggaggctgaggcaggcagatcacttgaggtcaggagtttaagaccagcctggccaacatggtgaaaccctactctactaaaaatacaaaaatcagccatgcggccaggtgcagtggctctcgcctgtaatcccagcactttgggaagctaaggcaggaggatcacctgaggtcaggagttcgagaccagcctgaccaacatggtgaaatcctgtctctactaaaaatacaaaattagccccgtgtggtggcgcctgcctgtaatcccagctacttgggaggctgaggcaggagaatcacttgaacccaggaggcagaggttacggtgagccgagatcacgccattgcactccagcctgggcaacaagagcgaaactccatctcaaaaaaaaaaaaagaaaagaaaatcagccatgcatggtgacacacagttgtaatcccatctacctgggaggctgaggcaggagaatcgcttgaacctgggaggcagaggttgcagtaagccaagattgcaccactgcactccagcctgggcaacagagtgagactgtgtcttgaaacacacacacacacacacacacacacacacacacacacacacacacacataatttgctgttgttttgggggcatggcggcacatacctatagtcctagctacttgggaggctcaggcaggaggatcacttgaacccaggaagttgaaactgcagtgagctgtgattgtgccgctgcactccagcctgggcaacagagtgaagtactgtctcaagaaaataaaaaaataaagaaataaaaacataaggtttagatggcaactttaaaatgtgaaaggaggatatacagtttttcaaaattcttctaggagctatgccagcaaaaaggtttgaagacctgaagaccattatatcagtggcataaacatctttaatttgtccttttccttctcctacacctagtcaattgattttttttttcccatttatcaatttcagactctgcctggtttttcactttcccatccattttgttacaatatttttcctcccttgaaattagcccagtctcttggagtgaatgccccatgctccttcctaccgctgtgtctttactacattatcctcccttggaatgccgtcatctcttctctgttcaagaactacttctcccgaccactgtggtcgagattgatttctctttaacctctacaacattggctattccatacagttagcccttagcatagaacatcattgtttgattttgctccttaagaatagaaagcacctcttaaaattctaccatattcccccaatgcctaatgcaatgctaaccacatagtgagtgcttaataaatattgtattgactgcctagagtacagagcacttgttcactcattgttcggccattcagctaatactttttgagaaattttgtgtaccaggaactgtactatgcactggggtacggtagggactaaagtagatgataatccctgctttgaaagactgaaaagtaagatatatggtatgtcaaaaggtaataagtactgagaagaaaaatagaaaaagcaggaaagaagaacaagaagtgtgtgatgggggagggttacagggtggggaggggtagtgttgtatacacttctagataagatagggaagtcctcactgatacttatggtgacattttacaaaggacctgaggtgtaggaaggatttgagcttatctgtgcaaagagccttccaggcaaggaacttaccatgtgaaggcaccaaggctggacctgcttaacattccaggaagggaaagctttggggctggagcagaagggtagaggccagattgagagatgagtcagaggacagtggggcccgggcagagggacagaacctgcgggtgctggcaatcagccttttgatctgagtgagaatagaggccttgagagggctttgagcagaggagtgacctgctgacttaagttgaatagaaccctctagatgcttcattaaggctagactgaagggaggcaaaggcagggtgagatcagtcaggaggcaagtatataatgataatacattgaatataataatgatatattaataataataatccagagatagtggcaactcagaccaggggaagcagtagaggcggagagaagtggtcagattttggatttattttgaaggtagaacagacaggattgctgactctgttgagtagtcagctgggagctattgatggtttctgagcaggagctgaaggaagattaccccggtataggactgctgggaagacgtggtgcaggcagagatcaggtaggaggccattgcaaggatttaagggtgagatccataagggttttaactgcaaatcagcagaggaaaaagggagtggtgatggtcatggtgacagtgatggtgagagagactggaaaggaggaatcaacaggatttcatgactagataacagagaaccaatatgaagaaggaaaacactttttttttttttttgagacggagtctggctctgttgcccaggctggagtacagtgagacgatctcagctcactgcaacctccgcctcctgggttcaagcgattctcctgcctcagcctcctgagtagctgggattacaggcatgcaccaccacgcccggctaatttttgtatttttagtagagatggggtttcaccatgttggtcaggctggtcttgaactcttgacctggtgatccgcctgccttggcctcccaaagtgctgggattacagacgtggagccaccatgccctggcaggaaaacacacttttgaatgttgtgtgacctggagaatggtaacactgttaatttaaaaaaaaaaaaaaagcccagagaaggctgatttagggagaaatttatgccttagttatacagagtttgagatggtaatgaaatatcaaattaaaactgtccagcaaggaagtaggaaatgtggaactgaaaaagaagttagaactaaagatgtggatctgtctttggcataaagattatattaagttacttgagagtagatgagtttccaaagaagcagtgtagcaagaatagtggagggccaagactggatcctgggggtcagcaacatctaggagccagaaaaaatgccttcggtgaaagaaacggaaagatgggtctattcaaattgtagtcagccaacccatgccagaagtaagcacagaaagtaagagtgaacattggccaagcacagtggctgatgcctgtaatcccaacactttgggaggccaaggcgggcagattgcttgagctcaggagttcgagaccagcctgagcaacatggtgaaactccaactctacaagaaattagccggtcctgtgcacacctgtagtcccagctgctagggaggctcaggtgggaggatcacttgaacctagaaagttgaggctgcagtgagctgtgagcatgccactgcactccagcgtgggcaacagcccggtggctcacgcctgtaatcccagcactttgggacgccaaggcaggtcgatcacttgaggtcaggagttcgagactagcctggccaacatggagaaaccccatctctactgaaaatacaaaaattagctgggcatggtggtgcacacctgtaatcccagctactcgggaggctgagacaggagaatcacttgaacctgggaagcggaggttgccgtgagccaagatcatgccactgcacttcagcctggacaacacagagagactctgtcccaaagggaaaaaaaagaaaaagatccaggagatccattcctaggtatatacccaagagaattgaaaacataaaaacatatgttcacacaaaaacttgtacatgggctcatacctgtaattgcagcactctgggaggccaaagcaggaggatcatttgaggccaggagttcaagaccggcctaggcaacatagtgagaccctgtctctacaaaatgcatgaatgtttgtagcagcattcttcataatgttcctaaagtggaaacaacccagttgtttgtcagctgatgaatgggtagattatatgcagagtatccaggctgggcgtagtggctcatgcctgcaatcctagcactttgggaagctgaggtggacagatcatttgagctcaggaattcaagaccagcctgagcaacatagtgagaccttgtctataaaaaatttttaaatgttaaaaaaaagaatgcagagtatccatacaacgggatattattcagccataaacaggaatgaagtactgatacatgctacaacatggatgaaccttgaaaacatgctaagtgaaataagccagacacaaaggtctacacattgcctgacgccatttatatgaaacacctagaataggccaatctatagagacataaagtagatgaatggttgccaggctctgggagttaagagagaatgggaaatgactgccaacatgtatggggtttctacttgaggtgatgaagatattctgaaattagatagatagtggggatggctgcacaaccttttttttttttctttttgagatggagtctcgctctgttgccaggctggagtgcagtggcgcaatctcagctcactgcaatctctgcctcctgggttcaagcaattctcctccctcagcctcctgagtagctgggactacaggcaggcaccaccacgcccagctaattttttgttagtagagacagggtttcaccatgttggccaggatggtcttgatctcctgacctcgtgatctgccctcctccggctcccaaagtgctgggattacaggcataagccaccatgcccggcgacaaccttttgaatatactaaaaaacattacattttacactttgaagggtgaattttatggtaaattatatctcagtagaaaaaaatccaggaaactgtgtatagtcagccctccatatttgtgggttccacattcatggattctaagctaaataataatacaataataaaaatataaataaaaaacaatatgctatatagcagctatttgcattgcatttacattatattaggtattatgagtaatccagagatgatttaaagtgtatgtgaagatgtgcataggttacatgcaatactacaccatattatataagggacttgagcatctgtggtgtctgctgcgagtactagaaccaatccttcatggacaccaagagataactgtattcaaaaccaatgaaaccagtgaaagagaagtttcaaaaagattgaaaacacagcagggcagtcaaggaaaccagggagaaaggaaagactagtggatttgggtattagaagatgaaagattaaaacaaatcattccatatcagcatgcagtccatagactactcctaaaagttcctgagacttctttaaggaatctctttggggtaaaaattattttcatgatactactaagatgtatttgtcttttccctatgttgacacttgcactgatgttgcaaaatggtggtaaaactgctggcgccttagcacaaatcaggacggtgacaccaaactgtaccagtggtcactgcattctttactgccatgcactcacaatcaaaacagagccagtttcacttaagaatcgttgatgaagtggtaaattttttttgttttttttttttgaggcagggtcttacccaggctagagtgcggtgggggcatcacagctcactgccgcctcaacttcctgggctcaggtgatgctacctcagcctcctgagtagctgaggctacaggtgtgcaccaccacacctggctaatttttgtttttgttttgttttgttttgtttttagagatggggtttcactctgtcgcccaggctaaatattgttaattgtatcaaatgtcagtccttgaataaatcttttttttttaactggtatgcaccaccacacccagctaatttttgtatttttagtagagacggggtttcgccatgttggccaggctggtctggaactcctgacctaaagtgatctacccgtcttggcctcccagagtgctgggaggtgtgggccaccatgcctgatcctgagtacatctttttaaacttgtttgaagaaatgggaaatatgcataaaccgcctctgctgcacactggtagagtacggtggttgtcacaaggaaaagcatttgggcgattattcaagttgcatattgatttagcagcttcttttttcaccgaccaccatttttacttgaaagaatgatagacaaactatggttttagacttaggcatctggcagacagtctcttgaaactgtatgaagtgagcctgtcacttcaaggtaaacaaatgacaatatttgtagccagtgataaaatttacactttcaagtaaaaattagaattttggaaaacttgtatccactcccatgagcttgaccacttttcaatatatacagacttttctgctgaaatcaatggtgaaatttaaggaatatgattttttgatatgtattctaatgaaatatgtcagtatttagaagatctgcctaacaacagggaaccagtattttgcagtgatctatgtgtgatgttacaaagtcatgcatggtaaaatatccattcaaagtgcaagagaagccaatgggttttattataacaaaagttcctaactgttaagaaactactacttgtcaagttttgatgtagcgctaaagaatatccaaaattatctgaaaatgcagatactttctctgtctgtgtaaagccagattttctttgtatattttaaccaaactaacatattacaacagattaaatgcagaagcagatttgagaatccagtcatcttctattaagtcagacagaggccataaatttatgaaaatgtaaaacagtggcattcttctcattagatggctttatttctttgattgttttgggaaatatagtggtttacatttaaagtatgttatttatattaatataatgtgtagtagttttactgttaatatttttactgaattaatcatatcttttactttttttttagttttattttcttccttttttttttttttttgatttggagtctcgctctgttgcctagtctggagcacagtggcgtgatctcagctcactacaacccccacctcctgggttcaagcgattctcctgcctcagcctcccaagtagctgggatcacaggcgcctgccaccatgtctggctggtttttgtatttttagtagggtttcaccatgttggccaggatggtctcaaactcctgacctcaagtgatccacccacctcggcctcccaaagcattgggattacaggagtgagccaccacacccagtttttagtcttattttctaacacagtagacattgatatatagttcccacattaacaaaagttgtttggggtgctcaatttatttatttatttatttatttatttatttatttattttattttaattttctttttgaggcggagtctcactgtgtcgcccaggctggagtgcagtggcacaatctcggctcactgcaagctctgcctcccaggttcacaccattctcctgcctcagcctcccgagtagctggggctacaggtgcccgccaccacacccggctaattttttgtatttttagtagagacagggtttcaccatgttaaccaggatggtctcgatctcctgacctcgtgatccgcccgcctcagcctcccgaagtgctgggattacaggcatgagccaccgtgccccgcttatattttttttatttttatttatttatttatttatttttgagacagggtctcaaaaaaaacaactttgttgcccaggctggagtgcagtggcatcatcgtagctcattgtagcttctgtctccccagactcaggtgatcctcctgcctcagcctctcaagtagctgggactacaggcacgcaccacccaccccacccaactattttttttattttttgtagagacagagtcttgctatgttgcccaggctggtctcaaactcctgggttccagtgattctcccgtctcagcctcccaaagcactgggattacaggtgtgagccaccactcccagccaaatttaccagacttaatggaaacagtccatttctgtttcttcagatgaaacctcacaactttaggattaataagtaatctcacaactattgtacaggaaataagaaaacgttcccgctaacaatgcacgttgtgatagatctggtccctgacacaaacagcacttggaactgagtgaagtccagagactgaataatacagttctatccactccctgtgcttgactacaacccctgaagagggcttgtacaaattaaatgtatcccagcagctgcttgaaagaccacagcattggccgggcacggtgactcacgcttgtaatcccagcactttgggaggccgaggcgggcggatcacgaggtcaggagatcgagaccacggtgaaaccctgtctctactaaaaatacaaaaaattagctgggcgtgatggcgggcgcctgtagtcccagctactcggagaggctgaggcaggagaatggcgtgaacccgggaggcggagcttgcagtgagccgagattgcaccactgcactccagcctgggcgacagagactctgtctcaaaaaaaaaaaaaaaaaacacgcattttgaatgtccctagcattagggattataaaggtcccattctagtagaagatcctcaggtttggagtgtactaaaggtcatcatccttcgcctgctaataaatttctgaagtccctgctttaaacaaacaatcaaaaagaaggaacagttacagtgctgccaaacaagttctttttttttttttgagatggagtttcgctcttgttgccaggctggagtgcaatggcgtgatctcggctcaccacaacctccacctcccaggttcaagcaattctgcctcagcctcccgagtagctgggattacaggcatgcactaccacgcccagctaattttgtattttttttagtagagacagggtttctccatgttgaggctagtctcaaactcctgacctcaggtgatccgcctgcctcggcctcccaaagtgctgggattacaggcgtgagccacggcgcccggccaacaagttcttacaaacctctgggttgttacaaacccatctggtgctaataaaggtaaggcatcaaccccaatctccaagctgagaattttatcctcaggactgagcactgcggcctgcattcggatgttagtggggctgtcagaaccgtgtctcatgctgttaaaagtggaagtccttcccactcagacccacggaagccaactctgatgagtgggagggtgagcagaaggggcttcggtcattttttatagattcttcaggtaactctagccaccatattaagcattggctcccacaaaaaagcattaaggctcagaaacatcttgtagggtcacaccctccctaaaaacagcacatccctgaagtggtggctgggcagccaggctccaaagcccgctgagctgagcggcagccaagaacaaggtttggtgtttacatactcaaaatcagcctgggttgtcacagcaactcacctcagcacagttcttccttctccacggcggcttgcttccaggctttgctgttctccgtcaccgtcttaacgttcctgctaacctggcctgctgcattctttttatttttctcccaattcctccgccttcttctcatgtgtttgctagtgtgcaatacctcacctgtttggaactcaacaacgtcccctcctgcaaaacgcacctgaaaacaagaaatagcacacaaggcctctaagtggccagaacagatgttaccaggcctaagtccataaggaaagcacccaagccccttgcttttgtcttaaatctttttttttttacacctttaaaataaggttatggtttctaaggcctgccgtaaattaggagtagggagaggaactattgccaagcaccccaaaagttcaagaggtgactgttgatcccagagtagcaaggaaagggacagacaggctataagaagtggacacaagaactcagaactcaggacagtgtaggccttgttagagtcaggcagacaatttcacatacctcagaacgtcataaagccatcatgactttactctggaatagatacgatccagacacctagaaaatgttaaattagattcaacttaaagaggcagagtaatatgtgtggtgttttttaatttcgagcattccaaatggttaagggttttcatgcttaaagagagaaacttagctacctagaacttatttatgagtgctctagataattatctactgttttatatttttttatttataccccgttactaaaacaaaagtaaaaataaagcaaaagattgaaggcattgacatttagtctatatactttctagttcctggctctagttcttagcaatatttgctgctaacctggtgttctgtctctgccaaatttctgcccatgtgaaatatatgagacttgatcctatttccttgctcattgatctacctgaaagggtcatagatgtctccacctccctagagctagtgatcctatatcccatcatctcagccagctagaaaacgaaccatcacatgccacctcctacccaattacgtgcttcataaacagaatacctggcatatagcaggcatttactaaacacttggtgaatgaatacatgagccagtaatccataagatatctgtagaattaattacagttgagccttgaacagcgcaggtcctatgggatcccaccccttgtacagtcaaaaatcctcataaaacttttttttcttttttttttgagacagaatcttgctcgttgcccaagctggagtgcaatggcgtgatctcagctcactgccacctccgcctcctgggttcaagcaattctcctgcctcagcttcccaagtaggtgggattacaggtgcctgcaccacgcctaactaatttttgtatttttagtagagatggggtttcaccatgttggccaggctcgtctcaaactcctgatctcaggcgacccacccgcctaagcctcccaaagtaggggattacaggtgtgagctgccgcacccggccgacaggtgtaactttttttttttttttttttttttttgagacagagtctcactctgtcaccaggctggagtgcagtggctctctctgctcactgcaatctctgctcactgcaacctctgcctcccaggttcaagcgattcccctgcctcagcctcctgagtagctgggactacaggtgtgtgccaccatgcccagctaattttttgtattttagtagagacggaatttcaccatgttagccaggatggtctcgatttcctgacctcgtgatccacctgcttcagcctcccaaagtgctgagattacaggcatgagccaccacacccggccacatataacttttgactctccaaaaacttaactactaatagaagacttaccaatagcataaacaagttgattaacatatattttgtatgtcatttgtgttatatatgtatttcttaccataaagtaaactatagaaaagaaaatgttattaagagaatcataagcaagaaaaaatatgtttactcttcattcagtggaagtggatcagcataaaggtcttcctcctcatgatcttcaggttgagcaggcaaggaggaggagaaagagaaagggttgccatctcagcagtggcagaggcagagggaagtctaaggggacccttgctgttcaaaattgtgttgatcaagggtcaactatacttgcatgaagctataaatttaagagcctagcctattatgggaacagcaattaaaaaaaaaaacaccagttggccgggcgtggtggctcacgcctgtaatcctagcactttgggaggccaaggcaggtggatcacctgaggtcaggagttcgagaccagcctggccaacatggtgaaataccgtctctactaaaaatacaaaaattcactgggcatggtggcgggcacctgtaatcccagctacttgggaggctgaagcaggagaatcgcttgaacctaggggccggaggttgcagtgagctgccaagatcgtgccattgcactctccagcctgggtaaaaacagctaaactccatctcaaaaaaaaaaaaaaacaccagttgatcctggcaccaggaagatcaaatggcatttgtttgtttgtttgttttgagacagagtctcgctctgttgcccaagctggagtgcaatggcacgatctcagctcactgcaaactctgcctcccaggttcaagtgattctcctgcctcagcctcccgagtagctgggattacaggcacccgccaccacacccagctaattttttatatttttggtagagatggggtttcaccatgttggccagtatggtctcaaactccggatctcaagtgatccacccacctcagcctcccaaagtgccttggtttacaggcgtgagccactgcaccagccagtacagttttttgttttgttttattttggttttttgagacggaatctcgctctgtcgcccaggctggagtgcagtggtgccatctcagctcactgcaagctccgcctcccgtgttcatgccattctcctgcctcagcctccctagtagctgggactataggcgcccgccaccacacccggctaatttttttttttgtatttttagtagagacggggtttcaccgtgttagccaggatagtctcgatctcctgtcctcatgatccgcccgtctcagcctcccatagtgctgggattacaggcatgagccaccgcgcccagccttttttttttttttttttttaatgtatgggggaaaaatgactagaaggacagaaaccaacatataacatgattgtgtgcatttacttatttaacaaataattgagcaatttatttctgtatgatactattctaagcgttttagagttaagcaaactcacagtaaactgtattgcccatgataaaaactgcagttacataatttaaaagcaagaatcgcagcaattcatcaggcacagtgactcacgcctgtaatcccaacactttgggaggccaaggcaggaagattccttgagcccaggaggtcaaggccagcctgggcaacatagtgagaactcatgtccacaaaaattacaaaatagccaggcatggtggcaagcacctgtggtcccagctactcaagaggctgaagttggaggatcacttgagcccaggaggtcaaggctgcagtgagcgatgatcgtgccactgcactccagcctgggtgacagagcaagagaccctgtctcaaaataaataaaaataaaagcaagaattgcagaaagtataaaccatgaccaactcaagagaataatcaatgaaagaataggcagaatgtctttccaaaaagcagttgagagatccccatcctccacatatgcactagtgcagtggggatgttgccaggcatggccgccagacctctagatagaacactgaaggtgagtctgcagtaaagccatggaatgtgctaattttagtttaggaataccaaattttattgaccgtttttaattcaataagcaacccttggccatgtataatcagttcatgacccatcagaagatcctctgtggttcactcatggcctttggactatactctgaatcatggctttagaagacatttttttagtatacttaaatggattttataacttggttgatgcccagattacagactgtgaggagtatctccacataacttgtaactgctatatatgcagtcagcaattccagtatttagcctgatattaatttatatttttcctcataatctgataatacagtgctagcaagatagatcacaaagtgtaaatgagtgtttctggagcatagatgggtacgctcaaatctttgtatcttgttttttaatagagacggggtttcgctatgttgctcaggctggtgtcgaactcctcggctcaagcaatccccttgcctcagcctcccagagtgctgggattatacatgggagccaccatgcctagcttccttgtatcattttttaaaattcaagtaagagaaaatgtctggcaatagttcataagctataaatgaaacctagtcttaggacccagctttatattgcctcaatcaaatattaatatctttagttcaaaatttgtatttacaaaaaacttttggttcttggggataccgttattgccttctctgttgccatccatataatgtatgttgttttttttttctctctccctctgggctgcgtttcatgccagataaacttccaaaccaaactgggatggcaccaggcacaaataacactcttcttatcttttcccccatctaggttacccctttgctttgttttatcggcattaccttttctacaaggagacctacctcatccacctcttccatacctttacaggcctctcaattgcttattttaactttggtgagtaaactaaattagcagtgacaccgcaattagtgggaacctggaaggaacagacttgaacaaaatttccttgagagaatctaataggtagggaagttataatgctcccacttgcaaagagggttgtatgaagaggaacacagcttaacttttcctttttttcttttatgtacattcttctgtcagataaaaacattttgagggtggttacccttgccatacctcatcaacaaagaatcctcagtttctctgtgctgtggatgtaactgaatgaccgagccaagcagtccccacttagattcattcttcacttcagacattcaaaaatacagtaacaagctgggtgtggtagcccggaattcaaggctgcagtgagctatgattgagctactgcactcaagtctggacaacagagcaagtcgcatctctaaaaaaacaaacaaaaaaagaaaagaaataaaataacaccctaataatcttttttattttaataaataatttccatcctctcctccaaaacatgaggttattctgaaaaaaaagatcctgatgccaacattttttctttatatattacgttgtgattggaagtctcaggacggtgggagtgtaaaaaccaggctaaattctctcttcttgcatccaggaaaccagctctaccactccctgctgtgtattgtgcttcagttcctcatccttcgactaatgggccgcaccatcactgccgtcctcactaccttttgcttccagatggtaaacgtctttcccttagcagctcaggctacagctgacagcggttcaggggacaggggtaggcaggggactgtggtatagaaattagcagacctaatttctaacccctctcccagcacttagcagtatgacttcaggtaggtggcttatcacaggcccaagtgttccatccacagattgtaatggtaactctttgcctgcctcaaggaagggccaccagctaaccctttgcatactgtgccattaggctctttggtttaacccactatccaggagcagagtcacttcaaggcaagacagaaaagcaacttagaatgagttaaagaacctaagcctaggccaggcaaagtggctcacacctgtaatcccagcaccttgggaggccaaggcagtcagattgcttgagcccaggagtttgagactaacccgggcaacatggtgaaaccccatctctacaaaaaaaatacaaaaattagccctccagcctgggcaacatggtgaaacaaaaaaaattaaaaattagccgggtggggtggcatgcacctgtggtcccagcatctaaattctcatctcagtttagccctcattttgccaagaagccttgagcaacgctcttcccattacaggttttcagcacctccatttgtaggaatttattaaggcttttaatgatgggatgaggagaaaggaaaaaggaaagagaacattgaatttcagagcaaggagaagaaatagtagtgatgctagaataaatacttctgcctctcctaggcctaccttctggctggatactattacactgccaccggcaactacgatatcaagtggacaatgccacattgtgttctgactttgaagctgattggtgagtgatggtcactgcctgccttccttacatgtaggtccctcccccatctcactaaaaacttcctcggcaccccccctccgccccccgccatacacttctggctgcactcagtctacaggccacatcctcagtgtcctctcccaccaccctacccatccgttctctctctgctcaggtttggctgttgactactttgacggagggaaagatcaggtaagtacccattcatcggcagagaggttcaagacttaatgaaagggaagaaaaaagttgttaacaaaagactgaacccaaattccagagcggagcctctccctcattccccagcctgtgcaatctccctttcagatagcactgagcaaggatcaacaaatctaatttgcccaggatccagctcttgcacaaagtccagagatcaatgccagcaaggcatttgctaaagcagcaacagccagctatgcacacacatacgcatttccacaagaagcaactatttgtcatcccccaaagagaaggctatttgaagaaccccagtcagtggggcacacaggtggggaacactcaaagtggctcttgtggggagattcaaggctatcctgaaccatgcattctcttcttggcatagaattccttgtcctctgagcaacagaaatatgccatacgtggtgttccttccctgctggaagttgctggtttctcctacttctatggggccttcttggtagggccccagttctcaatgaatcactacatgaagctggtgcagggagagctgattgacataccaggaaagataccaaacaggtaattgcccctcttggtccagatgtttgtgtaggtatttcactcactctgaagtgactcttctgaaagctgcattctccagcatgaccctggcatagagacctgagtcatgcaggccctggactgttgtaacaggcactctgtgccaggagtgggccctttttagtttagggttcttccagttatccattctaacactagtacaaacataaaaatccacatttatgccacaggattttgcctgaaccagtcacatttctgcctttaaagcctattttcatgtatatatgaaatatatttatgattgataggtaggtaggcaggttgataggtaggtaggtagatagaggctgggcacagtggtttcacctctataatcccagcactttgggaggccgaggtgggaggatcacttgagcccgtgagttctagaccagcctggcaacatagagagactctgtctctacaaaaaaatacaaaaattatcagacatagtggcatgcatctgtagtccaagctacataggaggctgaagtgggagaattgcttgagtccaggggaggtgggtcaaggctgcagtgagctttgatcacaccactgcactccattctgggcaacatagcaaaatcctgtctcaaaaatatttatcagtaggaaatgcaggagggcacagtggctcatgcctgtaatgccaacgctctgggaggccaaggcaggaggatcactggaggccaggagttcaagaccagcctgggcaacatagtgagaccccatctctacaaaaaaaaattatccaggcaaggtggtacatgcctatagtcccagctactcaggtggccaaggcaaggggatcgcttgagcccaggagttcaaggccacagcgagcaatgactatgcctctgtactctagccggagtggcagagcaaggccctgactctagaaaataaaaattaaaatggtaaaaaaaaaaaaaaaaaaaaagtttaattgccagaagaattccttcactgagaacttgtccatcctgtgtttcagcatcaattcaaccaagaaatgaaggagcagattcaaagtggttatttttattatcttacctccactgggttttcagtcccaatggagattgtgagacctggcaagaccttgagatcagtagcatccctgaggggtaaacacaagactggtccactgtctgctgccctgactttcctacaactcttaagaggtttgcagtccccattcctcatagccagccatagaaatctttccctgaaacaggaaacactttgggcagcagagcttctcatcccattccaggtagacaaccacacccctaaacactcctctccataactgaaggtcagagggtgaagggaatagtctctgctctctgtgaccaggaacttcactcgttcctttccagcatcattcctgctctcaagcgcctgagtctgggccttttctacctagtgggctacacactgctcagcccccacatcacagaagactatctcctcactgaagactatgacgtgagtgtctactaaagcagcagcagcatgactgcaccagagctagaaaatggacaggcaaggatccctacagatagcagagaagtaggaaatatcatctacaagtgcatgttggttttgctctagatctgtgagttgtcaatgccagccgtgctgggacatgttcatcagccagcactgaacaaccttcgcgggcacagggctgtgccaggtgcacatttagcacccgttgccttctctaggagccgctcctagcttgccttatcacatccacgtgacccctcagagcacagcagcttctgattctccatcctattttcttctcttgactgatacatttgggcacttctagggaattcagaaaccaagggaaggggggaagtgctggcttttgctcctgcccagctgaaaggcttgaaaacagttcagtaattctgggcaggtttctctccttaaattaaaatccaatatgggcccctctgtacttaacattccaaatgctcattccaaacactttgccaacgaaggcaaacagtagagaagttaaatacagtgctgcccttgaggctctccaagggaaaggcgaatgaatattctccaggccctctgcttattcctctctgcctattgtgaaggcaatcaggccagactattgagggcatctggcagcaggactcaggcaggtatgaagtagccagccacaagtgtgaaaaggaagagtgctgagagaaactgcctagtcatgtgatatccctaatgcactgtgctttcttccctcaagaaccaccccttctggttccgctgcatgtacatgctgatctggggcaagtttgtgctgtacaaatatgtcacctgttggctggtcacagtaagtagaaaagttgaaacaaggtcctatttagacaagccatgggggccagtatggggagtggcaagagccctaactgagctattccctctcaggaaggagtatgcattttgacgggcctgggcttcaatggctttgaagaaaagggcaaggcaaagtgggatgcctgtgccaacatgaaggtgtggctctttgaaacaaacccccgcttcactggcaccattgcctcattcaacatcaacaccaacgcctgggtggcccggtgagctgctggtggggagcctggaccctggttccttccttccactgtcttcccagattggagggcaggggtgtaccatgtcacccctatgcgtctttcccatctgggcagaaccccctgtcgctcacactgactttgacccccacctatacccccctcccaaaaaaaccattactgtcatatttgaaaaaaaggcaagatataaaagtgcgttaagacctgggtgttactccagctctgccaatggacttatgtcctccactgccctgtttatcaacagctttacttgtttgtccccaccactagagtgtgggcagcttgagtagagtgtctggttcaccactgatctcagcatcagcctcagtcactgctgctgaaccaagtggctcgtgcgcacacggtctccagctccgccttgggtctgctttccatctctaaaagtaatcagtcagcactgcctcctgtaccctctgggggctacacgtgggaacccaccagcactccaatccaatcctcagggtgaggacccagaggcaggtggcgggatgcaaggaccagtcagtttgagggtcgccccacccacccttttctccagctacatcttcaaacgactcaagttccttggaaataaagaactctctcagggtctctcgttgctattcctggccctctggcacggcctgcactcaggatacctggtctgcttccagatggaattcctcattgttattgtggaaagacaggtaggcctccagggtgggggtgaaggggaatataagggacaagatgctgatgagctcctcctccctccccaggctgccaggctcattcaagagagccccaccctgagcaagctggccgccattactgtcctccagcccttctactatttggtgcaacagaccatccactggctcttcatgggttactccatgactgccttctgcctcttcacgtgggacaaatggcttaaggcaagtgaaggcctgcttgtgagactgggagggactcactgcaacctcaaaggttgcaaaggacactccaggcctgtctaccttagtggcctctctctccacaggtgtataaatccatctatttccttggccacatcttcttcctgagcctactattcatattgccttatattcacaaagcaatggtgccaaggaaagagaagttaaagaagatggaataatccatttccctggtaagttaatacagctaaactaaaactaccaccaggttacagaatagagcaacagactggaaaaaaacaatagtattagaaatctggggtgaattccaaggattagcctggctactaaggaacacagtatgggcaatgactactgtgacttattgaggcatgctaggaaacatctggaagggctatagaccaggaattacaggagtaactaaccagccttccaaactcctcttgtcttgcaggtggcctgtgcgggactggtgcagaaactactcgtctcccttttcacagcactcctttgccccagagcagagaatggaaaagccagggaggtggaagatcgatgcttccagctgtgcctctgctgccagccaagtcttcatttggggccaaaggggaaacttttttttggagaaggcgtcttgctttgtcacccacgctggaatgcagtggcgggatctcagctcaccgcaacctccacctcctgggttcaagtgattttcctgcctcagcctcccaagtagctgggaatacaggcacgccaccatgcccagctaatttttgtattttcagtagaaacgggatttcaccacgttggccaggctggtctcgaactcctgaccgcaagtgatccacccgcctccgcctcccaaagtgctgggattacaggcgtgagccaccgtgcccggcccaaaggggaaactcttgtgggaggagcagaggggctcacatctcccctctgattcccccatgcacattgccttatctctccccatctagccaggaatctattgtgtttttcttctgccaatttactatgattgtgtatgtgccgctaccaccaccccccccatgggggggtggagaggggtgcaaggccctgcctgctccactttttctaccttggaactgtattagataaaatcacttctgtttgttcagtttttcaccactagcattcctgactgctctctttcacagttcttctccatcatcagggttctctcctttagcacatgggaatctgggagctaaagcctgccttcaaagcatggaaccaaactgcaaactctgtaacctcctatctgtccctgaagtcccggggaacaaacagttttacaccactggatactttaggaaccccaaaacaaccaggtttgcaagaacagtattcataggataaacaaatagcaaatgtacagccttggcttccccaaactccacagtctcagtgcagaaagatcatcttccagcagtcagctcagaccagggtcaaaggatgtgacatcaacagtttctggtttcagaacaggttctactactgtcaaatgaccccccatacttcctcaaaggctgtggtaagttttgcacaggtgagggcagcagaaagggggtagttactgatggacaccatcttctctgtatactccacactgacctaagaaaagaacagttttgtcagccaactctgtcactcagtagctgtttcagcccttctttagggcaggaaaactatggctgagctagtatttcagctgtgctgttgaatatcaaatccctacaaaggatgaagaaggtcctaactgtgacttccaattatggcagcagccctcaaaggatgtgccctggggcagggtgtggaactgtcatgtgtcttctagctcattgtaagcattgttaaaatgcctactgctctgggaattctatactaagttcagctctaccaagaatttcagggttgagcccagaccttaccttgccatgggcaaaggcccctaccacaaaaacaataggatcactgctgggcaccagctcacgcacatcactgacaaccgggatggaaaaagaagtgccaactttcatacatccaactggaaagtgatctgatactggattcttaattacctaaagtaaaaaagagagaaaagtcagccccagaaacattcccagaaccagccttcaactaacaggtttcaatacctcaccttcaaaagcttctgggggccatcagctgctcgaacactgagcttgtgtaaaagttgaactagaagggggaaaaaagagttcagagctagatggagaccacagtccttctgtccagtcatcgaacaaggaaaaccccatggataagatgagttccctgtgtgctttatatctagactggactcctgaaatgttaggaacaaacagttgccaagcatatggctagctgtacagtgatgggttcagactccctctttcactcagccaggaagctactgcaagaacaggagtggagtttccacaaacatagaaaaataataacagtccttgtcctggtattaatcatgttgttctcccattttctcgcttaaaaatccacatttagttctcccttttcctcttcctcccttcttccctactgacaagttcattctaactttgttctaaggcttcttacccatgaggccacaaaagcggtcaaaggttctgggaattcgggtctggggattcacttcaatcagaacattcttctgtgtatggatataaacctgtagcaagccagctcggttcaggggactatccatcagcatcagcaaactctgagcaaagcagaaaccgagacatggttaaggctgaagagaggcagcactcagctgccaacccttccatacagaggctcaaagggttgtgagcactgtccctggagttacctggtgggtgatatctggccgcgcttccccagggtcccgtccattcttcaacaatatagacttgtgcttgtcacagttgagtagctcatatgtcttccctacctgaagaacagggaacatgacgagagaacagcataagcttctgttacctagccccgtggttcttcaagtgtggtccccaaactaccagcagcagctgcacctggaaacttgttaggcaaattctcaggcccaccctagacctactaaaccaggaacactgggggtggagcccagcaagcccttcgggggattactgtgcagccttatttgcactccccagtgaatggtctgagagggaaacaggaggaagggcacaacctgtgacttcacattatctactaatacactggatttaattaaaaaacctgtggctgttaggcaaggccaatgagacatcctggaactaggcaggagttagtagttagcaaggctgaatgctgtgtttattacaggagcagtaagtaggtactgtgcaaaatatcgagtcaccaccctcagtttgcgtacaccaaacatgcactaagtgaagagctgcaaatctgaacaagaaatgtgaaggccgggcgtggtggctcacgcctgtaatcccagcactttgggaggccgaggcgggcagatcacaaggtcaggagattgagaccatcgtggctaacacggtgaaaccccatctctactaaaaatataaaaaattagccgggcatggtggcaggcgcctgtagtcccagctacttgggaggcagaggcaggagaatggcatgaacccaggaggcggagcttgcagcgccactgcactccagcccgggcaacagagcgagactccatctcaaaaaaaagaaatgtgaaaactaatgatgcaggaggcagtttaatcaaagaaaactctcagaagtaaaaggaagaggggttattcccagttttaagacgggcatgggggcagatgcagtggctcacggctgtaatcccagcactctgggaggccaaggcaggcaaatcacttaaggtcaggagttcaagaccagcctgggcaacatggcgaaaccccatctctactaaaaatacaaaaattagctgggcatggtggcacatgcctgtagtcctagctacttgggaggctaaggtgggaggatggcttgagcccaggagacagagattgcagtgagccaagactgtaccactgcactccagcaagaccctgtctcaaaaaaaagaaaaaagaaagactggcatgagcaaaggtacagatggaatcaagacaaagtagccaggtgtggtggcttatgcctgtgatcccaacactttaggaggccgaggtggaaggatcacttgagcccaggaatttgagaccggcctgggcaacacggtgggaccctgtctcacaaaaaaaaaaaaaaaaattagccaggcgcagtgccatttgctggcagtcccagttactcaggaggatgaggtgggaggactgcttgagccagggaagtagaggctgcagtgaaccatcacaccactgcactctgttgcccaggcaacagagcaagaccctatctcaaaaaagaaacaaaaaagaaaaagtggaaacgaagaaaggaaattttgaggaaaattgggagctgagacactaaagggcagtgattatatatgaagctgctttgtaaaccacagaatcctaatgtatcaagcacaaagccaaaaataattctggagtaagcagggcaggatgggaatgactgacagacactatcctaacaactctctgtacactggaaaagacatcagaagtttgatgttaaagaagtggactacatctgtagcagctaaaagaaataattccaagttgcaatttggagtcccaaggagcattagggtggtcagtaaaaagtctaaaaacaaactgttatatacaaatacaagttttggaaggttaagtttttatgtatcactggaatgtatatgtctagcaacattcttgagatatatggctccaaaaagtctgcgaaaaaagggatgtagattttgaaattgaatagttgaagtaatgtcacagagagcacaaagaacaaatgaccaagaactaagtccatgagacacccttagttatagaagaaaaaaaccttcttgaatgaataatacagtttcaacccattagtaggatataatcatgttttctattcttttaatagattacaggcgcaggcctgtaatcccagctactctggaggctgaggcaggagaatcgattgaacccgggaggcggaggctgcagtgagccaagatcgtgccactgcactccagcctggtagagactgagactccatctcaaaaaaaaaaaaaaaaaaaagtgtatttagaacgaagattaaaatcctggcctgacttctaaaccaatgcgatttcttctgggcctattcaattagttctaacgggtaagagaaaggaggaggaagaacactgcccaaggctttaagatagagaactgctggttctattacatgtggggaaagagatgaatgatagataaaaatgcagatgtaaaagttttaaataataaccaggtctggacagtgtatcataggtggatattagagagaggtgactatggatactaatgaattgaaacacgaagcccttacaaaaagtgtgggcagactaggctacataactacgtttctcatctgcccagtaacttgtcttgggatgtggaatgacgcaaggaacgaaactttcctctgcttagactactataccacagaatcctggtaaaccaattggaagcaaggaggtgagggctagaatatcattcaaaaagagcaaaagaaaatgagtactaccggccgggcacagtggctcacgcctctaatcccaacactttgggaggccgaggcgggcggatcacttgaggtcaggagttcgagaccagcgtggccaacatggtgaaaccccatctgaactaaaaatacaaaaaaattagccgggcgtggtggcacctgcctgtagtcccagctactccagaggctgagtcaggagaactgtttgaaggcgggaggcagaagttgcagtgagccgaggtcgcgcaactgcactccagcctgggcgacagagcgagactccgtctcaaaaaaaaaaaaaaaaagaaagaaaaatgagtactaccatcccaggatgtcaaatcaacgcaaagccaaccaagccaccttccttcaaaagcatctttcacccctctctgctttctacatccactctgggccccttaccctcattccacggagtcccaacctatcgatttactacttctccacttcctgtcccaaactaccttgactgtctccagactggccccttccagcaccacaataagcctacggcctccgatcttgtttcctgcccctagtcggggccgcttgggtggcagagcatcccagtcctgtgcctgctccccaccgcttcgttcacgaggcttgaatccatcactgggcgcggccatcttgcaacaataccggaagttgcgctaacgctcttaaataagaacagcgcggcttctaatcacaaatttccttc

SEQ ID NO: 1149 - DNA, 5905 bp, Homo sapiens
gggaaccgcccaatcaggcgcgcagttggagaggacaggagaggagggcgtggcttcctgcatttggcggggtctttgtctctcgctggcgctggcacaggaacttgggatccgtctcctctttcgcctcctgcaccttgggagccccgggctactctcccacagcccctgttgccctgtgatctgtaggtccttggggacgcatagtcaaggtgccaggacatcctggaagctgggaaatggtgagtatacggggttcgccatcccgagaggggagaacagactgtgaaaccggcaggaccgtcctccccacggttagctccgagtctcccgcagcttggccctcagtcccctgtggctgcaagatggccgctgggccagcagcgagggccccacgtcccgtccggcccatccggtcctgtccctgggcagcgccctgctctgcgcccacagccatgagtatttcccagattgttcagggaggcctggtgggtcatcagggaaaaaccgcgactgggtgtttgcgtgggaggagctgcggcccgtggggtccccagtctctcttgttaaaaattaacgggagtctatgttaaacgttaaccagtttatctgaacaaagagtgattggtgaaatggaaagcacccagccatgatttctggtccaccagaggggcataaaggaaaggctttcataagatgcatgagaaagcagcccaaattcaagaattggttccagttatatggtagccttatttgaactatccagatggaaatgtcctggttacatattcagaggttaattgcatgtttgtcatgggttaaacctgcattttgcttcaggctaagatagtgttttataggaaatatatttgagttaggttttagatttttttttgtttgttttttgttttttacctatgaacacagggcactagagccactttagactaattttctgatctttaattattttaacactccagaggaggactggttttctcctgtgtttttttaatgtatggcaagtggaacctctaatcgaccaccctgtttttcatcctaactcaggcttgcagtaaaattatcagttcccactttctttgctgcattctcaaatgcaacacatgagaccagctttcccttgccaatttacaatgctgttaactatatgtcctttattatacatttcattaaagttttctattatttggtttctttctacttctccctacagttctggcaatatttgctttttatatttagaagcctcccttttgggtgcataaatatataaagctatattctcttgagaaattaacctctattattattctatggtaaactcatttcatgcttgtgagagacattgctagaaagtctattttgtctaatttaagcattaccgttgcactcctttggttattgtttgcatggaatatcattttctatcctttcacttttagcctatgctcttaattcataattgagtctcttgtaagcagcatattacgaggtttaaacgattaatttatccactctgtctgctttagtctcttttggctgctataactgaatatcacacactggtaattaataaagaatagaattttatttgacttatgattctggaggctgggaagccaaaacaacatgatactggtatatgttgaaggtctagttgctggataataacatagacaaagatgtgagggagagagagcttttttttttaatatataacagatccattcttgttataattagcccattcccataataagaacattaatccattcatgagggcagagttcttagagcttaattaatttttaaaggttccacctcttaattctaacatgttggctattaaattttatcctaaattttggagatgacattcagtgtacagcagtatctgtttagtagatactttaatctttttatttgtaaggtagtgataggtaaggagttactattgtaaatttgtagttttctgtccattttaagtttgcttcttttttttctggttctgtctttcctgtggtattgttcatttttgttgagacaaagttatgctttcttgctcagactgaagtgcagtggcatatcacagctcactgtagcttcaacctcctgggctcaaataatcctcccaccttagccacccaagtagcttggactacagacacgtaccacaacacccaaggagatttcatccttccaccttggcctcccaaagtgttggaattataagcaggagacaccatatccaatgtgtaatttttgttgtttgtgtatgctttaattactttctctttttctttactgcagtttttttttcctagtggttatcatgagacttaggtaaaacatcttgtattttaatagtctagtttaagatgataacaatttatagtattctgaaattcagtatgtatttaccattttagtgacatttatactttagtatttttcatattgttagttagcatttcatcatatcaatgtgaagatttcttccagaccatggctggagaaggaaagaaggtgtgttttgcctgactcagtgactatagagagaaccaagttctgcaggcctgtcacctaagtctcaggtgagtatgaattctcttgtgtttttcacagattgttgcagtggcaggaccaaggtcaaatgagttatagccaagtctacagtaagatgtggcagtattctgttttgaagccgggaccatgattggcaagcttgccacttggtcaagtgctcaccctctgaaaatgtcttccttggtctttgcctccagctgggtgccacaaactctgaactggattccaaggctttcatgaatgcacttatgtttgctgtggcagctgcattatgtcgtgggggatgtggatgcagaacctcacattctgtcgtcttgcttatgttactctcctttatgtttcactttctcaaatgaatgtcaagcaggtgattttcagattcaaaagttctaaaataaattgctcaaatttatacattatgtaagctgttaataaaatttcttgtaggtgctacatatttgttaaaatttttggttgtaattttaagctcactgtaggcagaaaggaatcattaagatttctattcttttttagtctgtatctaaatgaccatatattttaattccaaatatttactttatacttcagtaatgctcattgtattttgcaaaatttatattgttcttttatttgaaaatataaggctttttttagctcctgaaagctatattatagtcatatagttttattatagtatttgataagaagagcagcaacatattgagaacagataaaattctgctgtctttttaatgattatttattaaattcttctcattagagcctattattaatgattgtaatgtatttactgtataatttttctgcaatttattaaatgccaatgacttccaatgtctgcttttcatgactgcacacagtttaaagctgtagatatctaatgggttatttttcagcccggcatggtggctcacgcctgtaatcccagcactttgggaggccaaggtgggtggatcacgaggtcaggagatcaagaccatcctggctaccatggtgaaaccccgtctctactaaatatagaaaaaattagccgggcatagtggtgggtgcctgtattcccagctactcgagaggctgaggcaggagaatggcgtgaacccagtgggcggagcttgcagtgagccgagatggcaccactgcactacagcctgggcgacagggtgagactctgtctcaaaaaaaaaaaaaaaaaaaaaaagggcttatttttcattgtatatttatgttgtattcaggattttatgcatttaatctctcttcttatgttcaattctgtgttgttgtgtttcttttcttgggggggtatgttttctcagatcagttaattgtatttttgcttttaaagcttgatatcatgagttgaatgataattttttaactcggtacactttatgacaatgtgatatttaatttatatgtgaattagccgtgtttgttgcttatacatatatctatgtgtttttcacctatgtatgtcatttttttcatcttttttccttgtttttttttttaagtttcagatacgctttctttttcttttttttgtttttttcttttaaagagaattttaaaacagagtcaaatgaacaaaaatcagttatttgtcctcttgcagggcgggtagaccttccttccccacgggtttgaggctatggctaagtggtgagccttggggagatgcaggaaggatccatcccaggcacttggctagaggtaagtaaaaatagcctttggaccagaagacctgatagtttgggtactcgtctgaacataagtccccatcttcccagaaatgtcgtcttttgtctgcaacaactggctggagaaatatttcagaaagatgtgtgcctggaacacccaaagacgtacctttcctttctctttggcataggccttgtagcactgtagaaagaccaggtttgcaatggagccttcaatactcttcatccctatggatctcaggggctcatagggtgacaggagaggagacaagctagcttgggaagagtctttgtacttcagcttctcccctactgaaacactatatacttggggccacagttcatcacaaaacacacatgctctctttctttctctcacacccacatcttgggaacccaacaacttgatggcaggtagctctgggtatccttggtctggcattcacccactgggcatctaagctgtcctaaagctcttttcaatcacttctcactctttccaggcccatgtgggtaggtgttccagccttcactctttcaggctgatcatagaggcacagtgtgggaaaatcccctactgtgatggccattgctgggaagcagggaaggttaagggcccactgctgcccaaggctagtgcagaggccctctgctcctccactcatctcctcaaagaatgatatcaggtgcagcagctgctgtctggaatgttatcaaaccaggactgcacaggcactgcattctctgtgtggaagaggtaagaagcaggctagttgtccaggatgagttttcctcaggtccctccccagatggctgacgttcttgacatagcagccctggtgaaacaaacatgactcatgggtcaggcagccccaaaccatcccatacccgtccagctcacccgtcacaggatctgcctacttgttcaggctgggaagaagagagcaatgacgaaaacacatttaaacatttcctccattcatgtcaggaactcatccatataaggcctcatgagcacatggatctggtgcatggtcccctcaagctctacaggcactaggcagtcagcattgctgattggcttaaaggagctatgcacaagggtttcatccaggtcagtgaccatacagatccttccttgatttttctctgtcacctctgggagcaggcaggttcctgggatctgataaaactgatattggagacgctggagctgatccgacatagcaatggtgttgactccctccttatgtgtggattgctcagcgggggaacttgactgtccaacatgctgggtgcaagaacagcagaaaggggacttttaagatgtggcaaacatgaggcctcttcggagaggactttggaaaccaggccttgcttggtaaggaccagggcatcttccctccatgcctgggtgatgatggagccttgttccatctaacaatcctgagggctgggctggggggcatgggctggggcctgattcagttcccgagattctgacctccacagctgttcacataccccttctcctttccatactggtcgggaaggga

SEQ ID NO: 1150 - DNA, 3891 bp, Homo sapiens
gggaaccgcccaatcaggcgcgcggtggcagaggagaggaaaggagggcgtggcttcctgcatttggcgggatctgtgtctctcgctggtgctggcacaagagcttgggatccgtctcctctttcgcctcctgcaccttgggagccccgggctactctctcacagcccctgttgccctgtgatctgtaggtcttgggggacgcatagttaaggtgccaggacatcctggaagctgggaaatggtgagtatacggggttcgccatcccgagaggggagaacagactgtgaaaccggcaggaccggcctccccacggttagctccgagtctcccgcagcttggccctcagtcccctgtggctgcaagatggccgctgggccagcagcgagggcccccacgtcccgtccggcccatccggtcctgtccctgggcagcgccctgctctgcgcccacagccatgagtatttcccagattgttcagggaggcctggtgggtcatcagggaaaaaccgcgactgggtgtttgcgtgggaggagctgcggcccgtggggtccccagtctctcttgttaaaaattaacgggagtctatgttaaaaggttcatcagtttatctgaacaaagagtgattggtgaaatggaaagcacccagccatgatttctggtccaccagaggggcataaaggaaaggcttttataagatgcatgagaaagcaacccaaattcaagaattggttccagttatatggtagccttatttgaactatccagatggaaatgtcctggttacatattcagaggttaattgcatgtttgtcatgggttaaacctgcattttgcttcaggctaagatagtgttttataggaaatatatttgagttaggttttagatttttttttgtttgttttttgctttttacctatgaacacagggcactagagccactttagactaattttctgatctttaattattttaacactccagaggaggactggttttctcctgtgtttttttaatgtatggcaagtggaacctctaatcgaccaccctgtttttcatcctaactcaggcttgcagtaaaattatcagttcccactttctttgctgcattctcaaatgcaacacatgagaccagctttcccttgccaatttacaatgctgttaactatatgtcctttattatacatttcattaaagttttctattatttggtttctttctacttctccctacagttctggcaatatttgctttttatatttagaagcctcccttttgggtgcataaatatataaagctatattctcttgagaaattaacctctattattattgtatggtaaactcatttcatgcttgtgagagacattgctagaaagtctattttgtctaatttaagcattaccgttgcactcctttggttattgtttgcatggaatatcattttctatcctttcacttttagcctatgctcttaattcataattgagtctcttgtaagcagcatattacgaggtttaaaagattaatttatccactctgtctgctttagtctcttttggctgctataactgaatatcacacactggtaattaataaagaatcgaattttatttgacttatgattctggaggctgggaagccaaaacaacatgatactggtatatgttgaaggtctagttgctggataataacatagacaaagatgtgagggagagagagctttttttttttaatatataacagatccattcttgttaaaattagcccattcccataataagaacattaatccattcatgagggcagagttcttagagcttaattaatttttaaaggttccacctcttaattctaacatgttggctattaaattttatcctaaattttggagatgacattcagtgtacagcagtatctgtttagtagatactttaatctttttatttgtaaggtagtgataggtaaggagttactattgtaaatttgtagttttctgtccattttaagtttgcttcttttttttctggttctgtctttcctgtggtattgttcatttttgttgagacaaagttatgctttcttgctcagactgaagtgtagtggcatatcacagctcactgtagcttcaacctcctgggctcaaataatcctcccaccttagccacccaagtagcttggactacagacacgtaccgcaacacccaaggagatttcatccttccaccttggcctcccaaagtgttggaattataagcaggagacaccatatccaatgtgtaatttttgttgtttgtgtatgctttaattactttctctttttctttactgcagtttttttttcctagtggttatcatgagacttaggtaaaacatcttgtattttaatagtctagtttaagatgataacaatttatagtattctgaaattcagtatgtatttaccattttagtgacatttatactttagtatttttcatattgttagttagcatttcatcatatcaatgtgaagatttcttccagaccatggctggagaaggaaagaaggtgtgttttgcctgactcagtgactatagagagaaccaagttctgcaggcctgtcacctaagtctcaggtgagtatgaattctcttgtgtttttcacagattgttgcagtggcaggaccaaggtcaaatgagttatagccaagtctacagtaagatgtggcagtattctgttttgaagccgggaccatgattggcaagcttgccacttggtcaagtgctcaccctctgaaaatgtcttccttggtctttgcctccagctgggtgccacaaactctgaactggatttcaaggctttcatgaatgcacttacgtttgctgtggcagctgcattatgtcgtgggggatgtggatgcagaacctcacattctgtcgtcttgcttatgttactctcctttatgtttcactttctcaaatgaatgtcaagcaggtgattttcagattcaaaagttctaaaataaattgctcaaatttatacattatgtaagctgttaataaaatttcttgtaggtgctacatatttgttaaaatttttggttgtaattttaagctcactgtaggcagaaaggaatcattaagatttctattcttttttagtctgtatctaaatgaccatatattttaattccaaatatttactttatacttcagtaatgctcattgtattttgcaaaatttatattgttcttttatttgaaaatataaggctttttttagctcctgaaagctatattatagtcatatagttttattatagtatttgataagaagagcagcaacatattgagaacagataaaattctgctgtctttttaatgattatttattaaattcttctcattagagcctattattaatgattgtaatgtatttactgtataatttttctgcaatttattaaatgccaatgacttccaatgtctgcttttcatgactgcacacagtttaaagctgtagatatctaaagggttatttttcagcccggcatggtggctcacgcctgtaatcccagcactttgggaggccaaggtgggtggatcacgaggtcaggagatcaagaccatcctggctaccacggtgaaaccccgtctctactaaatatagaaaaaattagccgggcatagtggtgggtgcctgtattcccagctactcgagaggctgaggcaggagaatggcgtgaacccagtaggcggagcttgcagtgagccgagatggcaccactgcactccagcctgggcgacagggtgagactgtctcaaaaaaaaacaaaaagggcttatttttcattgtatatttatgttgtattcaggattttatgcattaaaatctctcttcttattttca

SEQ ID NO: 1151 - DNA, 5834 bp, Homo sapiens
tttggcgggatctgtgtctctcgctggtgctggccaggagcttgggatctgtctcctctttcgcctcctgcaccttgagagccctgggtactctgtcacagcccctgttgccctgcgatctgtaggtccttggggagcatagttaaggtgccaggacatcctggaagctgggaaatggtgagtatacggggttcgccatcccgagaggggagagcagactgtgaaaccggcaggaccggcctccccacggttagctccgagtctcccgcagcttggccttcagtcccctgtggctgcaagatggccgctgggccagcagcgaggacccccacatccggcctggccatccggtcctgtccctgggcagcgccctgctctgcgcccacagccatgagtatttcccagattgttcagggaggccagatgggtcatcagggaaaaaccgcgagtgggtgtttgcgtgggaggagctgcggcccgtggggtccccagtctctcttgttaaaaattaacgggagtctatgttaaaaggttcatcagtttatctgaacaaacagtgattggtgaaatggaaagcacccagccatgatttctgggccaccagaggggcataaaggaaaggcttttataagatgcatgagaaagcagcccaaattcaagaattggttccagttatatggtagccttatttgaactatccagatggaaatgtcctggttacatattcagaggttaattgcatgtttgtcatgggttaaacctgcattttgcttcaggctaagatagtgttttataggaaatgtatttgagttaggttttagatttttttttttttttttttttttttaacctatgaacacagggcactagagccactttagactaattttctgatctttaattattttaacactccagaggaggactggttttctcctgtgattttttaatgtatggcaagtggaacctctaatcgaccaccctgtttttcatcctaactcaggcttgcagtaaaattatcagttcccactttctttgctgcattctcaaacgcaacacatgagaccagctttcccttgccaatttacaatgctgttaactatatgtcctttattatacatttcattaaagttttctattattgggtttctttctacttctccctacagttctggcaatatttgctttttatatttagaagcctcccttttgggtgcataaatatataaagctatattctcttgagaaattaacctctattattgtatggtaaactcatttcattcttgtgagagacattgctagaaagtctattttgtctaatttaagcattaccatttcactcctttggttattatttgcatggaatatcattttctatcctttcacttttagcctatgctcttaattcataattgagtctcttgtaagcagcatattatgaggtttaaaagattaatttatccactctgtctgctttagtctcttttggctgctataacagaatatcacacactggtaattaataaagaatagaattttatttgactcatgattctggaggctgggaagccaaaacaacattatactggtatatgttgaaggtctagttgctggataataacatacacaaagatgtgagggagagagagctttttttttttaatatataacagatccattcttgttataattagcccattcccataataagaacgttaatccattcatgagggcagagtgcttatagcttaattaatttttaaaggttccacctcttaattctaacatgttggctattaaattttatcctaaattttggagatgacattcagtgtacagcagtatctgtttagtagatactttaatctttttatttgtaaggtagtgataggtaagcagttactattgtacatttgtagttttctgtccattttaagtttgcttcttttttttctggttctgtctttcctgtggtattgttcatttttgttgagacaaagttatgctttcttgctcagactgaagtgcagtggcatatcacagctcactgtagccttaacctcctgggctcaaataatcgtcccaccttagccacccaagtagcttggactgcagacatgtaccacaacacccaaggagatttgattcttccaccttgacctcccaaagtgttggaattataagcaggagacaccatatccaatgtgtaatttttgttgtttgtgtatgctttaattactttctctttttctttactattttttttttcctactggttatcatgagacttatgtaaaacatcttgtattttaatagtctagtttaagatgataacaatttatagtattctgaaattcagtatgtatttaccattttagtgacatttatactttagtatttttcatattgttagttagcatttcatcatatcaatgtgaagatttcttccagaccatggctggagaaggaaagaaggtgtgttttgcctgattcagggactatagagagaaccaagttctgcaggcctgtcacctaagtctcaggtgagtatgaattctcttgtgttttccacagactgttgcagtgtcaggaccaaggtcaaatgagttatagccaagtctacagtaagatgtggcagtattctgttttgaagcgaggaccatgattggcaagcttgccacttggtcaagtgcttaccctctaaagatgtcttccttggtctttgcctccagctgggtgtcacaaactctgaactggattccaaggctttcatgaatgcacttatgtttgctgtggcagctgcattatgtcgtgggggatgtggatgcagaacctcccattctgtcgtcttgcttatgttactctcctttatgtttcactttctcaaatgaatgacaagcaggtgattttcagattcaaaagttctaaaataaattgctcaaatttacacattatgtaagctgttaataaaatttcttgtaggtgctacatatttattaaaatttttggttgtaattttaagctcactgtaggcagaaaggaatcattaagatttctattcttttttagtctgtatctaaatgaccatatattttaattccaaatatttactttatacttcagtaatgctcattgtattttgcaaaatttatattgttcttttatttgaaaatataaggctttttttagctcctgaaatctatattatagtcatatagttttattatagtatttgataagaagagcagcaacatattgagaacagaataaaattctgctgtctttttaatgattatttattaaattcttctcattaaagcctattattaatgattgtaatgtatttactgtataattttactgcaatttattaaatgccaatgacttctaatgtctgcttttcatgactgcacacagtttaaagctgtagatatctaaagggttatttttcagcccggcacggtggctcatgcctgtaatcccagcactttgggaggccaaggtgggtggatcacgaggtcaggagatcaagaccatcctggctaacacggtgaaacccagtctctactaaatatagaaaaaattagccgggcatagtggcgggtgcctgtattcccagctactcgagaggctgaggcaggagaatggcgtgaacccagtaggcggagcttgcagtgagccgagatggcaccactgcactccagcctgggcgacagggtgagactgtctcaaaaaaaaacaaaaagggcttatttttcattgtatatttatgttgtattcaggattttatgcattaaaatctctcttcttattttcagttctgtgttgttgtgtttcttttctgggggggtatgttttctcagagcagttaattgtatttttgcttttaaagcttgatatcatgagttgaatgataattttttaactcggtacacattatgacaatgtgatatttaatttatatttgaattagctgtgtttgttgcttatagatatatctatgtgtttttcacctatgtaagtatgtcatgtttttcatcttttttccttgtttttttttttttaagtttcagatatgctttctttttcttttttttgtttttttttttttaaagagaattttaaaacagagtcaaatgaacaaaaatcagttatttgtcctcttgcagggcggggagaccttccttccccacgggtttgaggctatggctaagtggtgagccttggtgagacgcagaaaggatccatcccaggcacttggctagaggtaagtaaaaatagcctttgggccagaagacctgatagtttgggtactcgtctggacataagtccccatcttcccagaaatgtcgtcttttgtctgcaacaactggctggagaaatatttcagaaagatgtgtgcctggaacacccaaaggcatacctttcctttctccttggcataggccttgcagcactgaagaaagaccaggtttgcaacggagccttcaatactcttcatccctatggatctcaggggctcatagggtgacaggagaggagacaagctagcttgggaagagtctttgtccttcagcttctcctctactgaaacactatatacttggggccacagttcatagcaaaacacacatgctgtctttctttctctcacacccccatctcgggaacccaacaacttgatggcaggtagctctgggtatccttggtctggcattcacccactgggcatctaagctgtcctaaagctcttttcaatcacttctcactgtttccaggcccatgtgggtaggtgttccagccttcactctttcaggctgttcataaaggcacagtgtgggaaaatcccctactgtgatggccattgctgggaagcagggaaggttaagggcccactgctgcccaaggctagtgtagacaccctctgctcctccactcatctcctcaaataatgatatcaggtgcagcagctgctgtctggaatgttatcaaaccaggactgcacaggcactgcattctctgtgtggaagatgtaagaagcaggcgagttgtccaggatgagttttcctcaggtccctccccagatggctgacgtccttgacatagcagccctggtgaaacaaacatgactcatgggacaggcagccccagaccatcccatacccgtccagctcacccgtcacaggatctgcctacttgttcaggctgggaagaagagagcaatgacgaaaacacatttaaacatttcctccattcatgtcaggaactcatccatataaggcctcatgagcacatggatctggtgcatggtcccctcaagctctacaggcactaggcagtcagcattgctgattggcttaaaggagctatgcacaagggtttcatccaggtcagtgaccatacagatccttccttgatttttctctgtcacctctgggagcaggcaggttcctgggatctgataaaactgatattggagacgctggagctgatccgacatagcaatggtgttgactccctccttatgtgtggattgctcagcgggggaacttgactgtccaacatgctgggtgcaagaacagcagaaaggggacttttaagatgtggcaaacatgaggcctcttcggagaggactttggaaaccaggccttgcttggtaaggaccagggcatcttccctccatgcctgggtgatgatggagccttgttccatctaacaatcctgagggctgggctggggggcatgggctggggcctgattcagttcccgagattctgacctccacagctgttcacataccccttctcctttccatactggccgggaaggga

SEQ ID NO: 1152 - DNA, 5775 bp, Homo sapiens
cgggtccgtagtgggctaagggggagggtttcaaagggagcgcacttccgctgccctttctttcgccagccttacgggcccgaaccctcgtgtgaagggtgcagtacctaagccggagcggggtagaggcgggccggcacccccttctgacctccagtgccgccggcctcaagatcagacatggcccagaacttgaaggacttggcgggacggctgcccgccgggccccggggcatgggcacggccctgaagctgttgctgggggccggcgccgtggcctacggtgtgcgcgaatctgtgttcaccggtgagcaacctccgcctgctcgccggacgcttccagtccctcccccaaaccccttgccctgtccccgcgcccctccacgggcctagcatttcctctgagcagcggcctggcctgatcaccacccatctccccacagtggaaggcgggcacagagccatcttcttcaatcggatcggtggagtgcagcaggacactatcctggccgagggccttcacttcaggtaatggcgggcagagcctgctgaccctgacctttcacccttgacgccgacccagcagtggctatagtcggacgtgcaacaggattcaacgctgctcttttcccaccctcctcatccctgcccctaggatagtgggtgctgcgagaacctccagcagcatacaaactgttgttttccagagggacaagagaatctctccttgtctgtggtcgtggagaggagcaggccaaaaaacgcgtggtgaggggaaaccgggcaaggctagtgaaactgcggccttttctttttttttttttggagagggagtcttgctctgtcgcccaggctggagtgcagtggcgcgatctcggctcactgcaacctccgcctcctgatttcaagcgattctcctgcctcagcctcacgagtagctgggattacaggcgcccgccaccacgcccggctaatttttgtattttagtagagacggggtttcactatgtagatcaagctggtctcgaactcctgacctcaaatgatccgcccgcctcggcctcccaaagtgctgggattacaggcgtgagccaccgcgcccggccgaaactgtggcctcttaatacctatccctgtcctctccaggatcccttggttccagtaccccattatctatgacattcgggccagacctcgaaaaatctcctcccctacaggctccaaaggtaggtctgagcacttggtaatcacatggcaggtgggatgatcaaggtagctggcaagaaaccccaggggaatatggtagtgtcaggcctttaggcctctttccacatctgcaagagctgtaacaaaaatacctgcctcctggggtcaaagcagcaaattctgaacacactgtgtttgcgtgctttttactgtctcctccctgacgtgtattcaataagagtattgtttgtccctcgtcttgttcactgcctagatcaaagctttgttttaaagccttttttttctaactgcttgacttactatatctacagttacatccactagtacactctgttctggagaagtttgtccctaagcttgactagttcacctgttctctccttctagaccatacataaaagccgtgcctttgagttccccagacctcttcctcctccccacccacgcacacatatacaccctgggtcaggtagctcacctgtaacctgtaatgtacttctttgtgctatacctagtgcaggtcgcttattcatttactagactgggccctgggaataaaagattcattaaacacaattcttgtcccccaagtccttacaggagacatgattacggtacagcacgaaagcgcccacgttagaggttgcacagagtacagagggggaaagagtagtcagctctgctggtgacggggtttgcagttcaaggcttcacagtgggtgagggtgcatttcagctgtgctgcgtcttgtcttccttgtcagcctgattaactctcctccccccagggtagtgccaggctgtacaccattgcacagggcatacagggaggaacatgaaggagaaaatgcttgggaaagggtgtttggccttgaccagccactgctgacctcaatctcagacctacagatggtgaatatctccctgcgagtgttgtctcgacccaatgctcaggagcttcctagcatgtaccagcgcctagggctggactacgaggaacgagtgttgccgtccattgtcaacgaggtgctcaagagtgtggtggccaagttcaatgcctcacagctgatcacccagcgggcccaggtctgactcccaccaccatctgcgtggtgtcagcctttccttcctaggcccagagtattgggaattaggaaaggcagcttattagaaaagcattgtcaccctagtgccatttccacctaaaagctgtgctaattgccactgtgaaataaggagagccagcattagaactcgatagcactcggtgttaggaagcacagaggaaaatggccaagtcttggcttttcctgcacctcttcgagcagagaggcttatgttacaggtttgcctgacaggaagctaaggcagtgcatgttgtattgagagtgaagggttaggggtcgcaaccttcctttcagctccccagtcccctcaaaccacccctcccttcccctcttcacccctgccctcaggtatccctgttgatccgccgggagctgacagagagggccaaggacttcagcctcatcctggatgatgtggccatcacagagctgagctttagccgagagtacacagctgctgtagaagccaaacaagtgggtgagtcgcaagagccgtggggtgagggcttctgagatgcaggaggaggaaagactccatgggtggggctcctgacccaggacagggtctccctgactctctcccaccacagcccagcaggaggcccagcgggcccaattcttggtagaaaaagcaaagcaggaacagcggcagaaaattgtgcaggccgagggtgaggccgaggctgccaagatgatatccttctgctggagagatctcagcccagcccctagggcacctgagttccccattctccttcatgggcaggctgatgagactaaggcgaatgcgactccgtgctctctggcccttggctccttgttgggggtggggactacagatgagatctgaaatcttagtggtagtacctgagccatgactccccactgtaaggccagatcaatagcattggtggccttgccttcatttctggtgctgcccctagttcctggcagcagcctgcagggaggcccacaggtggggtccacggtagggctgggcacaagccacctgagcgcaaccttggatctgacagcccagaggaggactggagcaagggagtgtggtaaggacagggccagggattgagacctgcccttgcgtgtaccttaaccctcctcaccttggagaagcactgagcaagaaccctggctacatcaaacttcgcaagattcgagcagcccagaatatctccaagacggtgagtgtgtcagcccagcgtctctgatggggctgccttgagaaagtgctttcagttaaggcacattgaggtgagggaattcgaaccttgcttgttccggtttctactcagattggcttctctggccggcgcggtggctcacgcatgtaatccccgcactttgggaggccaaggtgggtggatcacctgaggtcaggagttcgagaccagcctggccaacatggtgaaaccccatctctactaaaaatacaaaagataatgagcccgctgtggtggcgtttagctatattcccagctacgcaggaggctgaggcaggagaatcacttgaacccaggaggcggaagttgcagtgagctgagatcatgccactgcactccagcctgagcaacagagcaagactccgtctcaaaaataaataaataaaaaattggcttctccgatactcctcctgtcaagaatgattcctctgggttccctgaccttttgttctaatcatagctgctgctcagcgctctggatccctaagtgcgagcagaaaccatgtgttactcattgctgcacccctgccctaatctgcatgtgttccatgttaagtagctgctgaattgcaggggtcggaattgaggtctttgcttaatgcaagcatctgtcttatttcctgccctgtagatcgccacatcacagaatcgtatctatctcacagctgacaaccttgtgctgaacctacaggatgaaagtttcaccaggtgagagatgtggccacactgtggggtatcaccaagaacgtgggacctgagtctggttgtttgggctctggagcctgctacagctattcatatggctcagagacattgaaccaaaattagaaaagggggtggttgacagtttctatcttgcatctcataggattgattttatgagatcaaataggattattcacataaaaagcactttaattataaagttttcatctaaccaaaaagtgatgaaagatgatactcagttttcttactcaagagccctcaaactcctctggtgaatggagggatgttaggaaaggagatgagaaatagcagtggccatgagaacatgcctcctcctttcatgagcctgagattcctggctgtcaaccctgtttatcttttctcttgggagcaaaggagggttcaaagctgagtggggcctgaagctgtcaattaacatgtgcatttctcttctctgtttcttgttcatctggcgatctggcaccacaggggaaggtaagctgttgttgcttctgtggggtcctgcaggccaccttctccagtacccgcctcctaccctaccccctttcccacctccccgaagacaaaccctcaatcagggtaggagggtcgtagagggaatggcctagagtgtcctgcctctcacatttatgtcccctaataatgtcattatctatcttttttttcctacagtgacagcctcatcaagggtaagaaatgagcctagtcaccaagaactccacccccagaggaagtggatctgcttctccagtttttgaggagccagccaggggtccagcacagccctaccccgccccagtatcatgcgatggtcccccacaccggttccctgaacccctcttggattaaggaagactgaagactagccccttttctggggaattactttcctcctccctgtgttaactggggctgttggggacagtgcgtgatttctcagtgatttcctacagtgttgttccctccctcaaggctgggaggagataaacaccaacccaggaattctcaataaatttttattacttaacctgaagtcaaggcttcacgtgttcatgaactgggtaactggcagcaagcatgcgcacgttcacatgtgcgctcctgggtctgtctttgtgtgtgccagcagggggcgcaaaagaatctggctggggcggctaaggggaagcaaggcctgggctccgaaacaggacccaagctgggaaggctggccctgagttctcgaggcccagctgtgctcttcacacaccctccatttctcccacatcacccatttttttaaggctggacagccatggctttgctgagccagattaaaaatctgatgaccccaacaggagctgcttccttggcagcagggttccttgtggctgtggggagcctgcctgtgcctgttgaggcacttctgtgcccagaagcccagtggatcgcgtggc

SEQ ID NO: 1153 - DNA, 738 bp, Homo sapiens
ctggagcccggggtcctccgctcaactcaggacgttgaggctgcattgagccaagatcatacctctacactccagcatgggcaaaagagcaagattctgtctcaaaaataaataaataaattttgtttttaattagccaggcatgatggcatgcacctgtagtcccagctattcaggagaccaaggtgggaggatcatttgagcccaggaatttgagactgcagtgaactatgatgatgccactgcattccaacctagatgacagaaggagacctcatctctaaaaataaatatatatattttttccaaccactttttatctataccccaatgtcttacattccataaaacatcatgttttgaattccagtataactttatcgttaaacatgtttctttgcagaagcatgtataagttagggtccacaagattatttgcataagctaatttacaaaaaaaattatataatcactgacatgaaagcatgtctgggcagccatgggagctcatatgaggcgtccagttcagtcgccttttaaaaatgatatttgcattagctgggcatggtagcatgtgtctgtagtcccagctactcaggggactgaagtgagaggatgcaccagagccccagaagtcaaggctgcagtgagccatgatcacatcactgcaccagcctgggcaacaggagtgaggccttgtctcagtcagtcaatcaatcaatcaataatggtatttgg

SEQ ID NO: 1154 - DNA, 541 bp, Homo sapiens
ttttttcaagttttattttaagttcaggggtccatatgtgataaagtttatttttcaacttctattttaagtttaggggtccatgtgcagactatgcaggtctcttacatacataaatgcgtaccactgtggtttactgcacagatcatctcatcacccaggtaccaagcccagcatccgcagctattcttcctgatgctctccttcccctcccccatgccatgaaacaggtgtccagtgtgtgttgttcttcctgatgtgtccatgtgttctcattgatctgcttctgctaataagttagaataataataggcggtgtttggttttctgttcctgcattagtttgctgggagtaatggcttcaaattccaaccatgtccctgcaagggacatcatctcattatattttatggcttcatagtgttccatggtgtatgtgtaccacatttcctttatccagtgtatcattgatgggcatgtagattgattacatgatgttgctattgtaaatagtgctgcaatgagcatttgtatacatgta

SEQ ID NO: 1155 - DNA, 105 bp, Homo sapiens
ggaggctaaggcaggagaatcacttgaacctgggtggcagatgttgcagtgagccgagatacttccactgcactccagcctgggtgacagagcaagactccatct

SEQ ID NO: 1156 - DNA, 105 bp, Homo sapiens
ggagactaaggcaggagaatcacttgaacctgggtggcagatgttgcagtgagccgagatccttccactgcactccagcctgggtgacagagcatgactccatct

SEQ ID NO: 1157 - DNA, 564 bp, Homo sapiens
agagaatccaccagaaacacatttttttttcaagttttattttaagttcaggggtccatatgtgataaagtttatttttcaacttttattttaagtttaggggtccatgtgcagagtatgcaggtctcttacatacataaatgcgtaccactgtggtttactgcacagatcatctcatcacccaggtaccaagcccagcatccgcagctattcttcctgatgctctccttcccctcccccatgccatgaaacaggtgtccagtgtgtgttgttcttcctgatgtgtccatgtgttctcattgatctgcttctgctaataagttagaataataataggcggtgtttggttttctgttcctgcattagtttgctgggagtaatggcttcaaattccaagcgcatgcctgcaagggacatcatctcattacattttatggcttcatagtgttccatggtgtatggtaccacatttcctttatccagtgtatcattgatgggcatgtagattgattacatgatgttgctattgtaaatagtgctgcaatgaacatttgtatacatgta

SEQ ID NO: 1158 - DNA, 105 bp, Homo sapiens; identical to SEQ ID NO: 1156

SEQ ID NO: 1159 - DNA, 1996 bp, Homo sapiens
ccaacatgagccaccgcacccggccctctccatcttccttgaacgaccccattcacctactgctcctatttctaagactgtgaccaacagagcactggagcatgcagcagcacacagaccccccgcccagatgcctcgtcgtctgggtccccatgcttgccccaggtcccttgggccacgtactaatccccctctggagaccttgagggaggtaagattgggaattagcaatacctgaaatgtgttaattctctaggtcatgtttgactctactccagtcctcgtcgccctcttcctccaccccagacttggtgcaagctattccctctgcctacaacactcttcttctccatgtttacccacctcataaccactgatcctttaggcctcagcttttctcaacccccatgcagccattcaacagaatctggcctgtggcaggctctcttctaggtaacgaagctgcattccttgcagcatttagggacccagggtatcaagggctccgcaattaactttgacacatggcttccaagatcgccctgaccctgaatatcccaaggccagacaggagaagagcgaaattggagggctgtgtgagaggcattttggattgggactggaggtagggaacatccctttagccttcattccactgcctggatagctttcacatggccatgcctaatggccagggaggcttatgaccatggtcagaaagtcagctgtgtttccagggtgacaaaggaacaggtttgtgaatcatcatggtctgaagttcctggtacacgggatccatttcactcatcttgcctcatagagaaccctcattctcacctcccacaagggagaaaatgcaaagtttcatgcagtcactgcacagagtcttccagtgatgtgcatttctggacatcaagcctgaaagcggtacatcatagtttgtcaatgtaaaaactaaaataaaaccgtaacaattccccaccacacaccaaaaaatacctaacatcaggttaatgttacctccctccctgagtacagaaacaggatacgcacaaggaaaactgccattagaaagggaaggcttggaggcccatggcagttcctggtccacagcaattataaaactcttctgggcaggtactgtgaagtcctcatactcctgctggttcaaaccaaggacccaaggttgttttaaggcatgaacagttaaaggagtttggggtcctagcatgagctggttggtttcttgggcaatgcaagtttctcagaaatgtaataggttctgatgtacttgtttctagttatttccatgtatccatagccatgtccagagtttcttgttgtacataattccctaacttgatgaattatgctttctagttcatagacttctctctctctaatgatagagtttatgcaaaaccatcagacacaggtgggaagattacacctattattattacaccaattatttcatcttttctacagggctcagtcttaactggccacttaaaggatttttcatacttattttctattattgagctttaggtacaatcagctttttcaaccctgtgaaataccaaatttctgggtgatctgttctctatatcatttatatcatttataaactagcccttccttccctgagcctatttatctcctctaataagctttttaaaagcacaactaacaggccaggcacagtggctcacgcctataatcccagcactttgggaggccaaggcaggtgaatcacttgaggccaggagttcaagaccagtctggacaacatggtgaaaccccatctctagtaaaaatacaaaaattagctgggcgtggtggtgcacacctgtaatcctagctacttgggaggctgaggcacaagcattacctgaacctgggaggcagaggttgcagtgagccgagattgcaccactgcattccagcccgggagacagagcaagaccctgtctctgaaggaaaaaaaaaaaaa

SEQ ID NO: 1160 - DNA, 1997 bp, Homo sapiens
ccaacatgagccaccgcacccggccctctccatcttccttgaacgaccccattcacctactgctcctatttctaagactgtgaccaacagagcactggagcatgcagcagcacacagaccccccgcccagatgcctcgtcgtctgggtccccatgcttgccccaggtcccttgggccacgtactaatccccctctggagaccttgagggaggtaagattgggaattagcaatacctgaaatgtgttaattctctaggtcatgtttgactctactccagtcctcgtcgccctcttcctccaccccagacttggtgcaagctattccctctgcctacaacactcttcttctccatgtttacccacctcataaccactgatcctttaggcctcagcttttctcaacccccatgcagccattcaacagaatctggcctgtggcaggctctcttctaggtaacgaagctgcattccttgcagcatttagggacccagggtatcaagggctccgcaattaactttgacacatggcttccaagatcgccctgaccctgaatatcccaaggccagacaggagaagagcgaaattggagggctgtgtgagaggcattttggattgggactggaggtagggaacatccctttagccttcattccactgcctggatagctttcacatggccatgcctaatggccagggaggcttatgaccatggtcagaaagtcagctgtgtttccagggtgacaaaggaacaggtttgtgaatcatcatggtctgaagttcctggtacacgggatccatttcactcatcttgcctcatagagaaccctcattctcacctcccacaagggagaaaatgcaaagtttcatgcagtcactgcacagagtcttccagtgatgtgcatttctggacatcaagcctgaaagcggtgacatcatagtctgtcagtgtggaaactcaaataagaccgtaacaattccccaccacacaccaaaaaatacctaacatcaggttaatgttacctccctccctgagtacagaaacaggatacgcacaaggaaaactgccattagaaagggaaggcttggaggcccatggcagttcctggtccacagcaattataaaactcttctgggcaggtactgtgaagtcctcatactcctgctggttcaaaccaaggacccaaggttgttttaaggcatgaacagttaaaggagtttggggtcctagcatgagctggttggtttcttgggcaatgcaagtttctcagaaatgtaataggttctgatgtacttgtttctagttatttccatgtatccatagccatgtccagagtttcttgttgtacataattccctaacttgatgaattatgctttctagttcatagacttctctctctctaatgatagagtttatgcaaaaccatcagacacaggtgggaagattacacctattattattacaccaattatttcatcttttctacagggctcagtcttaactggccacttaaaggatttttcatacttattttctattattgagctttaggtacaatcagctttttcaaccctgtgaaataccaaatttctgggtgatctgttctctatatcatttatatcatttataaactagcccttccttccctgagcctatttatctcctctaataagctttttaaaagcacaactaacaggccaggcacagtggctcacgcctataatcccagcactttgggaggccaaggcaggtgaatcacttgaggccaggagttcaagaccagtctggacaacatggtgaaaccccatctctagtaaaaatacaaaaattagctgggcgtggtggtgcacacctgtaatcctagctacttgggaggctgaggcacaagcattacctgaacctgggaggcagaggttgcagtgagccgagattgcaccactgcattccagcccgggagacagagcaagaccctgtctctgaaggaaaaaaaaaaaaa

SEQ ID NO: 1161 - DNA, 1463 bp, Homo sapiens
gtcatgcctaacagtctggggagagtctcttggggcatgagatatctccccacgagaacactttgtgaccacattgatcacagactttgtcggggagtggcccaccccgcctcagatcacagctaccatgaatcattgccactcgggcccgctgccaaaacatctcgtgttgggctagaccagtcgctcatttatcacttcaagagatacttattgtgtgcctactctgtgccagacactggattagacagtggagaacaagacacataagacagctacaaaacccctgttctagtggaggaaggcagacagtaaagaagcagaacaatagagaatgtaagagccaagtcacaatgaatgctattattattaagtaaaatcaagataagggggaggaaggacaaatctcctctacagaagaatgccaaataatttatggagatacgcgaagacgtttcagaacctaatgtcccattctctaagtgtggcctgtgtttactgactttcttccacagagtatggtatggaaggaggaggaaaagtgacttcacagtggcgaaagctgatgaacattagcttggccaagtattggagattaacatcaacagttataagtcatattgatagtatgtgccctgataggatgtgatgagaagggtacttcccctctgtggtcctcctcctcaaaacctgtaaccccagtctaaatagcagaaagacattgcacaaacccagagtgagggactctcaagaatgcctgaccagtactcctcaaaatgtccaggtcatcacaagcaaggacagtctgagaaacgtcacatccagaggaacctaagaatgaggactcaatgtaaaagggatcctggaacagaaaaaagacattgggaaaaactaatgaaatctgcccaaagtgtagagtttagtttagttaataacaatttttaaagaggtattaaaaaaaaaaaaaaaaaggcaggtgaaggccggtgtggtggctcacgcctataatcccagcactttgggaggccaaggtgggaggatcatttgagctcagaagtttgagaccagcctgggcaacatagtgagaccccatctctacaaatactaaaaaattagccgggtgtgctggcatgtacctgtgttcctagctactcgggagcccaggtggtcaaggctacagtgagccatgatcacaccactgcactctaggctgggtgtcagagcaagaccctgtctcaaaaaagaaaaaaaaaaaaaaaacaggtgaagagggcgtccaggaagatgtctccgtggaggcgacatgtgaactgagccttgaatgatgcaccccagtcacacctggctaggagagacctggtgtgagagccttccaggcagaggaaattactgtgtaaagatccttggatagaaacaagcttgggccaggcgcggtagctcacgcctgtaatcccagcactttg

SEQ ID NO: 1162 - DNA, 1439 bp, Homo sapiens
aaacccctgttttagtgaaggaggccagccggtaaagaaccaggccaatagagaatgtaagagcaaagtcccaagaatgcttttatatttaggaaaatccagataggcggaggaaagccaaatctccttaccagaagaatgcaaaataatttatggagatacgcgaagacgtttcagaacctaatgtcccattctctaagtgtggcctgtgtttactgactttcttccacagagtatggtatggaaggaggaggaaaagtgacttcacagtggcgaaagctgatgaacattagcttggccaagtattggagattaacatcaacagttataagtcatattgatagtatgtgccctgataggatgtgatgagaagggtacttcccctctgtggtcctcctcctcaaaacctgtaaccccagtctaaatagcagaaagacattgcacaaacccagagtgagggactctcaagaatgcctgaccagtactcctcaaaatgtccaggtcatcacaagcaaggacagtctgagaaacgtcacatccagaggaacctaagaatgaggactcaatgtaaaagggatcctggaacaaaaaaaagacattgggaaaaactaatgaaatctgcccaaagtgtagagtttagtttagttaaataacaatttttaaagaggtattaaaaaaaaaaaaaaaaaggcaggtgaaggccggtgtggtggctcacgcctataattccagcactttgggaaggccaaggtgggcagatcacttgatctcagtagttcgagaccaacctgggcaacatagtgagaccccatctctacaaatactaaaaaattagccgggtgtgctggcatgtacctgtgttcctagctactcgggagcccaggtggtcaaggctacagtgagccatgatcacaccactgcactctaggctgggtgtcagagcaagaccctgtctcaaaaaagaaaaaaaaaaaaaaaacaggtgaagagggcgtccaggaagatgtctccgtggaggcgacatgtgaactgagccttgaatgatgcaccccagtcacacctggctaggagagacctggtgtgagagccttccaggcagaggaaattactgtgtaaagatccttggatagaaacaagcttgggccaggcgcggtagctcacgcctgtaatcccagcactttgggaggccgagacaggcagatcatgaggtcaggagatggagaccatcctggccaacacggtgaaaccctgtctgtaataaaaatacaaaagattagctgggtgtggtggcgggtgcctgtagtcccagctactcaggaggctgaggcaggagaatggtgtgaacctgggaggcggagcttgcagtgagccgagatcatgctactgcactccagcctgggcgacagagcgagactccatctcaaaaaaaaaaaaaaaaa

SEQ ID NO: 1163 - DNA, 205 bp, Homo sapiens
aacacggtgaaaccctgtctgtaataaaaatacaaaagattagctgggtgtggtggcgggtgcctgtagtcccagctactcaggaggctgaggcaggagaatggtgtgaacctgggaggcggagcttgcagtgagccgagatcatgctactgcactccagcctgggcgacagagcgagactccatctcaaaaaaaaaaaaaaaaa

SEQ ID NO: 1164 - DNA, 509 bp, Homo sapiens
cttttttttttttgaaacagagtctcactctgtcacccaggctggagtgcagtggcccaatcttggctcactgcaacccccaccccctgggttcaagcgattctcatgcctcagcctccccagtagttgggattacaggcgcccgccaccacacccagctaatgtttgtgataggtttcaccatgttggccaggctgatctcaaactcttgacctcaagggatcctcttgcctcagcctcccaaaatgctaggattacaggcatgagcctccacgcccagcccacattccagctcttggccatatctgtgtactgtttgctctgctgtttactggatagctttctttgaattgactcacttgtttttttcccaaaatttagccttattctaagcactaatatccacagaaggctttctgtgcagctagaattttcttccaatgcacaatgaaataagtacaaaactatgcaaacaaagcatttgtccacacaccacttagaaagcactg

SEQ ID NO: 1165 - DNA, 1625 bp, Homo sapiens
gaagctctctgggtagtgtgagcagttctcaacgtgcaccttggaaagcgcccgttttgaggtttagctgtggccaagatagatgacttcattttgttgctttttgttcttaacatggggagatatttagaaaacatgtttggctcttgctggggaagcagtgctgttccgtacagtgttttacaagccgtgtttccttaggattgaaagaaggtggcaagaggaagaagcagaagcagagagaggagtcgaagaagaagaagtcgaccaaaggcaatcactagaccggacttgaggcacgcggtgcacccccagacgctggcgctccaccgtgctcggcatgcggtcgtgcacacgcgctaggtagcagcgtcggtcaggactgtctcgaggccacactcgctcggcaggattatgcgatcacggatcagtcagagcagggtcaggagacggggctgacggcacgggtggcggggacagacgtttgggacttggccgcgactctctgcttctctccagctctcaatctgctgcattttcctctagtgcttccggatcctcttcattcttttcggctactcaaccactccgcatgctgctggaatatttctggctttagaagtacaggagggcgcagatggctaactgagtaacattcatgaaatgaggctttctgtggcggcgtagtgtttggaattagaaggtaattcagtagagtgtaacttagagaatattgcaagtgacacattgaatcctgcccgtcagggcaccttttcctcagagcaatccggccacacgaatagaaggctgtcgtgaatcacatcagatgtaaaatcattccttctgtttactcttttaattttcatcctttgcaggtagtgcaaattcaacttcaaatatggtgtaggttttgctagattccatatttttttcttggatttttgctaattatttttagcaaaaaatttttgctcagtggcactctccctagtgtccatgggttagggccatgctggggaaaacgggccggtatttacacacgcgcaaaacacccagagacggcacaaggaggttgaactcatgtttcagttcgcgaacattgactccttacgaaagtcacttcattctaactagatgcgcccacttccggtcattatttcgtttgcatgatgtattgcttcttcacgttttgtttttattgagcacggagtagaattccagggctgccttgacttcttccctgcatgctccctcccagtgactttccttccctttcacatgaggatctgccgttcatgttgctttctcctttgtcctcttggacttgagggcattgtgaaaagctttgctgtgatttaaaaatgccagcaattttaatctagcagtgttgaagctgggaattttttggcgcaatccatgtagcagtgacccaggcttgggagccagaaacaagtgtgacctgggattttatttaacacaactgttgccaaagagttggctttgtttatttggttttggcggggagaggagtggtatttgatgctttctgtggacaatgtaaccctaaacacatcatgtattttaaatgccacctacataaataaaacataagcatattgaataca

SEQ ID NO: 1166 - DNA, 764 bp, Homo sapiens
ctggggcgagtcctgagtgtgggcagggcctcaggcccccaagagggctgtgagcaggcaccttcctgtgaggcacgatgccaccatgtgaagttgtgtgggtctttggagagttctggcaggttgagggcctgtgcgtgtgggacccaggcctgccctgcctgctgccggccatgttccctctgcccagtcatgttgacaattgtggccaaattcaacatcgggcctgtttcctgcacccacgttggcacacactgagttcaagacagtttctgcagaaatgaatccagaggtgtttatttctggcacgttggatcagacgttcagagggtgggcgtctttctccatgcacttcagctggatcagtcagtgtcagccattgactttagcaacagggaaatgaaagactttcctcaataagaaatgggactttctcacgctggatggcacagagctggcaaacatgaggccagtccacaccaaggctttgcctgcagaaaggctgcactgtggccagcgggggaagcggaggagacacctgtggacaccctccccacaggtgggcacacctttgcgcaggcccagtgtgcgttctgaaggagagcccagggtggggttccgggactgaggtgcagccgtgtccagggtgggcttctagctctgccgctgggcggaactggggtaggtcccagggtggggttccaggactgaggtgcagccgtgcccagggtgggcttctagctctgccgctgggcagaactggg

SEQ ID NO: 1167 - DNA, 259 bp, Homo sapiens
cgagactccgtctcaaaaaaaaaaggccgggcacggtggctcacgcctgtaatcccagcactttgggaggccgaggcgggtggatcacgaggtcaggagatccagaccatcctggctaacacggtgaaaccccgtctctactaaaaaatacaaaaaattagccgggcgtggtggcgggtgcctgtagtcccagctccttgggaggctgaggcaggagaatggcgtgaacccgggaggcagagctttcaatgagtccaga

SEQ ID NO: 1168 - DNA, 1403 bp, Homo sapiens
gatatagcttagtataaaaataaaattcaacgttttggccaaaatgtttgtttttcactggattctgaatataataaattcaaagtaccctttttttagagtttctaataaagtagtatgtaaaaagaaactgcattttaagtcagacagtaaatgttttttttaatttacagcaaatgaagcagttttattagcatgttacaaatattgccaaaccaagacttctctaccatactttaacagctttccttcagaaaactctgaagttatatttgcaataataatgaaaccagcatttagtaccagcatatggttcatatgcaaataatactttccccaaaatctttctgggctaggctattttcttgctatgcttcctgcacccaaccagcagaattcttccagggtggaggaactaatcagcttgttctccaacagttctgaagccaacccacaaatctttgaggaaaaggggtcactttgtttactattctcttggagatggaagtgattctgctcttccatttgggtatattatttcaagggtatttcttcttaaaaatcttggaaagcctaagagagttaaaggcatcctggttttgtttcattttgctctgttttaaatccatatgcaaataaaactgcttctctcttacactgcttgaactagaaaatcagctttttaatgtaggttaccacttataagcacaaaagaaacatgtataagaaaccagatttaagtgttttaaataaaatgtaaacagtttttatttggtagagatgactcatggaaaaattgtgttggcttggtctgcatgtttaatgatgtgcttgtatatcgattagctgtgtcacttttaaataagaagtccacacaagcaagccaaatttttagatgacgaagtccataaataactagagaatttttgttatctgttgttaagttgaaatgtataatcatttatcactaaattgcacattgcctttatttatttgtgctctgtttttggtttacagtgtaataatacctcatttaaaaaataaaaaccactactgttacattttattaatttaaaaagctagaaaattcatgtagttactttttttacatatataatctgttaatgaattattgatttttgtatctgccacagtaaattaaagcattacacagtatttatcagtattttttaaacatcctgtccttttttaaaatctttgcttagtcagtcatatttttgtctgtatgattagaagtttttacgtccttccttttttgtacaaatctgtattgtattaatttctggatgcaatttttcaaatattaaaattatacagtcagtcaggcttcagtttattttttgaacacttgggcaattaattaaagccatatgtttaaaata

SEQ ID NO: 1169 - DNA, 8965 bp, Homo sapiens
attttctcttaacagggtattgcattactaaaccagaagtgatctttaagatcgagcaaggagaagagccctggatattagaaaaaggattcccaagccagtgccacccaggtgagttagtgatttctggcagatgaaagccagaggaaattagaacttaggtaattggtttaggatttgtcacctttggaatatttttcacaaatgtctctttttagccccagacctttggaaatgatcaaaaacaattggcccacatccctgttaccttaatcactcctccatatgttattctcactcataaatgcttttcttggctgggtgcggtggctcacgcctgtaatcccagcactttgggaggctgaggcaggcggatgacgaggtcaagagatcgagactgttctggccaacatggtgaaaccccgtctctactaaaaatatgaaaaattagctggatgtggtggtagctgcctgtagtcccagctgcttgggaggctgagacaggagaaccatgtgaacctgggaggtggaggttgcagtgagccgagattgtgccactgtactccagcctggtgacagagtgagactcagtctcaaaacaaacaaacaaacaaaaaaaaacaaacacttttttttttttttacattttaaagtattttacttatacctataatccaaaccagttggcttcattttagatatgttttcttggttagtttgtctttatcttttaaaattgtttgccttccttccgttgtcttagacaccttttgttagctgacaggtattcatgcaatccttctatatattcatttaacaacatatgatgagcactcactatgtctgttatgttttaggtaattaacagaataatgtccctggtatcttagtgtgtgtattaaaataaaggacaaaaaaatgcgtgtgtgtgtgtgtgtgtgtgtgtgtgtgtgtgtacatgtctgtgtgtttgtatatatgtacacacccatgtgcatatgtgtgtgtatataggtacacacacactgtgttgggtcatggtaagtgctgtgaagagaattcacacaggaaaggaggacgaagaatgacggtatagtctgtttggcagtaggttagagaaaacctttttgaggagttcccacattagagatgaggctttaatatgaaagtgtgagctatgtggattcagtgtagtccaggcagagagaacatcaggtaccaaacctcttagacaggtgtgttcttagaatgtttgaacagtgtcagggaaatcactgtggttggaagctagcgggcatggtggagactggtaggagataatgtcaggagaagaaacatgagctatggtagatacataaattttacttttggtgctatgagaaactgttttgagtaaatgtaaatcagcttaagtcatcagatttgatttacagtttaaaaggatctctctgacatctatgcagtgtatatactgtggtgggtggttgtgggtggtatgagtagggatagggtaccattatgtgcttcagaggagagaggatagtggctgagactgttggaagtgccagaggtactgagaagtggtaggtttgtacaaatattttgaagatggagccaagaacatttgctttcagattgggtatgagagaagggagaatcaagtgtgatcccaataatttgtctcaagcagctagatagattaggttatcatttactgagacagagaaaaattagagaggagacatataagggagttatcacagatttaattttgaacaccagaagttggagataactcttataatcgagtctgtttttgactaagagattggatatgtgtaagtacatggttgaggtcagaactagaagtatccatttgaaaggcatcaacttaagatgatgttaaaggaatgaggcagaatgagatcttcaagagcagaagtcaacagactttttttgtaaatgaccagatagtaaatgtttgaggcttggcaggccacatatggtcgtggttgcagctgctcctcctcatcttctttcttttccttattccttctcgttctcctcttgctctttctctctcctctcttttcctcttccctcttctgtactgcctcatccagctttttcccttcaaaaacttaaaaaacatacttagctcaagggccattgccgtgcagttatatgccaaccccttttctagagtgtgattgtatgtaggtgagagtagtcttgggacaataatgcttttagtaagtattaaattcatcccttagaggatattgaggaataacaatctgagctacacaaaaaccagagagcctggtttcctgtagtcaaatgaggtacattcttccatgttactgctatcttgaatggcaaccatggcatcaccgtactaataaacctgttaatatttcccaccagtctctttgttcctattgttatttttcatttaaagctatcttctacatacctttatattctcacttttcactgatataactcaaaagcaaaactatgtgttctcattcctgactcagtctaattgttagttgtctaatttctaattcctagttggttcttttctctttttttttagcctaaattattcaatttatcttcctttagcttaacaaactaacctaaagttgctgcttattaataaattaaatttccctttcttttcttttctttttttagttttaaacctttgtgtcaagggctgactttcaatagattgcagcaagggagctgctcagtaaatttccctttcaatgactataatagtgtagcccttgctacctgtcttaaatttctttgtttctgctccctaaaatttatgtcaaatcccgtcctattctatatcttaaattttatttgcaaatgttttctcatttactggaaaacttccgttcttgtttgccttgccttttttcaggtaattcatactgtgtttgtaaagtgtttagaaattgaatagtaatggcttattatttcacttgttttaagttagaacttgattttttgctgaaacttaaatagcccagattttatgacattaactcaccagtggctgtatgccaaaaacttagacctgttcatatggcttagggttgcttagggtttctttttgcattgagatttttgttctccaaaagagaagggcctctcttactaatttgggtattttgataattactttgttgattatctgtgtagccagatttaggagagatcattcattttcatacattctgaaagtattctatgatactcttcctaaatacatattcccatattttgtcttcgtgtattatagctgatcaggtgcaggttggaaataattcagtgcacgttgctttataagaataatgtacagttacattatagtaacacctgccaagttctggactctggtcacaataggggcgatagcattgagcaagggatttattttatgttacaatgaattatataaacagtaacttctaaaagatggagcaagtggagccttaaaatggtagagatgttatagagatttttgctatcattattttattattattactattattagtttttgtttttaagttaaagtagcagttcactgagggatatccaggatctaaggagagataaggataaaatgtttctagttgagtggaaggtatgttattagggatgagcaatttctgagagtctaatctctagccaaactgcacagaaatattttcaatagatttgcatgatgttgagaagatgagggtgtaaaccatgctttacctctgccaaacctaattcttatgtttctcactaccactcactctatttcctttttaaaaaaacaactcccttgaactcattctctgtgcatttcctgctctttgaaagaacagctctcagaatatctccatctcctgtttatcatgtcttgagtttatttcaccttccctagtatgcttttcctacagcattaaaaaaaactatttcttctcaataaaacttaaagaaaacactggctcttgggctatataggactgttcttttgaatccaaggaagttgatgttttcagaatgttaattttcttgctgattcaaagatagaaagaagcatgtactctggtgggaattctaccccagtaaactgtgtgtgaggggattaggaccaagctctgttttgtctccaccaaacctaatgcatcctctgaaaccccttgtctgctaatcttcaccatcactttattcagtgttcattgtctctgttgggttcaccccattttctccgagtttttctatttctgaatcagccactctggttccctgtgctgtgaattttatttcaccttttcttttcagttttgaaggttatatttataaagtgttaaatatcattgccaatttcttctccctgtttccactgaagcatgttttatgttttccacctaaaccttggagggtaaagaaaatgtacacttgaactcagttcacaccaggaaactgaatttaaaacaaaagaattgactgtatgatagtgcatttgtgtaaaagtctgattccatcagaaatgtattaaggttcataagatgtggttatttttctcatttctagaaaggaaatggaaagttgatgacgtgttagagagcagccaggaaaatgaagatgaccatttttgggagcttctattccacaacaacaaaacagtaagtgtagaaaatggagatagaggaagcaaaactttcaatttgggcacagaccctgtttctttaagaaattatccctataaaatatgtgactcatgtgaaatgaatttgaaaaatatttcgggcttaattattagtaaaaagaactgttccagaaagaagcctgatgagtttaatgtatgtgagaaattgctccttgatattaggcatgagaaaatccctattggagagaagtcttataaatatgatcaaaaaaggaatgccattaattatcaccaggatctcagtcagccaagttttggccaatcttttgagtatagtaaaaatggacaaggcttccatgatgaggcagcattttttacaaataagagatctcagataggagagacagtctgtaaatataacgaatgtggaagaaccttcattgaaagtttaaagctgaatatatctcaaagacctcatttggaaatggagccgtatggatgcagtatttgcgggaagtccttctgcatgaatttaaggtttggacatcagagagctcttacaaaggacaatccttatgaatataatgaatatggggaaatcttctgtgacaattcagctttcattatccatcagggagcttacacaagaaagattctccgtgaatataaagtgagtgacaaaacctgggaaaagtcagctctcttaaaacatcaaatagtacacatggggggaaagtcttatgattacaatgaaaatgggagtaatttcagcaagaagtcacatcttacccagcttcggagagctcacacaggagaaaaaacctttgaatgtggtgaatgtgggaaaaccttctgggagaagtcaaacctcactcaacatcagagaacacacacaggagagaagccctatgaatgtactgaatgtgggaaagccttttgccagaaaccacacctgaccaaccatcagcgaacacatacaggagaaaaaccctatgaatgtaagcaatgtggaaaaacattctgtgtgaagtcaaacctcactgaacatcagagaacacacacaggggagaagccctatgaatgtaatgcatgtgggaaatccttctgccacagatcagccctcactgtgcatcagagaacacacacaggggagaaaccgtttatatgtaatgaatgtggaaaatccttctgtgtgaagtcaaacctcattgtacatcaaagaactcacactggggagaaaccatataagtgtaatgaatgtgggaaaaccttctgtgaaaaatcagctctcactaaacatcagaggactcacacaggggagaagccgtatgagtgtaatgcatgtgggaagacctttagtcagaggtcagtgctcaccaaacatcagagaattcacacaagggtgaaagctctttcaacatcctgaatgttagaagccttcatacacttgtgaaattggttatacagtttcaaaaaaggagatcagagaaagccaaagaatgtcagaaatttgtagaaaatgacttcttgtttgaatatgtaaaagctttcaagaaaaattaaaacttttcattagaaaatttgtactgaggggaattctattcatctaagtaatatggtgaaaatatttatctggaatttatgttgtttagtgttatattccagacgtgataccaaaattttgttgcaaatataatggacaatatttatttatacccatattcacagtggaatctgaagcttataaaagttgaatgacagcagcattaaacatatatgtgaagagtccccgatgtttgtagaccttatgtgagtatgcaaatatataaatttgagtatgcttgatttgtatattggaactcaacatgatcataaggagaagatacgtacccttaattgagtaactactatggtatttgttaatattttctacactaaataccattggtgtctttataggttgacataattatatatgtgtatgtacatatgtttgtgtgtatatgtaaatatatttctacacacatacttaaatatagtgatgtgctagtataacctcatactgacttaaaagttctgattgttaaattttaaggaattttgtgagccagttattaaaagcagtcattatttaaaatatgtaaacttacagttaaaaacaaaggtaataaatactcagcactcatcacttcctaattattttgctacatttcactattacctttgctgttttacttatttaatctgtatgatgaaaatactgtataatagtgtgcactgcacatctgtctcttcccagctccacattcagtgctgtcttggtagcttggacttagtgggagtgtttacaccatggaaattgacaaactataaatcagggttttaattttctcagagaacctgctgtcaaatatttacagcacatcactgtgtatatatgaaaacgtatttggcaatacaaaccacataccccttctatttcctgacataaataaatggctatggccatttacagctgaaccacgtcttcaagaaagaagccaaaaatatttccgtgaggtttttaactacctctgaatctgtcctactctaaatactaccggagtctctttgtaggttggccagtatatgtttttagtgaaatattatttcacaaagaactatatcacgtacctttcctctgactgtttcctggcatatatgcatgaatatggccattattgaactatcacttcagtaaagaagttaaacagtacttttctgaggtttttcagctacctctgggtcattctgtaatgtaaatgttgttaataagaatggtttttacataaattatgcaaaggttaacaagcagtaacactgcactcctcaaaaagtggcggtatgtaatgaaaggcccttttgatatccttgatttttcattgtgtatctgtttgggcacggtctatgtaacactagttctgcgtattagtattttagagtatctctgcctcccttgtcctgttgtttcttttgcccccttggaacacattggtcagcagttctaagagacactgcccacatgatggccattccctacttcatccttgctgagctaaattttatatttttgtgcatccttctcccagatgacttaggtggtaagtccagattagtcaaagctaatcatggaagttccattttaatgattctgttggggtgaacttgggagcaatgagatgtttgggaagtattgtgtagtacttctgggaaagatctccttgatacaacattgtcatgacatgagaagagactctgctgggctttttcatgtctgtaacatggtattggcttatcgtttttatctctgaagggcagtagcctgaagataacagtgcacaaggtgggaaaagccagctcagaggtgacgttgccgagctactctgctctctatacctgttctctactgggactttttataaccctcaataactgttttttatttggtcttagggctgtctgatacttagagctgaaggcattccagctgacacagaggaatatttttctaagtgttaatgttctatatggtaattagggggaagaattatttcttttcacaagttaatatagggatggctgtttgtatcagccatggttctttctggtggaaaacagaattctccaactaaaaatattttaatggcagactgattacagtggtgtgggccagaaacaagggacagtgaaacacccagagacttgtatcagcaggaagccattgccattctgagccttgaagggcaaggagggaaacagtgttaccagagcccagtaagaactgctgtcatgaaggaggggccaccttgtaagagacatcattactaccagaactgtggtgccaaattgctggtgtctctctttggagaaaccaaccagatacatctgctggagagcccaggtgggcacagagaagggtggagagagaatctgggaagagaaatggagaataagcagcacagtgttattcatttctgtaaattcctatgtagaaggctcagtgttagaaataaagttattctactagttgcaagttaagtgtttctgtttgttctgctttcctgttagcataagtaaactccctttggaactacacaggtatgtctctccttcaacatgtgtgaagcagacattatattaaattacattattcatacctccctgtggtgtttcttattgtatgtggtgtaaggtaagcagctctgtattcttccaaataaatagccagttgtccctgca

SEQ ID NO: 1170 - DNA, 8960 bp, Homo sapiens
attttctcttagcagggtattgcattactaaaccagaagtgatctttaagatcgagcaaggagaagagccctggatattagaaaaaggattcccaagccagtgccacccaggtgagttagtgatttctggcagatgaaagccagaggaaattagaacttaggtaattggtttaggatttgtcacctttggaatatttttcacaaatgtctctttttagccccagacctttggaaatgatcaaaaacaattggcccacatccctgttaccttaatcactcctccatatgttattctcactcataaatgcttttcttggctgggtgcggtggctcacgcctgtaatcccagcactttgggaggctgaggcaggcggatgacgaggtcaagagatcgagactgttctggccaacatggtgaaaccccgtctctactaaaaatatgaaaaattagctggatgtggtggtagctgcctgtagtcccagctacttgggaggctgagacaggagaaccatgtgaacctgggaggtggaggttgcagtgagccgagattgtgccactgtactccagcctggtgacagagtgagactcagtctcaaaacaaacaaacaaacaaaaaaaaacaaacacttttttttttttttacattttaaagtattttacttatacctataatccaaaccagttggcttcattttagatatgttttcttggttagtttgtctttatcttttaaaattgtttgccttccttccgttgtcttagacaccttttgttagctgacaggtattcatgcaatccttctatatattcatttaacaacatatgatgagcactcactatgtctgttatgttttaggtaattaacagaataatgtccctggtatcttagtgtgtgtattaaaataaaggacaaaaaaatgcgtgtgtgtgtgtgtgtgtgtgtgtgtgtacatgtctgtgtgtttgtatatatgtacacacccatgtgcatatgtgtgtgtatataggtacacacacactgtgttgggtcatggtaagtgctgtgaagagaattcacacaggaaaggaggacgaagaatgacggtatagtctgtttggcagtaggttagagaaaacctttttgaggagttcccacattagagatgaggctttaatatgaaagtgtgagctatgtggattcagtgtagtccaggcagagagaacatcaggtaccaaacctcttagacaggtgtgttcttagaatgtttgaacagtgtcagggaaatcactgtggttggaagctagcgggcatggtggagactggtaggagataatgtcaggagaagaaacatgagctatggtagatacataaattttacttttggtgctatgagaaactgttttgagtaaatgtaaatcagcttaagtcatcagatttgatttacagtttaaaaggatctctctgacatctatgcagtgtatatactgtggtgggtggttgtgggtggtatgagtagggatagggtaccattatgtgcttcagaggagagaggatagtggctgagactgttggaagtgccagaggtactgagaagtggtaggtttgtacaaatattttgaagatggagccaagaacatttgctttcagattgggtatgagagaagggagaatcaagtgtgatcccaataatttgtctcaagcagctagatagattaggttatcatttactgagacagagaaaaattagagaggagacatataagggagttatcacagatttaattttgaacaccagaagttggagataactcttataatcgagtctgtttttgactaagagattggatatgtgtaagtacatggttgaggtcagaactagaagtatccatttgaaaggcatcaacttaagatgatgttaaaggaatgaggcagaatgagatcttcaagagcagaagtcaacagactttttttgtaaatgaccagatagtaaatgtttgaggcttggcaggccacatatggtcgtggttgcagctgctcctcctcatcttctttcttttccttattccttctcgttctcctcttgctctttctctctcctctcttttcctcttccctcttctgtactgcctcatccagctttttcccttcaaaaacttaaaaaacatacttagctcaagggccattgccgtgcagttatatgccaaccccttttctagagtgtgattgtatgtaggtgagagtagtcttgggacaataatgcttttagtaagtattaaattcatcccttagaggatattgaggaataacaatctgagctacacaaaaaccagagagcctggtttcctgtagtcaaatgaggtacattcttccatgttactgctatcttgaatggcaaccatggcatcaccgtactaataaacctgttaatatttcccaccggtctctttgttcctattgttatttttcatttaaagctatcttctacatacctttatattctcacttttcactgatataactcaaaagcaaaactatgtgttctcattcctgactcagtctaattgttagttgtctaatttctaattcctagttggttcttttctctttttttttagcctaaattattcaatttatcttcctttagcttaacaaactaacctaaagttgctgcttattaataaattaaatttccctttcttttcttttctttttttagttttaaacctttgtgtcaagggctgactttcaatagattgcagcaagggagctgctcagtaaatttccctttcaatgactataatagtgtagcccttgctacctgtcttaaatttctttgtttctgctccctaaaatttatgtcaaatcccgtcctattctatatcttaaattttatttgcaaatgttttctcatttactggaaaacttccgttcttgtttgccttgccttttttcaggtaattcatactgtgtttgtaaagtgtttagaaattgaatagtaatggcttattatttcacttgttttaagttagaacttgattttttgctgaaacttaaatagcccagattttatgacattaactcaccagtggctgtatgccaaaaacttagacctgttcatatggcttagggttgcttagggtttctttttgcattgagatttttgttctccaaaagagaagggcctctcttactaatttgggtattttgataattactttgttgattatctgtgtagccagatttaggagagatcattcattttcatacattctgaaagtattctatgatactcttcctaaatacatattcccatattttgtcttcgtgtattatagctgatcaggtgcaggttggaaataattcagtgcacgttgctttataagaataatgtacagttacattatagtaacacctgccaagttctggactctggtcacaataggggcgatagcattgagcaagggatttattttatgttacaatgaattatataaacagtaacttctaaaagatggagcaagtggagccttaaaatggtagagatgttatagagatttttgctatcattattttattattattactattattagtttttgtttttaagttaaagtagcagttcactgagggatatccaggatctaaggagagataaggataaaatgtttctagttgagtggaaggtatgttattagggatgagcaatttctgagagtctaatctctagccaaactgcacagaaatattttcaatagatttgcatgatgttgagaagatgagggtgtaaaccatgctttacctctgccaaacctaattcttatgtttctcactaccactcactctatttcctttttaaaaaaacaactcccttgaactcattctctgtgcatttcctgctctttgaaagaacagctctcggtatatctccatctcttgtttatcatgtgttgagtttatttcaccttccctagtatgcttttcctacagcattaaaaaaaactatttcttctctaataaaacttaaagaaacccctcggctcttgggctatataggtctgttcttttgaatccaaggaagttgatgttttcagaatgttaattttcttgctgattcaaagatagaaagaagcatgtcctctggtgggaattctaccccagtaagctgtgtgtgaggggattaggaccaagctctgttttgtctccaccaaacctaatgcatcctctgaaaccccttgtctgctaatcttcaccatcactttattcagtgttcattgtctctgttgggttcaccccattttctccgagtttttctatttctgaatcagccactctggttccctgtgctgtgaattttatttcaccttttcttttcagttttgaaggttatatttataaagtgttaaatatcattgccaatttcttctccctgtttccactgaagcatgttttatgttttccacctaaaccttggagggtaaagaaaatgtacacttgaactcagttcacaccaggaaactgaatttaaaacaaaagaattgactgtatgatagtgcatttgtgtaaaagtctgattccatcagaaatgtattaaggttcataagatgtggttatttttctcatttctagaaaggaaatggaaagttgatgacgtgttagagagcagccaggaaaatgaagatgaccatttttgggagcttctattccacaacaacaaaacagtaagtgtagaaaatggagatagaggaagcaaaactttcaatttgggcacagaccctgtttctttaagaaattatccctataaaatatgtgactcatgtgaaatgaatttgaaaaatatttcgggcttaattattagtaaaaagaactgttccagaaagaagcctgatgagtttaatgtatgtgagaaattgctccttggtattaggcatgagaaaatccctattggagagaagtcttataaatatgatcaaaaaaggaatggcattaattatcaccaggatctcagtcagccaagttttggccaatcttttgagtatagtaaaaatggacaagggttccatgatgaggcagcattttttacaaataagagatctcagataggagagacagtctgtaaatataacgaatgtggaagaaccttcattgaaagtttaaagctgaatatatctcaaagacctcatttggaaatggagccgtatggatgcagtatttgcgggaagtccttctgcatgaatttaaggtttggacatcagagagctcttacaaaggacaatccttatgaatataatgaatatggggaaatcttctgtgacaattcagctttcattatccatcagggagcttacacaagaaagattctccgtgaatataaagtgagtgacaaaacctgggaaaagtcagctctcttaaaacatcaaatagtacacatggggggaaagtcttatgattacaatgaaaatgggagtaatttcagcaagaagtcacatcttacccagcttcggagagctcacacaggagaaaaaacctttgaatgtggtgaatgtgggaaaaccttctgggagaagtcaaacctcactcaacatcagagaacacacacaggagagaagccctatgaatgtactgaatgtgggaaagccttttgccagaaaccacacctgaccaaccatcagcgaacacatacaggagaaaaaccctatgaatgtaagcaatgtggaaaaacattctgtgtgaagtcaaacctcactgaacatcagagaacacacacaggggagaagccctatgaatgtaatgcatgtgggaaatccttctgccacagatcagccctcactgtgcatcagagaacacacacaggggagaaaccgtttatatgtaatgaatgtggaaaatccttctgtgtgaagtcaaacctcattgtacatcaaagaactcacactggggagaaaccatataagtgtaatgaatgtgggaaaaccttctgtgaaaaatcagctctcactaaacatcagaggactcacacaggggagaagccgtatgagtgtaatgcatgtgggaagacctttagtcagaggtcagtgctcaccaaacatcagagaattcacacaagggtgaaagctctttcaacatcctgaatgttagaagccttcatacacttgtgaaattggttatacagtttcaaaaaaggagatcagagaaagccaaagaatgtcagaaatttgtagaaaatgacttcttgtttgaatatgtaaaagctttcaagaaaaattaaaacttttcattagaaaatttgtactgaggggaattctattcatctaagtaatatggtgaaaatatttatctggaatttatgttgtttagtgttatattccagacgtgataccaaaattttgttgcaaatataatggacaatatttatttatacccatattcacagtggaatctgaagcttataaaagttgaatgacagcagcattaaacatatatgtgaagagtccccgatgtttgtagaccttatgtgagtatgcaaatatataaatttgagtatgcttgatttgtatattggaactcaacatgatcataaggagaagatacgtacccttaattgagtaactactatggtatttgttaatattttctacactaaataccattggtgtctttataggttgacataattatatatgtgtatgtacatatgtttgtgtgtatatgtaaatatatttctacacacatacttaaatatagtgatgtgctagtataacctcatactgacttaaaagttctgattgttaaattttaaggaattttgtgagccagttattaaaagcagtcattatttaaaatatgtaaacttacagttaaaaacaaaggtaataaatactcagcactcatcacttcctaattattttgctacatttcactattacctttgctgttttacttatttaatctgtatgatgaaaatactgtataatagtgtgcactgcacatctgtctcttcccagctccacattcagtgctgtcttggtagcttggacttagtgggagtgtttacaccatggaaattgacaaactataaatcagggttttaattttctcagagaacctgctgtcaaatatttacagcacatcactgtgtatatatgaaaacgtatttggcaatacaaaccacataccccttctatttcctgacataaataaatggctatggccatttacagctgaaccacgtcttcaagaaagaagccaaaaatatttccgtgaggtttttaactacctctgaatctgtcctactctaaatactaccggagtctctttgtaggttggccagtatatgtttttagtgaaatattatttcacaaagaactatatcacgtacctttcctctgactgtttcctggcatatatgcatgaatatggccattattgaactatcacttcagtaaagaagttaaacagtacttttctgaggtttttcagctacctctgggtcattctgtaatgtaaatgttgttaataagaatggtttttacataaattatgcaaaggttaacaagcagtaacactgcactcctcaaaaagtggcggtatgtaatgaaaggcccttttgatatccttgatttttcattgtgtatctgtttgggcacggtctatgtaacactagttctgcgtattagtattttagagtatctctgcctcccttgtcctgttgtttcttttgcccccttggaacacattggtcagcagttctaagagacactgcccacatgatggccattccctacttcatccttgctgagctaaattttatatttttgtgcatccttctcccagatgacttaggtggtaagtccagattagtcaaagctaatcatggaagttccattttaatgattctgttggggtgaacttgggagcaatgagatgtttgggaagtattgtgtagtacttctgggaaagatctccttgatacaacattgtcatgacatgagaagagactctgctgggctttttcatgtctgtaacatggtattggcttatcgtttttatctctgaagggcagtagcctgaagataacagtgcacaaggtgggaaaagccagctcagaggtgacgttgccgagctactctgctctctatacctgttctctactgggactttttataaccctcaataactgttttttatttggtcttagggctgtctgatacttagagctgaaggcattccagctgacacagaggaatatttttctaagtgttaatgttctatatggtaattagggggaagaattatttcttttcacaagttaatatagggatggctgtttgtatcagccatggttctttctggtggaaaacagaattctccaactaaaaatattttaatggcagactgattacagtggtgtgggccagaaacaagggacagtgaaacacccagagacttgtatcagcaggaagccattgccattctgagccttgaagggcaaggagggaaacagtgttaccagagcccagtaagaactgctgtcatgaaggaggggccaccttgtaagagacatcattactaccagaactgtggtgccaaattgctggtgtctctctttggagaaaccaaccagatacatctgctggagagcccaggtgggcacagagaagggtggagagagaatctgggaagagaaatggagaataagcagcacagtgttattcatttctgtaaattcctatgtagaaggctcagtgttagaaataaagttattctactagttgcaagttaagtgtttctgtttgttctgctttcctgttagcataagtaaactccctttggaactacacaggtatgtctctccttcaacatgtgtgaagcagacattatattaaattacattattcatacctccctgtggtgtttcttattgtatgtggtgtaaggtaagcagctctgtattcttccaaataaatagccagttgtccctgc

SEQ ID NO: 1171 - DNA, 4357 bp, Homo sapiens
agaaaggaaatggaaagttgatgacgtgttagagagcagccaggaaaatgaagatgaccatttttgggagcttctattccacaacaacaaaacagtaagtgtagaaaatggagatagaggaagcaaaactttcaatttgggcacagaccctgtttctttaagaaattatccctataaaatatgtgactcatgtgaaatgaatttgaaaaatatttcgggcttaattattagtaaaaagaactgttccagaaagaagcctgatgagtttaatgtatgtgagaaattgctccttgatattaggcatgagaaaatccctattggagagaagtcttataaatatgatcaaaaaaggaatgccattaattatcaccaggatctcagtcagccaagttttggccaatcttttgagtatagtaaaaatggacaaggcttccatgatgaggcagcattttttacaaataagagatctcagataggagagacagtctgtaaatataacgaatgtggaagaaccttcattgaaagtttaaagctgaatatatctcaaagacctcatttggaaatggagccgtatggatgcagtatttgcgggaagtccttctgcatgaatttaaggtttggacatcagagagctcttacaaaggacaatccttatgaatataatgaatatggggaaatcttctgtgacaattcagctttcattatccatcagggagcttacacaagaaagattctccgtgaatataaagtgagtgacaaaacctgggaaaagtcagctctcttaaaacatcaaatagtacacatggggggaaagtcttatgattacaatgaaaatgggagtaatttcagcaagaagtcacatcttacccagcttcggagagctcacacaggagaaaaaacctttgaatgtggtgaatgtgggaaaaccttctgggagaagtcaaacctcactcaacatcagagaacacacacaggagagaagccctatgaatgtactgaatgtgggaaagccttttgccagaaaccacacctgaccaaccatcagcgaacacatacaggagaaaaaccctatgaatgtaagcaatgtggaaaaacattctgcgtgaagtcaaacctcactgaacatcagagaacacacacaggggagaagccctatgaatgtaatgcatgtgggaaatccttctgccacagatcagccctcactgtgcatcagagaacacacacaggggagaaaccgtttatatgtaatgaatgtggaaaatccttctgtgtgaagtcaaacctcattgtacatcaaagaactcacactggggagaaaccatataaatgtaatgaatgtgggaaaaccttctgtgaaaaatcagctctcactaaacatcagaggactcacacaggggagaagccatatgagtgtaatgcatgtgggaagacctttagtcagaggtcagtgctcaccaaacatcagagaattcacacaagggtgaaagctctttcaacatcctgaatgttagaagccttcatacacttgtgaaattggttatacagtttcaaaaaaggagatcagagaaagccaaagaatgtcagaaatttgtagaaaatgacttcttgtttgaatatgtaaaagctttcaagaaaaattaaaacttttcattagaaaatttgtactgaggggaattctattcatctaagtaatatggtgaaaatatttatctggaatttatgttgtttagtgttatattccagacgtgataccaaaattttattgcaaatataatggacaatatttatttatacccatattcacagtggaatctgaagcttataaaagttgaatgacagcagcattaaacatatatgtgaagagtccccgatgtttgtagaccttatgtgagtatgcaaatatataaatttgagtatgcttgatttgtatattggaactcaacatgatcataaggagaagatacgtacccttaattgagtaactactatggtatttgttaatattttctacactaaataccattggtgtctttataggttgacataattatatatgtgtatgtacatatgtttgtgtgtatatgtaaatatatttctacacacatacttaaatatagtgatgtgctagtataacctcatactgacttaaaagttctgattgttaaattttaaggaattttgtgagccagttattaaaagcagtcattatttaaaatatgtaaacttacagttaaaaacaaaggtaataaatactcagcactcatcacttcctaattattttgctacatttcactattacctttgctgttttacttatttaatctgtatgatgaaaatactgtataatagtgtgcactgcacatctgtctcttcccagctccacattcagtgctgtcttggtagcttggacttagtgggagtgtttacaccatggaaattgacaaactataaatcagggttttaattttctcagagaacctgctgtcaaatatttacagcacatcactgtgtatatatgaaaacgtatttggcaatacaaaccacataccccttctatttcctgacataaataaatggctatggccatttacagctgaaccacgtcttcaagaaagaagccaaaaatatttccgtgaggtttttaactacctctgaatctgtcctactctaaatactaccggagtctctttgtaggttggccagtatatgtttttagtgaaatattatttcacaaagaactatatcacgtacctttcctctgactgtttcctggcatatatgcatgaatatggccattattgaactatcacttcagtaaagaagttaaacagtacttttctgaggtttttcagctacctctgggtcattctgtaatgtaaatgttgttaataagaatggtttttacataaattatgcaaaggttaacaagcagtaacactgcactcctcaaaaagtggcggtatgtaatgaaagccccttttgatatccttgatttttcattgtgtatctgtttgggcacggtctatgtaacactagttctgcgtattagtattttagagtatctctgcctcccttgtcctgttgtttcttttgcccccttggaacacattggtcagcagttctaagagacactgcccacatgatggccattccctacttcatccttgctgagctaaattttatatttttgtgcatccttctcccagatgacttaggtggtaagtccagattagtcaaagctaatcatggaagttccattttaatgattctgttggggtgaacttgggagcaatgagatgtttgggaagtattgtgtagtacttctgggaaagatctccttgatacaacattgtcatgacatgagaagagactctgctgggctttttcatgtctgtaacatggtattggcttatcgtttttatctctgaagggcagtagcctgaagataacagtgcacaaggtgggaaaagccagctcagaggtgacgttgccgagctactctgctctctatacctgttctctactgggactttttataaccctcaataactgttttttatttggtcttagggctgtctgatacttagagctgaaggcattccagcttgacacagaggaatatttttctaagtgttaatgttctatatggtaattagggggaagaattatttcttttcacaagttaatatagggatgggtgtttgtatcagccatggttctttctggtggaaaacagaattctccaactaaaaatattttaatggcagactgattacagtggtgtgggccagaaacaagggacagtgaaacacccagagacttgtatcagcaggaagccattgccattctgagccttgaagggcaaggatggaaacagtgttaccagagcccagtaagaactgctgtcatgaaggaggggccaccttgtaagagacatcattactaccagaactgtggtgccaaattgctggtgtctctctttggagaaaccaaccagatacatctgctggagagcccaggtgggcacagagaagggtggagagagaatctgggaagagaaatggagaataagcagcacagtgttattcatttctgtaaattcctatgtagaaggctcagtgttagaaataaagttattctactagttgcaagttaagtgtttctgtttgttctgctttcctgttagcataagtaaactccctttggaactacacaggtatgtctctccttcaacatgtgtgaagcagacattatattaaattacattattcatacctccctgtggtgtttcttattgtatgtggtgtaaggtaagcagctctgtattcttccaaataaatagccagttgtccctgca

SEQ ID NO: 1172 - DNA, 242 bp, Homo sapiens
gtggcatttaccccaatcctggctctgcagagtactgtgtcttcatgtcctccacatttgtattgatccagaaatgatagtttgttgtaaaataggccagtgacaagccctcctagaatatttttattgggaggtcactgtagaccagagagtttgtgtccttattgcttccagcagtcatattgagaaagtacatttgctctgtaatctattgaaagtcagtccacaacacaaaaatgaaa

SEQ ID NO: 1173 - DNA, 242 bp, Homo sapiens; identical to SEQ ID NO: 1172

SEQ ID NO: 1174 - DNA, 242 bp, Homo sapiens; identical to SEQ ID NO: 1172

SEQ ID NO: 1175 - DNA, 101 bp, Homo sapiens
cagagcttgcagtgagccgagatcgcgccactgcactccagcctgggcgatagagcgagactctgtctcaaaaaaaaaaaaaaaaaaaaaaaaaaaagagt

SEQ ID NO: 1176 - DNA, 1419 bp, Homo sapiens
gaacatttcaagtagcctccctctatgttcctttcctttttaaatatattgataatcctactgcagggaatttgggagccatacttggtcttcgcatgcaacgtaattagatataactatactatgtgaatatgactaaagaaatgaaaatgaaaacagtatcttgtgctctgtaacgattgttattaaatatatcatagaaatgagaagagtaggctcaggagctgaactgcctagttcaaaaggccaaatttactactttttgttccgtgaatttgttgtgctcctgtttccttagttgtaaaacagagataacaataggacgtgcccataagcttttcatgaggattaaatgagttaatgtgtttggtggggaccaggtggacatggtactggtagggccctatttgacattggctttaagtatcactggctttaagtgcatcagtagatatatgatgacaataattgtattatcatggtgatatggatttcttataaatacttgtattatgttagtcacttctagaaaagaatacatctatacagtagaatataattcaaaaaataatgtcatatttttgtaaagaaattttttgtaaaacttttcagtcttcaaagagtttcatagactttattccatttatattgagagcctactttgtgttaagcattttgctgaacattgtcctcactcttatgttacttaccatctattgggaagagaaagaagtaaacaaataattacatgtagagtagtagtgtcaatggtagaggcatgaacacaacacagatttaacactagagaaagagtgatcacaaaagaaatgatgtttcagttgagttttaaatggcagctggagttcatctgaatgattaggtgtctaggacaggtttaaaggttagggagtaaggaagataatattcaaaataaaaagaacctgaggatattcacagaggacatttgcagaggcctgaaatagcattggtacattcctagaaccataaatagtttgatggtaatgtaaattacagtatgttttgaaaaatcatggaagatttataccacgataagaaacttcaactttattctaaagttgatgagcatttgacagattttaagcaagaaacaaatattaaatttatattttagaaagaattctagatacataaaaagcacttattataatccagtatccattcatgataactctcagctaactggaaataaaagggaacttccttggtctaaggaagaacatctacataaattctacaaccagccacatacttaatggtgaaataatgaatgtttttctcctaagatcaggaaaaagaaaaagatgtctcctcttacttctattcaggatggtactggtagttcaggccagtacagctatgcaagaaaaagaaataaaa

SEQ ID NO: 1177 - DNA, 1419 bp, Homo sapiens
gaacatttcaagtagcctccctctatgttcctttcctttttaaatatattgataatcctactgcagggaatttgggagccatacttggtcttcgcatgcaacgtaattagatataactatactatgtgaatatgactaaagaaatgaaaatgaaaacagtatcttgtgctctgtaacgattgttattaaatatatcatagaaatgagaagagtaggctcaggagctgaactgcctagttcaaaaggccaaatttactactttttgttccgtgaatttgttgtgctcctgtttccttagttgtaaaacagagataacaataggacgtgcccataagcttttcatgaggattaaatgagttaatgtgtttggtggggaccaggtggacatggtactggtagggccctatttgacattggctttaagtatcactggttttaagtgcatcagtagatatatgatgacaataattgtattatcatggtgatatggatttcttataaatacttgtattatgttagtcacttctagaaaagaatacatctatacagtagaatataattcaaaaaataatgtcatatttttgtaaagaaattttttgtaaaacttttcagtcttcaaagagtttcatagactttattccatttatattgagagcctactttgtgttaagcattttgctgaacattgtcctcactcttatgttacttaccatctattgggaagagaaagaagtaaacaaataattacatgtagagtagtagtgtcaatggtagaggcatgaacacaacacagatttaacactagagaaagagtgatcacaaaagaaatgatgtttcagttgagttttaaatggcagctggagttcatctgaatgattaggtgtctaggacaggtttaaaggttagggagtaaggaagataatattcaaaataaaaagaacctgaggatattcacagaggacatttgcagaggcctgaaatagcattggtacattcctagaaccataaatagtttgatggtaatgtaaattacagtatgttttgaaaaatcatggaagatttataccacgataagaaacttcaactttattctaaagttgatgagcatttgacagattttaagcaagaaacaaatattaaatttatattttagaaagaattctagatacataaaaagcacttattataatccagtatccattcatgataactctcagctaactggaaataaaagggaacttccttggtctaaggaagaacatctacataaattctacaaccagccacatacttaatggtgaaataatgaatgtttttctcctaagatcaggaaaaagaaaaagatgtctcctcttacttctattcaggatggtactggtagttcaggccagtacagctatgcaagaaaaagaaataaaa

SEQ ID NO: 1178 - DNA, 560 bp, Homo sapiens
aagtagtctggcaggataattgtgttaaaattgatagcaaattagaatagatggaagcagttacatttagctgggacaaacatatacagtgtttagcaaaggcatatcaacctgaaaatacagacctacaatgaaaatgcatcaactctaattgctatagagttgttatggtagcactataattatagtatatgtgcaagtggtctggataaaaaaaattaggacaatcaaaatatttatactgttccgtagaggaacgggtatgacattgcagtaggcaactttgaattgcctattattgttgcctttacttttggttttgtttatatcagcaagggaaaattactaattctaaatttagtttagaaggaaaaagtatcaaatatttcatgattttgagtaaagaaacataactttcttaaaatggctgtattttaatttttattatatactttattcttttgtctaattgtagataaccaagacacaagttcattagctgatgctgtagagaaagttgcaaagcaacaacaatcacaagcatcagagatagaaaaaaa

SEQ ID NO: 1179 - DNA, 560 bp, Homo sapiens; identical to SEQ ID NO: 1178

SEQ ID NO: 1180 - DNA, 17570 bp, Homo sapiens
gcgcggcgcagagcggcagcaagatggcggcgcaacagcgggactgcgggggtgctgcgcagctggcggggccggcggcggaggctgaccccctaggacgcttcacgtgtcccgtgtgcttagaggtgtacgagaagccggtacaggtgccctgcggacacgtgtaagcggcgagcccgggcctggtcggggggcgcttaactgggaagggaatggagccgaggagcgagatgggtctcagggcgggagccagaggacccacccagaggggcctcccgggggtgtcccccggggctcctaagggccgtgaaagctgccggggcgctcttctgtcccgccccgctcactcctaagtatcccgttcctccgcccgtcttagcggggcagctgctgtctgttgagcgcctgcgatgttccaggcggcctgtcagtctccttcccacacgtgatagtggactcgtgccctgcggggactttaggctccgaagtccgcccttggagagccgacgtttcctttctagtccacgtcgctcttaaagcataggacatttggcgtcgtgtctagctgtggcgagttattctactgtgcactaaagtcgggagaaacgctgaactagactaaaacaacaaaagggaagtctttatggggatctggccagtttgcccttagctgtgaaaggggggtgggagttggcagatgggattgttagcattctacttcctgtgtaggaggtttgtttctttcagttttcaattaagccttcatgacctgaatattgtgaatagagtggttataatgattaaagcagatatgtgtataaatgtccagtccaggtcctgggctgtggccggggctttcgaggttggtcaggttggtcgatttgaatctaagccttgttccatcagacgcacaaacacatctgagttgaaagaattgtagacaacgtggccacctgcttcttgcctcagaattggcttttcctctggcccctctcagtgcttatcgtgggatcaccttggcattggtcttggcagcgggcacagtagccattgcactccatgggcattattctatagccaccctgcagcgggggagggttggcagccattttacaggtgaatacactgagggtccgaggctctcttagggaagggtcaccgtggcctagctcttcccagatgtactgcaggtgaccatttcagtagtccagagaacagtgcttggcacctagctggctgctttttgcttcatcatgttgctttaggctattcatctttgcaattcggttagcctggaactcttccccccacccctcccttttcaggcttcaagtcccaggttaagttacctcaccaaataccatccccatctaaattacttcccccacttcctttctgggacttaacttccttctccttgcttgcacagagcaaaacttaacagctcatgacggagtggccatatctttattgcccctgaactgactggaatggcctctgtgtgccagattttggggtagactctgccttcagagtttacagtccagtgaattgattataaataagtaccaatgactggtcaaactattgtaaaaattcattctgcaagtgggagggtatttcagggatcacacctctgtgcgtggggtgagtgatcaggtaatggttgaatgaactaataagtcgtgtaagcaagcttcacgagagttgaagtggtctttagctttttcattgaatccacttatccttggatcagatttacctgattttggattaattcagtggatttcatttactattaacatttgtaaaaaggctagacccagcacagtttgctaaatgaagagcagcaaaatttgagattttcttgagcttggtgaacctttcctaggtcagagggcaaggaacagtactggttttcaaaccttggctcttctctatcctcgctgtcctagccccacgtgatcagcagttcagtgcaaattgaagacagatggaagcacctctgtgagggcagcccaaatccccgctagctccaaccgactgctttctcctgtgcctagttgatttttaccttttgtgcttggaaagttgagcatcactgcaactctggctggggcattggatttttataaaactttatttcaagccctgaatgactgtgttctccaatctggtagaatacagctggagaaaggcagctggctgggtgcccaagagaagggaatttcttcctagcactgtgacggagtggagcatcggaaggctgaactagaaaagggcgcataagtaggaaatagaaactgaaaagccatcccaggatatttgagttgttcaaaagcaggctggtagtttgggcatgtctcaggcacaaagtgactcgtgaacatttgatagatgagctgtacctgtgtgtgtgcttgagaagagacttcgagctgcttttatctgcatgctgggtttggttccattatactcactggaccctctgtgctctcttgggttcctcttgtcatctgcctttgtgaacaggcaacacaagtgatggccacaggccctgcctgtctctactgcctcatcacttgcccttctcaccatggtctaccgcatcatggcccccaaggtctgcctgccttcctttccagtcctcatttgtgtgtggcgtgatcttggtgtggagctctgcacccagatctgtgtggctgtcctcgtaatcaggtcccacccagctcaaatgccaactcctcagaagcagctttctatgatcaccccagctggtctgtttgccatatttccttcatatttttaatcactatctgaaattaacatttgtgtttcccttcactctagaatgtaagcatcatgagaacagggctttgtcaagtttccattgccctcagtggtgaatgaatagactccctcaccttctctgtacctggtctggaattttgcctaacagcattaacatctaacttaatgacaaggaggaaggagattcttagaggcagtagaaaatggtcaagtgttcagaagatggcctttcattatatatctttagttctttctggcagatttggttatactgtcttaatctatcaggttgggtaagtagcccagggtgtcttctccattctttctgtatgccttatctcagcattaccatcttcctaggcttcaggataggaactcggtcatctttgacttcttttcttcaaagtcagtaagttatcaagtcctcctgattctacctttctgtgaatggtttcctgaattcatcccctgctgcttcagtcagaccctcacaatcctctgcctttagccatctgtttggtttctactttgtctcttctcaccttctcacctaaaaaaaaaaaaaactatagggctgggctcagtggctcacacctgtaatcccagcactttgggaggccaagacgggtggatcaccagaggtcaggagttcgagaccagcctggctaacgtggtgaaaccccgtctctactaaaaatataaaattagctgggtgtggtcatgcgcgcctgtaaccccagccacttgggagtctgaagcaggagaatcgcttggaccggggaggcagattttgcagtgagccgagattgcaccattgcacttcagcctgggcaacagagcacgactctgtctcaaaaaaaaaaaaaaaaaaaaaagtaacaaaactttgttttccatgatagcacagagatatttttctgaaacctggatttggccttgttttgttaataccttccttttaaactcctggctccctactgtttatgaggaaaagtctgttagatttttatttcctcagatacatatcaattttaagcctaaattaggcctagaatagtcttcccttcctctgctagctgacctctttttttaaaatgccagaggggtaatgggccaacatctgtaacaaggttcgagggtggcacatctcacacatgcacatgaacacccagtcctcaggttcatgaactacaaaaggatccatctgaacccttttttttttttttttgagacggagtctcgctctgtctcccaggctggatggagtgcagtggcgcgatcttggctcactgcaagctctgcgtcctgggttcatgccattctcctgcctaagcctcccgagtagctgggactacaggcacccgccaccactcccagctaatttttgtatttttagtagagacggggtttcactgtgttagccaggatggtctcgatctcctgaccttgtgatctgcccgcctcggcctcccaaagtgctgggattacaggcatgagccaccgcgcctggctgagctgaacccttttaaggctgatcagagatgccgtctctgcagtcttcccctccaccccccccttgagacagagtcgcactctgttgcccaggctggagtgtgcagccacctctgcctcccaggttcaagcaattctcctgcctcagcctcccgagtagctgggattacaggcatctgccaccatgcctggctaattttggtatttttagtagagacgggtttcaccatgttggtaaggctggtctcaaactcctgacctcgtgatctgcctgccttggcctcccaaagtgctgggattacgggcgtgagccaccgctcccagccttcactgcagtcttaccagccctttccttctcaggtcactagttgattttccctttatgttcctgtagcgctttgccttcacctgtaatgatagcagctcccgtttgtggtgcgttttgtaagggctggacactctgccaggggtctgctatacaaactgtatcctcccagcagtcctagaggtaggtactactctctccatttcacaaaggaaaaaatggagattcaagaaaccccactgagatccttcagtggcagggcctaaggcttgaagcctcaaccttaacaccttcactgtgtctatcacaggagtttgcatttgtttctgtagttgtgtgttctttgtagtccactcctatccctcattttttctggcttggaaggacttagtatttgaactgggaggagagagcaagttgttttttactccattatccattgatgtctttttaaaagttgatccatatttgtcgtcttgtctccatgatgcgtgacagaggttctctgtatgtcttgttctagcttttgctctgcatgcctgcaggaatgtctgaagccgaagaagcctgtctgtggggtgtgtcgcagcgctctggcacctggcgtccgagccgtggagctcgagcggcagatcgagagcacagagacttcttgccatggctgccgtaagaatgtatgtggaagtgatgtggaagagtccatgtctttccatgataagttggggtaaaacgtacagctgccatgttgttgctgaagttagagcatgactaggtcactaacagcacgcgtgcatgccaattacctgtggtgatggctgggctggtttgttttcataaccttactggtttttgtttctttttttaagagttggttaagtatatattttaggtttgaaagccatagaaatcagttatcccagttttttcctataaaagatcaattatggccaggcgcggtggctcattcctgtaaccccagctctttgggagtccgaggcaagagcttgaggctaggagttaagagaccagcctggacaacatagtgagacctcatctttacaaaaaaataaaattagccgggtgtggtggtatgtacctgtaggcccagctactcaggaggcagaggccagaggatcacttgagcccaggagtttgggattacagtgatctatgatcatgccactgcactccagcctggctgacagcaagaccctgtctcttaaaaaaaagtcaatatgaaatcattggattgtaataacaatagctaacatttgaaatgcatccatgctcttgtataatcagagtcaagtatatttattttcatacctgttataactgctactggaaaggagaaatactgttgtcttattttccaagagatatacacagccttgttgattttagaatcattaaaatttttaaaattgcagaccatacaaaagtacacaataatgtaggcttgttcctcattccagagattacttcaaaattcgttcaacttaaggcctggcaaggtggttcatgcctgtaatcccaacactttgggaggccaaggtgggtggattgcttgagtccaggagttctagaccagcctggacaacatggtgaaacctcggctctactgaaaatacaaaaaactagcagggcatggtggtgtgtgcccgtagtctcaactgttcgggaggctgaggtgagaggatggcttgagcccaggaggcagaggttgcagtgagctgagttcgtgccactgcactccatcctgggtgatagagccggaccctgtctcaaggaaaaaaaaagtgatttaatttcgaaagctgcataacattttctgccctttgacaaacactgtagaatttttaccaaccaagttgtaggatttttgcaaaatgagattatactataatatatatatttcttcaacttttttcacttttttaaatgtacactcattcccaactttttttttccacttttcaggttttttttctcttacatattggacagccttgcatgtcagtttcattatttttaacacttcggtatggatgcccatagtaagaatataccttaccatctccttttcagcgtgatttagtattagggatgcatagtagggccatttcaatgctgaatagggctattttctgtgtcttaattgggggcttcactcttgaggctgggcatggtggctcatgcctatatcctatcatttggagaggccaaggcaagaggatcactgaccccaggagttcgaaatcagcctgggcaacatagtgggactctgtatataccaaaacaaaccaacaaacaaaaccagctgtgtgtagtggtgtatgcatgtagtcccagctccttgggaggctgaggtgggaagattgcttgagcccagaagtttgagagcagcctggggaatatagtggacccagtttctacaaaaaaaggaaaaaaaaattgaggattcctcagtttgtagcttaaagtcaagttcttgagctggaggtgagacaatcatcatggtaagctggagctcaaatattggagcatttttttccccctttgaagtttacttttagaaactcaaaatattgaaatacaattccctactgtcttctttttttttttttttttttttttttgagacggagtctcactctgttgcccaggctggagtacagtggcgtgatctcagctcactgcaggctccgcctgttgggttcacgccattctcctgcctcagcctcctgagtagctgggactacaggtgcccatcaccacgcccagctatatatatatacacacacacacacacacacacacatacatacacacagagatatatatatatatatatatatatatttgtatttttagtagagacagggtttcactgtgttagccaggatggtctcgatctcctgacctcgtgacccgcccgcctcagcctcccaaaatgctgggattataggcatgagccattgcacccggtctcttcatctttatttatgcatgcataatgtggtttttggttttgttttgttttttttctgagacagggtctggctttgttgcccgggctggagtgcaattgcgtggtctcagctcactgaaacctctgcctcccaggctcaaaccatcctcccacctcagcctctcaagtagctgggactacaggcatgtgtcaccacgcctgcctaatttttttgtattttcagtagagacgagttttgcatgttgcccatgctgatctcgaactcgggagcgtgaagtgatggcccacctcagcctccctcaggattacaggtgtgagccaccgtactccgcccatgatgggctttttgtttgttttactgtatgcttttgcttttctccattttcaagattagtgattgtactgttggcatgcctcagaaaatgtttttctttcctttatcttccctcttttcttcaattcttaaaactttctttctttttagaaaacctgtaatgaagcactattctctgggttttcttctctttctgttttactgttgcacagcctagattttatatgaaaggctgggccgggcgtggtagctcacgcctgtaaacccagcactttggcaggctgaggcaggcagatcacttgaggtcaggagttcgagaccagcctggctaacgtggtgaaactccatctctactaaaaatatgaaaattagctgggcctgatggcacacacctgtaatcccagctactcaggaggctgaggtgggagaatcacttgaacccgggaggcggaggttgcagtgagccgagatggtgccactgcacttcagtctgggcgacagagtgagtgagactctgtctcaaaaaaaaaaaaaaagagaatttagattttaaagattatttctcagaggctggtgatagatactttaaccagggttagtggcttttatatgttttacctaaaggatcacttttctctgctgcacataacagaatgtggtttttggcttgctgtaaggagactagtttaaatgctagtatagaaaacttttaaaaacatcctagatttggagcttgtctgtgagcagacagcctatcatgaataggagcaaacctctaggagagttattttagagtggaagtggatatcctgatttagtcgaataaaatagcagccttggtattaatgggaaatctgcaataatcagggtttcagccccatcagcgtagtcaggagtttggtgagattatttgccagggtggtgtaggtctagttttctttgtgcccttgtttgggactatattttgcctgttgcaaggtcctcactaacttatgggctctgattcttcctatttgagttcttcctgtccaagatccggtcccacgtggctacttgttccaaataccagaattacatcatggaaggtgtgaaggccaccattaaggatgcatctcttcagccaaggtaaatgactcagtctccccttaggtggaggtcatctcttgctattaatacaaagaggttgcatgcccaggggtttagttgtatgaattgttatgctggctaaagctgatacaagtattttgggaggagtatgcaagggaggactctggtgttcacttcagatgttagctgagctatattctttttttcttttttgagacagagtctcgctctgttgcccaggctggtgtgcagtggtgcaatctcagctcactgcaacctctgcctcccgggttcaagcgattctcctgcctcaacctcccaagtagctgggattacaggcacctgccaccatgcctggctaaattttgtattttttagtagagacagggtttgtcatgttggtcaggctggtcttgaactcctgatctcaggtgatccgcctgctttggcctcccaaagtgctgcgattacaggcgtaaaccaccacgcccggccagctgagctgttattttcacaacacttgacctgagtctgaagtgatcatcagcatccttatcattacacatttggtgagctttgctcctttttggagtgtactgtggttgaagtttaatggaaaggtactcacagaaaagttttcttttttcctgtgtttcaccttccaggaatgttccaaaccgttacacctttccttgtccttactgtcctgagaagaactttgatcaggaaggacttgtggaacactgcaaattattccatagcacggataccaaatctgtggtgagtaacctttttttttttttttaaacttcattaagggaaaggatcaagcttggagaaaaatgacgggattagtagaatgaactcctgtgtgcccttcacctagattgacagattgttaacattttaccatatttgcttaaccatgctctatagtacacattttttgctgaccacttgggaataagctacagataccatgaccatttttgcaccctgaatacttcgcaccctgatacaggagtgtgtatgtcttaagaacaagaatgttttcttggaaaattatatttttgtgtgtataattaatcatattcaagaaatttaacattgattcaatctaatgtctaatgtgaaattcatgttttaattttaacaattgtaatgtctttcatagcaatttccccctccccccaaggcagaggcagggatggtacacgagttctctgtcctctgggtgctacattaagtcatgtgatgtctgttgttggtaacattaacttggttcccttggtgtccaccaaatttctccatgaagctgccattttatttttggaagtagcttcttcatagttgtggggaaagaggatttaggtgaaattattaggaaaaggcttatcaatccttggacattttactcagatattacctactggcatgtgtagtctcctttaaaaaaaaaaaaatgtaggctgggcacggtggctcacacctgtaatcccagcactttgggaggccaaggcgggtggatcagttgaggtcaggagttcaagatcagcctggctaacatggtgaaaccccatctctactaaaaatacaaaaattagccaggcatggtggcgggcgcctttaatcccagctacttgggaggctgaggcatgagaattgcttgaacctgggaggcagaagttgcagtgaactgagatcctgccactgcactctagtctgggcagcagaacaaaactgcccccccccccccccccccccccaaaaaagtatttgttccatcttagcaatgtgttacctttctctctcaatgtgattgacagaccaggtctttttttatagttaggtgtatacttcctctatagttttaatttttccatttatctcatactgcttctcttgaactacatactctgttgtatgggcagccttcagctccattgctgtaaacagtggtgcagaaattttagaattttaatgagcttttgtgagagtactagggcagctatcaatgctcatcttaagatggaactggccattttgagaaacatatctttgcctgtatctatgtatgtttataagctaaagtcttagatacagattgacttggttaaatgttacttgcactcataattttgttggatactgttattgctgaacttttctggtatggcagcctaattttctgtctttttcccctcctttggcttctgaaatccctctgattatgttgtctatgttgaggccttctcttcagcctttggccctctgttctgtcttcctctccctctgcaagttttttttttttttttttttttttttttttttttttttttgaggcggagtttcgctctgtcgcccaggctggagtgcagtggcgcgatctcgactcactgcaagctccgcctcccgggttcacgccattctcctgcctcagcctcccgtgtagctgggactacaggtgcgcgccaccatgcccggctaatttttgtatttatggtagagacggggtttcaccgtgttagccaggatggtctcgatctcctgacctcgtgatccgcccgtctcggcctcccaaagtgctgggattacaggcgtgagccaccgcgcccggccctctgcaagttcttaactctgcgtttctcccttccctttagaagccatctccttttcagtctctagtcccaccctatgttctagctccccagctacagctgcctgcccaccttttccactcagtcttctaccattccagatttctctcttgtcaatcccctttatcactgtatcttccttgctgtggggtagggttccacctttaagtgggggcacttaggtcttctctctccctggcatgagttttctgcactcactggtctggttgtttacatgtgttgacagtaactgccgccttctggccttttctccgtgctgctgcctctcttctggagcacaatttttttttttttttttttaagacagagtctcactctgtcacccaggctggaggctggagtgcagtggcacaatcttggctcactgcaacctccacttccagggttcaagcgattctcatgcctcagcctctcaggtagctgggactacaggcgtgtgccaccatgcaaggctaatttttgtatttttagtagagaagatgtttcactatgttggccaggctggtctcaaactcctgacctcaggtgatctaccgctttggcctcccaaagtgctgggattacaagtgtgagccactgtgcccggcctggagcactctttcatgtcctctttgcctttccaaatacttcccaatcttcaaaaaccaaatcaaccttttgtgtgagggcttttcagcctgatccccctcttctgagcatttcctttgttaagatgcatgtaaggctgtgttttacttccctgggacattgctcatcggcttattttcttagttttcctcatgcttttggattgtcttgtgtgctggattggaaggccagtctaggccccccaccaggctgactcacttctctgcttacagtagggaatgagaaagggtggtatcatgatttgaactttacccagtcccacgtgtcatttgacttgagctggaaatttgcagtgtttttttgggctgctgatgtgcacaggaaggagttactggccctggacagtatgtcaggaaagctgtcctggaagaaaggaggccagacacaggccacagagggctggtgcaagcttggaaattgggtgcctaagaccttgcttttgtgttgaaaggtttgtccgatatgtgcctcgatgccctggggagaccccaactaccgcagcgccaacttcagagagcacatccagcgccggcaccggttttcttatgacacttttgtggtaagtctggagcctgggctctgatccctcccctgggggagtggcacggctacttcactcttctcaaaaggggaaatggggatccccagtgttgaactttgtcgctgttgtgatgggcttccagtctgtatactggatacagtgataaaggggattgacaagagagaaaagaagactgagtggaagaggcgggcaggcagctgtagctggggagctagatgggcttccagtctgtatactgtagctactatacagtttctattcatgggccaggcaggtggccagagtgacatttatttacttacatgagatggagtcttgctctgtcgcccaggctggaatgcagtggcgtgatctcagctcactgcagcctccacctcccgggttcaagtgattctcctgcctcagcctcctgagtagctgggactacaggcgcatgccaccatgccccattactttttgtactttcagtagagacaggctttcactatgttggccaggctggtctcgaactcctgacctcgtgatctgcccaccttggcctcccaaagtgttgggattacaggcgtgagccaccacgcccggcccagagtgacatttaagaagatgatctgggctgggcgcagtggctcacacctgtaatcccagcactttgggaggccgaggtgggcggatcctgaggtcgggggttcgagaccagcctagccaacatagtgaaatcccgtctttactaaaaatacaaaaaaattagccaggtgtggtggtgggcacctgtaatcctagctacttgggaggctgaggcaggagaatcgcttgaacctgggaggcaaggttgcagtgagccaatatcgtgccactgcactccagcctgggcaacagagcaagactgtctcaaaacaaacaagaagatgatctggtcagtctttgagacagagacagtgatacttgctctttccatctcctagccctgccaccaaatttttgtctacttttcttgtggtttatataatttctgcctgttatagaacttggtttggggacaggtgcggtgcagtggttcatacctacaatcctagcatttttgggaggctgaggcaggtggatcgcttgagctcaggagttcgagaccagcctgggcaacatgggaaaaccttgtctctgcaaaaaatacaaaaagtaaccaggtgtggtggctcctacctgtagtcctagctactttgagggagctgggacaggaggatctcttgagcccaagagacggaggttgcagcaagctgagatcatgccactgcactccagcctgggcaacagaatgagaccctgtctcaaaaaaaaaaaaaaaaaacaaaacacacacacacaacaacaatttggacttgggaggctcaatctcgcatgtccatggggaccataattgaaatgatcctcctgaggatttccaagccaggtggtgcctgactcgttatgctgccatcaccttgttttcctatggaaatgcaggcgcagcattgcctagcttctccaccccccatgcccaagcaggacaggaaaatttcacaggaggtttcacaggttttaattatcttcaaaaatacttcaggtcaaatagcatatatccactagccaaatacggctgtcaggtttatattctttccctagagctggatggtttcaaaggggcacactgttgtcttgccattatagtagtaggtaactttggccaactatatcaagtaaacctcttacttacatatatagatgtcaagttaggattttagagtggtattcggtcttgatggctgaatttcagtatctaagaaagaaagctctctgctaaattgtcataaagaatattttttctcagtctgacagtgtctgaaactcagacttcagaataactgccctttttgttaatgtgacacagatgaattacattcatctgtgtcacattaacaaaaatgactcattaaaaatgagtcctaaaaatgactcattaaagagggctagttgcgctatagtttctgctgtattgtatggctctaaaaatctgattctgtactgtgcactgattccacctctcagaaacaactcttcagctcagtgcatctgcgtgctctgttccgacagacttacaaatgttctgagcacttggtctgtgccagcctccattcgtgtgctgtctgggtttctcaatctccatttaagggaggcatccttaacttcatttaagaatcaggcagcagactgggtgcagtggctcatgcctgtaatctcagcactttgggaggccaaggcgggtggatcacgaggtcaagagattgagaccatcctggccaacatggtgaaaccctgtctctactaaaaacataaaaattagctgggcatggtggcgcacgcctgttagtcccagctactcgggaggctgaggcaggagaatcacttgaacctgggaggcagaggttgcagtgagccaagactgtgccactgcactccagcctggcaacagagcgagactccatcaaataaaaaaaaagagaaggcagcagagacagattaattttcccaaagttacatacctagcatcacaaacagttgcactggggatccggtccctggcaacctgctccggatccagttgctaggctgtcctgcttctactgaaagccagtctttgcatctagaaacagttgctgaggctgcatgtctctttttgcccttaggattatgatgttgatgaagaggacatgatgaatcaggtgttgcagcgctccatcatcgaccagtgagcagagtccgtgcttgctatctgtctcatgttacagagcttccattacatattaaacgtgaaatctatgactcctgtaccttacctgttcaacagacctgaaaatgagccatggcattgggacagggtcacttctgacaggggaagtgggtccccaggtcagcccttctcttccctttgggctcttgccaaagctgtcttcccctactgttaaccttgtttgtcacacggtcgagttcgtattggttctcggctacttcctggagcttctgccgcctcctgtggaagataatctagcttctccacctcttgtttcacactcattcctcccatccagtgtttgtctctcgggtccttcaagccagccaggaccttttctgggtcatgaatagcacaatgaagcaagtgtctcctttccttgtccccaaggtgtgcagactttggcagccgtgcacctgaccagagctgaagctcccgctgggctgtggggttgccagaagctggggttgccatcccggggtacatgtcaccagtcctcttggggttttgtaccatctgatgctggaagttttgattagtgatattttctactactacatatttagagttcactggttcagtcttaaatgcctgcatggtgcctttttaggataaggtataaccatacatttttggtggaagtgtttctgggttagggaagttaaagtctgtttatccgtaagtggggaggagggtcagctaagagaagtgggagggccagagctttttggttctgatttacaaattaatgaagtagtttcaaacaacgcggtcatgtttacctctccatttgggagcctgcctacattcttgttctagaagcacaaaaaatcctcagatgaattagaagaaagaggtttggggactcagcggatactagttcttttaccttctgcttggtaacttagattaaactgagcattgtttttctgtcacaaatgttttccttatgacactggtttcgacatgtaaaatgtgtttgaaaacctgctttgtagatgcagagagaagctataggaaacccagtaccacccctggtctgttctgacgagacatcgttcataaggcacagcacatcgcaagatgaacagttgttaataaaagctgttgctggaaacttgctttaggaacagctcaagaaccttggagttcatatttcacaaatattaataaatataagtccaagagctgtcagcctaatctgtaggagcagaacctctgattgaccaaaaggcatatgggtttaggttggttttttgatgtcatatgtctctgatggggctgcaagtgctacctcgcgcttgtacactgctgctgtggggctccgcgcctgccggtgaagagctgcagatgccgagaagccagcaaacacagggcccactggaaaaaaatagttttttcattagtatttctcgggaggacccaaaagttaaggtcagcttgttcactgtaatttctggaagaagttcactcagaccttcctgaattcagatcatctcagaagtctggagggaaatctggcgaaaccttcgtttgagggactgatgtgagtgtatgtccacctcactggtggcaccgagaaacttacttccttgtattaagtgcacttcttgtatttctaataagatgactttccagaaagtgagatttgttatgttctggcttttaaaaggtaaaatataaataaatttcataacttaatctaagtggtaagctatggttcttgttttcattcaacacatttgccatagcatgggcttggggagtctccagaagatgg

SEQ ID NO: 1181 - DNA, 182 bp, Homo sapiens
gcgctgtcgcccagactggagtgcagtggcaagatcttggctcactgcaagctccgcctcccaggttcaagccattctcctgcctcagcctcccgagtagctgggactacaggcgcccgccaccacgcccggctaattttttgtatttttagtagagacagggtttcaccgtgttagccagg

SEQ ID NO: 1182 - DNA, 113 bp, Homo sapiens
ggagttcaagaccagcctgaccaacatggagaaaccccatctctactaaaaatacaaaattagccaggcgtggtggtgcatgcctgtaatcccagcgactctggaggctgagg

SEQ ID NO: 1183 - DNA, 7057 bp, Homo sapiens
gtcaaatgatttcagttcgtgaagccaaagccattccaaggcctgatggtattgaatggagaaataaatacatctgtgtagaaggtagttttctgtttaccatctacgtatcatcatggtactaagagaattacttgagtaatttcagctgtgtttcagttaaaagtaatacatttatgtctgaagtgatttgtaagtcttttagtttaaaatttttaattttaaaaagtcatttaaaattttttaggtatgagaaataataaacataaactttaggcattcaccctttctagttggtaagattcgagctgtctttatccctcttacttgtggttgatggataatttcatgacttacagatggaagaaaatagaatctttatatgtgattcttatattgacataaaatgagttatattcttttatacttaaaatattagtgcaagttggacttttattaatagaaattgatgttgctttaaaaattaaatgatctgaagaaattttcttctctaaaattaatttacatgtagttgaatatatccttgagacactttgagtgagtagaaaactgacttcaagggacaaaattattctcatagatgctaaattgaaggcctttgtaaatctggaggttaaaaagtataaatagttgagaatcagcatttgtagaaaacatcagattttggatgttttaatcttgaattatatgcagtattttaagagtttgtgaatatgaaattaaatctcctgctttggtgtgctaataaatggcactgggtgggcattattttagttacttgtgttcagttgaatactaaaccctgttctaaagtgctatgatgatgcaattcagtataatttggcatatgaccttattctgttaaggaaaagaaccccacgatactgtgatggtaaactgctttttaacatagcctttctaagcactaaaaaataagcaagaggagtatttaaaattatgggcctgtgtagattatatgacaaatctaaaagttttgacctttccatcagactccctattcttccgtactttttctaggtctttcccctcggttacctttcctcttaccaacaacttcattctttctgcctccagtctttcgctttcagctttaagacatacataggtcttctcattcttgaaaaatactctttatttggtcctactggttcttctgtgcatttttcctcctttttccatgctaaaattcttaatttctagtaatgtttacctactgctggcattatttaagacatttcatctcattcctgatgcctttagttatccttgtcttctcattattatcttcagtttcctcgtactcttctggtttcttcctgtctctctatatggattcttcacttttgtgggtgaaaggtgagtgggatggtggtgtgaacatggaaagtatatatattggagacacacatacataaaaactgttcctttgtttttttcctgtcttctgtttgcttttctctttttctgttttctttttctgccaaatttctcatgcaagttacttcttttttcttttctttgattttttttttttttttttttttttttttgagatggagtctctctctttcgccaggctggagtgcagtggcgtgatctcggctcactgcaacctctacctcccaggttcaagtgattcccctgcctcagcctcccgagtagctgggactacaggcgcgcaccaccatgcccagctaatttttgtatttttagtagaggtggggtttcaccatgttggccaggatggtctcgatctcttgaccttgtgatccacccacctcaggctcccaaagtgctgggattacaggcgtgagccactgtgtctggccagacttcactgtatctttttctaaaccatccacttgggccataactccctgcattgtcttccattttctccagtattgaacctctaccttcaaaggacaaatcagcttttaagttaaaattaaagttacctttctgtgatatttaacattaactgcctctcttcgatataatgctttcttctttttgatgactttttattattttcctaagggtaggtctttgaccctctgtaatttttcagaaaccttatccacatttatgatttagacttaacacacctatgctgatgactttcatttttgatcaccctctcccttgaattctatctaccttattaggcagttcatagtatatcaagcttttctgtatacataaatctaataaagatattaggctgacccatctgaaattgcaatttttgtaggttaaaaactgttaacatattgacagtatcaaacctaaaaaagaaactgtagctctcattttaataatttttcctttacatttgcatttaacattgcagaaccttttgatggaacaaatacagccagagcagtgcacgaaaagcagaaatttgatatgatcaaggatcaatttttaaaggtaaacaatgcattagatcaaccctagaaacattagtagactagtatgctttaaacaggaaaaaatacgtgtgtagtaggacagaatggtttctcttctgtgaatccattaatatagcatgatagagaacttattatttgaatttagttaaacttttccttcaaagagatctggctctgtttttattcacattgctttcactttcatagaaataagcattttctcttttctttttgagacggagtttcactcttgttgcccaggctggagtgtagtggcacagtctcagctcactgcatccttcacctcccaggttcaagggattctcctgcctcagcctcccagatagcttggattacagacgagtgccaccacacccagctaatttttttttttttttttttgtagagacagggtttcaccatgttggtcaggctggtctcaaactcctgacttcaggtgattcacccccgtcttcctcccaaagtgctggtattacaggcatgagccaccatgccctaccgaaataagcattttcgtagtgagcttattaaatttccaaaataagtgaataaaacctaatggactcttttccttccttagtgtattggggaatttattgtggccttagaaggaagctgatgtctgatccatgctttttctaatgtataccccactgtcacaggaattagagtgctgttttatctttgtttatatttaggaaagttaaaatttatgtatatgtctgtgtttatagtatgaatttattcatcagtgatgttgctagatgtggtcttaatcttcagggacttcacaacacattgtagaaatgccttgatatatgtattgagacatggaggggagggaaagctttgtagaagaaaaagatgagagaaccgcaaagatcattttagaggcatactttttcattatctagacattcaagtggactttattttaatgataatttaaaatgcaagtattgaggcatgagtatcactggaaccaggagttcgaggctgcagtgggctattatcaagttgctgcacttcaagcctagacaacagagtgagagactccacctctaaaaaaaaaatgaataaaaataatggccaggtgcaatggttcacacctgtaatccaaacactttgtgaggccaaggcaggaggattgcttgaggccaggagtttaagaccagcctgggcaacgcatagcaagacatagttcacacacacacatgcacgcacatgctcacacacacacacacacacacacacacaccccacctcacctcaccccacccctgggtgtagtggtatgcacctgtgtcttagctactggggaggctgagtggagagaaaagccttgagcccaggaggttgagggtgcagtgagctgtgattgtgccaccgcactccagcctgagcatgagtaatagagtgataccttgtttcaaataaataaataaatagataaaatataagtattctattacaagctgtcgttcaaatgagactttcttaatttggcaaccagaatagaaaatttgtcttatagaaattctttaattttggccgggcgcggtggctcacgcctgtaatcccagcactttgggaggccgaggcgggcggatcacgaggtcaggagatcgagaccatcccggctaaaacggtgaaaccccgtttctactaaaaaaaaaatacaaaaaattagccgggtgtagtggcgggcgcctgtagtcccagctacttgggaggctgagggaggcaggagaatggcgtgaacccgggaggcggagcttgcagtgagccgagatcccgccactgcactccagcctgggcgacagagcgagactccgtctcaaaaaaaaaaaaaaaaaaaaaaaaaaaaagaaattctttaattttaaaacaaatattcaagagagaatatttttgtttatcagattaaattgagaactcaaaattagcaatgctacattggtgttcttattgatgagtgagctttcatttaggattgtttagttgtaaaaccaatacttttagacaatcgaataactgacatgagactagaatacaaagatctgcagtcaccaagtagtgagacagatttttagcttgtgaacaagtttcttttcttctccttatcaattcaaatcaccatttgaattttccagaggcatacataaagtgccttattgtaaatttactctctccttcataaatactatatatttttttgagacagggtcttgctctgttacccagactcaggcagcctcaatctcctgcgctcaatgatcctcccacctcagcctcctgagtgctgggactataggcgtgtgccaccatacccagccaatttttgtattttttgtacagacagggtttcaccatgttgcccaggctggccttcagctcctgagctcaagtgatctgcccacctcagcctcccagaattctggaattataggcatgagacactatacccagtctcataattattgtttttaatgcaaaaagctagtaaagatgtaagacagtcaatcaaataattgaaataatcctctcttctcaaatccaaaggttttgtcttaattaccttgctacttttagattgaattaatccgtgaataaatattaatattgtcagttgtatctttcagtaccacctatgtgcccatttctttattaatgaattggaaccataaaaatatggagtttttaaataacattttcttttctgatgacagaaacaatacttacactgtgttaaaaacttggaaaataaaaacttagccagcctgggcaatacaatgagaccttgtctctacaaaaaaatttaaaaatagctgagcgtgatggcatacgcctgtagtcccagctactcaggaggcagaggtgggaggatctcttgagcctggaaagcggaggttgtagtgagccgagattgcaccactgcactccagcttgggtggcagagtgagaccttatctcaaaaaaagaaaaaatttgaaggaaaaaattattcaaaatttatcacctagagagaaccaactattaacattcttttaaactctcagtcttttgttctgcataaattttaggttttaagaatgatttttctttctctcccagtcatggcacagattgaaaaacaagagagatttgaacagtatactacctgtaagagctgctgtcctgaaaagataactggcctctatttcttaataaattcttccaagaaataaagaacaatagtttcatcataatacattatgtttacctccatcatagttgcttttttcatagttcttgttttcatgttttatttttaaaaagacatataaagattgcatattttattatgacatttcctaataaacccctttgatttaaaaatgtatttttaaaaatgtttacattgatgatgagtaatattgcatgtgttttcaggtgatcagataaaatatattttgggaaattaactgaacaaataaaaagtttttgatataacttcaattaattgtaccacatgctaatcctgaagagatgtgtagaattttggaaagggtctaattcatacatgcttaaagtataacctacgttagatagtttgttgtcaaagtctgttctagtaaagtgaagattcaagtcagttgttcagttacttgaagcaaaacgaaatctttcatttcagtcaaatcactgcagtcatgaaatactgaacaattgccttaagtctttgcttgactcactgggatagactgaggctttgggtgtgtctgtattagcatttcattagtacttcacatgcttttgatgtactcttgagattgctttaaattttgtattgaaacaacaatacattttgcactgtagtaatgggagcactaactcttacaacagttagtgaatcgttttaaagaatcagttcagtgtagacattttgaaaagattgtttcctgtgctttacgatagcttagtgcaatgtgcacttctgttttacttgccattttcctgctctgttttctctgtgacatgaagcaacagaaactgagatcaaagttaagattatatcctgtttgtagtatcagatatttttctgtgtacaattataggattgtaatctaaactggaatttttaggcagtaagtcaccacaaaatgttttagataagacacaataaaattattataaataaaagcttaatgtttgtaaaaaatctcttttttagtatttcttttttcacatgaaagaagtggtggctgctaaaaaaaaagctacagtgtttattaagggtctttttgatttatgtaaatatttgtaaattggtcagtgcctgtaaatttaaatataaaaagtaaccttgaaaacagttttaactttttcaaaagaactatgtccaacattttttagacctgctgtagtacagttttgtacctctaacgtattttttttttgcagaccaaatgctaaaacttttgcttttctttgacttgtaaaaggtgcacattttcattttcttccttaagttcaaatttttgtatgatgtcaaatgcaataaaatttatatatggaca

SEQ ID NO: 1184 - DNA, 4682 bp, Homo sapiens
catttaacattgcagaaccttttgatggaacaaatacagccagagcagtgcacgaaaagcagaaatttgatatgatcaaggatcaatttttaaaggtaaacaatgcattagatcaaccctagaaacattagtagactagtatgctttaaacaggaaaaaatacgtgtgtagtaggacagaatggtttctcttctgtgaatccattaatatagcatgatagagaacttattatttgaatttagttaaacttttccttcaaagagatctggctctgtttttattcacattgctttcactttcatagaaataagcattttctcttttctttttgagacggagtttcactcttgttgcccaggctggagtgtagtggcacagtctcagctcactgcatccttcacctcccaggttcaagggattctcctgcctcagcctcccagatagcttggattacagacgagtgccaccacacccagctaatttttttttttttttttttgtagagacagggtttcaccatgttggtcaggctggtctcaaactcctgacttcaggtgattcacccccgtcttcctcccaaagtgctggtattacaggcatgagccaccatgccctaccgaaataagcattttcgtagtgagcttattaaatttccaaaataagtgaataaaacctaatggactcttttccttccttagtgtattggggaatttattgtggccttagaaggaagctgatgtctgatccatgctttttctaatgtataccccactgtcacaggaattagagtgctgttttatctttgtttatatttaggaaagttaaaatttatgtatatgtctgtgtttatagtatgaatttattcatcagtgatgttgctagatgtggtcttaatcttcagggacttcacaacacattgtagaaatgccttgatatatgtattgagacatggaggggagggaaagctttgtagaagaaaaagatgagagaaccgcaaagatcattttagaggcatactttttcattatctagacattcaagtggactttattttaatgataatttaaaatgcaagtattgaggcatgagtatcactggaaccaggagttcgaggctgcagtgggctattatcaagttgctgcacttcaagcctagacaacagagtgagagactccacctctaaaaaaaaaatgaataaaaataatggccaggtgcaatggttcacacctgtaatccaaacactttgtgaggccaaggcaggaggattgcttgaggccaggagtttaagaccagcctgggctacgcatagcaagacatagttcacacacacacatgcacgcacatgctcacacacacacacacacacacacacacaccccacctcacctcaccccacccctgggtgtagtggtatgcacctgtgtcttagctactggggaggctgagtggagagaaaagccttgagcccaggaggttgagggtgcagtgagctgtgattgtgccaccgcactccagcctgagcatgagtaatagagtgataccttgtttcaaataaataaataaatagataaaatataagtattctattacaagctgtcgttcaaatgagactttcttaatttggcaaccagaatagaaaatttgtcttatagaaattctttaattttggccgggcgcggtggctcacgcctgtaatcccagcactttgggaggccgaggcgggcggatcacgaggtcaggagatcgagaccatcccggctaaaacggtgaaaccccgtttctactaaaaaaaaaatacaaaaaattagccgggtgtagtggcgggcgcctgtagtcccagctacttgggaggctgagggaggcaggagaatggcgtgaacccgggaggcggagcttgcagtgagccgagatcccgccactgcactccagcctgggcgacagagcgagactccgtctcaaaaaaaaaaaaaaaaaaaaaaaaaaaaagaaattctttaattttaaaacaaatattcaagagagaatatttttgtttatcagattaaattgagaactcaaaattagcaatgctacattggtgttcttattgatgagtgagctttcatttaggattgtttagttgtaaaaccaatacttttagacaatcgaataactgacatgagactagaatacaaagatctgcagtcaccaagtagtgagacagatttttagcttgtgaacaagtttcttttcttctccttatcaattcaaatcaccatttgaattttccagaggcatacataaagtgccttattgtaaatttactctctccttcataaatactatatatttttttgagacagggtcttgctctgttacccagactcaggcagcctcaatctcctgcgctcaatgatcctcccacctcagcctcctgagtgctgggactataggcgtgtgccaccatacccagccaatttttgtattttttgtacagacagggtttcaccatgttgcccaggctggccttcagctcctgagctcaagtgatctgcccacctcagcctcccagaattctggaattataggcatgagacactatacccagtctcataattattgtttttaatgcaaaaagctagtaaagatgtaagacagtcaatcaaataattgaaataatcctctcttctcaaatccaaaggttttgtcttaattaccttgctacttttagattgaattaatccgtgaataaatattaatattgtcagttgtatctttcagtaccacctatgtgcccatttctttattaatgaattggaaccataaaaatatggagtttttaaataacattttcttttctgatgacagaaacaatacttacactgtgttaaaaacttggaaaataaaaacttagccagcctgggcaatacaatgagaccttgtctctacaaaaaaatttaaaaatagctgagcgtgatggcatacgcctgtagtcccagctactcaggaggcagaggtgggaggatctcttgagcctggaaagcggaggttgtagtgagccgagattgcaccactgcactccagcttgggtggcagagtgagaccttatctcaaaaaaagaaaaaatttgaaggaaaaaattattcaaaatttatcacctagagagaaccaactattaacattcttttaaactctcagtcttttgttctgcataaattttaggttttaagaatgatttttctttctctcccagtcatggcacagattgaaaaacaagagagatttgaacagtatactacctgtaagagctgctgtcctgaaaagataactggcctctatttcttaataaattcttccaagaaataaagaacaatagtttcatcataatacattatgtttacctccatcatagttgcttttttcatagttcttgttttcatgttttatttttaaaaagacatataaagattgcatattttattatgacatttcctaataaacccctttgatttaaaaatgtatttttaaaaatgtttacattgatgatgagtaatattgcatgtgttttcaggtgatcagataaaatatattttgggaaattaactgaacaaataaaaagtttttgatataacttcaattaattgtaccacatgctaatcctgaagagatgtgtagaattttggaaagggtctaattcatacatgcttaaagtataacctacgttagatagtttgttgtcaaagtctgttctagtaaagtgaagattcaagtcagttgttcagttacttgaagcaaaacgaaatctttcatttcagtcaaatcactgcagtcatgaaatactgaacaattgccttaagtctttgcttgactcactgggatagactgaggctttgggtgtgtctgtattagcatttcattagtacttcacatgcttttgatgtactcttgagattgctttaaattttgtattgaaacaacaatacattttgcactgtagtaatgggagcactaactcttacaacagttagtgaatcgttttaaagaatcagttcagtgtagacattttgaaaagattgtttcctgtgctttacgatagcttagtgcaatgtgcacttctgttttacttgccattttcctgctctgttttctctgtgacatgaagcaacagaaactgagatcaaagttaagattatatcctgtttgtagtatcagatatttttctgtgtacaattataggattgtaatctaaactggaatttttaggcagtaagtcaccacaaaatgttttagataagacacaataaaattattataaataaaagcttaatgtttgtaaaaaatctcttttttagtatttcttttttcacatgaaagaagtggtggctgctaaaaaaaaagctacagtgtttattaagggtctttttgatttatgtaaatatttgtaaattggtcagtgcctgtaaatttaaatataaaaagtaaccttgaaaacagttttaactttttcaaaagaactatgtccaacattttttagacctgctgtagtacagttttgtacctctaacgtattttttttttgcagaccaaatgctaaaacttttgcttttctttgacttgtaaaaggtgcacattttcattttcttccttaagttcaaatttttgtatgatgtcaaatgcaataaaatttatatatggacattgtt

SEQ ID NO: 1185 - DNA, 651 bp, Homo sapiens
gaaattatgcacacataactggccaaatatcagataagtgaactgttaatatatgagagaattttctggacttttaagttattaatctcaattatttgtgtggtgagtactaaattattttctgtttgtgttgatctgtccatttctgtatatagttgtccctcagtatattgagggattgattccaggtcaaccccgtcctcttcagataccaaaatccacagatactcaagtcccttatataaaatggtgtagtgtttgcatatatcctacacacattctcttgatactttaaatcatctctaaattacctgatacgtaatacaatgtaaatgctatgtaaatagttgttatactgtattgtttagggaataataatgacaagacaaaaagtctatacctgttcggtacagatgcaaccattctgcctcctccctaccccctcccaaatatttttcatcctggttgaattcacaaatcctacatggttacggagggttgactgtatttgcatatgttgttaaagtggtgtttaaaatgtgcaatctgtactacaattctaaattttggattgatttgaactaggatctttgcaaataaatctcatagacattaatgtttgtaagaaatttttaattaaatgatggaagg

SEQ ID NO: 1186 - DNA, 807 bp, Homo sapiens
gaaattatgcacacataactggccaaatatcagataagtgaactgttaatatatgagagaattttctggacttttaagttattaatctcaattatttgtgtggtgagtactaaattattttctgtttgtgttgatctgtccatttctgtatatagttgtccctcagtatattgagggattgattccaggtcaaccccgtcctcttcagataccaaaatccacagatactcaagtcccttatataaaatggtgtagtgtttgcatatatcctacacacattctcttgatactttaaatcatctctaaattacctgatacgtaatacaatgtaaatgctatgtaaatagttgttatactgtattgtttagggaataataatgacaagacaaaaagtctatacctgttcggtacagatgcaaccattctgcctcctccctaccccctcccaaatatttttcatcctggttgaattcacaaatcctacatggttacggagggttgactgtatttgcatatgttgttaaagtggtgtttaaaatgtgcaatctgtactacaattctaaattttggattgatttgaactaggatctttgcaaataaatctcatagacattaatgtttgtaagaaatttttaattaaatgatggaaggaacatagaatggctacctgtgattttgattagtgtttaacagattgccacagctgtgattgaattccttttgtactggatgagcatggtcatttgggattactgatggtgaagtctagctggtgttaagagaataaatattgctgatgctaaacct

SEQ ID NO: 1187 - DNA, 12604 bp, Homo sapiens
agtttgaacaactgactcttgatggacacaaccttccttctctcgtctgtgtgataacaggtaccgcctaggaccctgggtgtctgattggttgggggatggcggagggggaggggcacgcagcctttaccctgtgcttcccacgatcttgtctccttaatcttcactgcagctctctgccatagggtcttatactgcttgacatgggggaaactgaggctcagaggatttcacagcagggcagggagcccagatttgaatctgtagataccaaactttctactttttcagtagtttccaagcatcttttttttgttgttgttacatcattggtgtcttttttcttttttttttttgagacagagtctctgtcgcccaggctggggtgcactggtgtgatctgggctcactgcaacctccgcctctcacattcaagcaattctcatgccttagcctcccgagtagctgggactacaggggcccaccacacccagctaatttttgtatttttagtacaaacagggtttcatcatgttggccaggctggtcttgaactcctgacctcaggtgatccacccaccttggcctcccaatatgctcgaattataggcacgaaccactgtgcctggccatgtcattggtgccttaaccaagcctcttttaatttttcaaacggaagaacccctgtcccacagttactgctgctgagccctttcaaggtgactctgaggacggagaaaagcggaagtggtgtgggaagaggcggggtctgggccagctgctggtcctgctctcctccctcctctggccactaggctcccaggagtggtttggagcccacgccatgtgctctgggggctgtggcagggcaggggcggtttggaacctgcgccatgtgctctgggggctgtggcagggcagggggagtcctcgtgtcccctgtgcacaacacagacagaaggctgggtccacccagtgggcggtcgactgccaggccagtgcttaccccgccatgtttgcagcccgaggccagctggctgcaaatgcagggctgtgcgtcaggggtcagagtgcacacacccctgcaggtctaggggctcctgcgttgcttctggaagggcctggatgggacctgactggagcggccgaggggtggagcttctgggaaagggatccctcctcggggggagtgtcttgggcctgaggccaattggcagggacagagacgagtccatggcagtatctgctcttctctgtgaaggcaaagggcctccgagggagtattacagccgcctcatccaccagaagcatttccagcacatccaggtctgcaccccttggctggaggccgaggactacccccgcttctaggtgagaggccagcaggaggctcagggaggaggcggggccttaagcagggggaacaggggtgggcgggatgtactttttctgaaaatgtggctctggaggccacttggggacaggacctgggctctggctgaactcccgggaggaggctacttcctggtgtgccagcccctccctgccaggtggccccagaggccctttaccaaggggtttgaggaggccacgtcctttcagccttccgcgccctccattcagtcctcttccttcctgcaggagggctgggcctggggttggggccactgttgcccaggtgtgggagggcagtggctttgggaggtacagggacgatgtgtgaaacagcgtcgcctctcccagtgagatggttctcctttgcctccgtctctttccccgttgacttctccaagtggggagtcgtggcttggtcctgatgcgtctctagagccacatcttccagcttcgagtgagcagagcagttggaggctgagggccttttcctggcaggactctccagttagtctttgttttagacagtctcgctccgttgcctaggctggagtgcacgatctcagttcatgcaacctccgcctcctgggttcaagcgattctcccacctcagcctcccgagtagattacgggattacaggagcccgccacaacacctggtttatttttgtatttttagtagaaacagggtttcaccgtgttggccaggctggtcttgaactcctgacttcaagtgatcctcctgccttggcctccctaagtgctgggattccaggcgtgacccatcacgcctggccccagctagtctttagaaatgttaagctgtttcactttattttcacactgacagctggtttgtagtgggtgtgctgtggttttttattattattattattattattattattattttgagacagagtttcgctcttgtagcccaggctggggtgcaatggcacgatcttggctcactgcaacctccgccttcccaggttcaagcaattctcctgcctcagcctcctgagtagctgggattacaggcacctgccacgatgcttcgctaattttgtattttttttagtagagatggggtttcaccatgttggccaggctggtcttgaactcctgacctcaggtgttccacccaccttggcctcacaaaatgctgggcttacatgcgggaggtgaacctgggaggtggaggttgcagtgagctgagattgtgccactgcactccagcctgggtgacggagtgagactctgtctcaaaacaaaacaaaacaacaacaaaaaaaccaaattgtggttacgtagaaaaagtgtcaacttacattttcagatgtcccagccaggccatgtggctgcttggccagcttaagccacttgtgcttggggctgtcgggggacttatccgattttcactcccctcgggggatgttgcctcactgtgctgggaggatttgtgttcccagggcagagaccagcgctctgaccgcacccctcttgcccagcagggtcggtggatctgggtgtctgtctgcacacgtcctgcagtggcctggacctgcccatgaaggtggtggacatgttcgggtgctgtttgcctgtgtgtgccgtgaacttcaagtggcaggagcagaacccgaatctttctggggatagcttcacagatccaccgctgaggaggaaacagtgcagagcgagctgcccacagtgaggccctgctcctgggtcagtccagcacacactggaggccacgaggaggagcctgcggttactgtgtctgggctgagcctcactgaagtagttgcttccatttagagctcatgttatatttaggttgatacaaaagtaatcacggtttttgccattaaagatggcaattacttttgcaccaacctaatatgaaaaaaaagcatcttaaatactggaactccactcggggcttttgctcctagagtagaattggcgggaattgcctgcaggcttacatggttttctttgtttctttctctcccaccatgtcctgtttggccaagctcacgtgctgggtttgaatgagttaaatgagtgtcgtgctgtggcctcactgcacccagcgtagacgggcatttggaagggcggtgttagaggagattctagaagcagtagccccagcacaagctgagcccttggcccctgctcaggagccggctcctggatgggagtcagggatgtgagcccctcgtgtgagctgagctcagggaatgtcgggatcaaacctggtgccctagaaaagtcatcttttatgtgctgagccagtccccagggtgttgcctttacttgttccatggccatggaattaagcaaaacatgcaaaaataattcttcagtccttgaagagcatccagcacagaaggtagaaaccctccttaaggctccctcctcaaatcggtttggccatttcgatgtgcacccccccaggcctttatacccttcagatgccaaatctaagaaccagctcccagaaaccacaccccctgttccaacccccagcctggcttgagcatgggttgttggggggagcccaggtgggcaccccaggggtctggtgtcttctccaggcagctctcaggctcccttggttctctctgcagtttacatgagctggtgaaacatgaagaaaatggcctggtctttgaggactcagaggaactggcagctcagctgcaggtagccacatctgccaccacgccagggtggggagggttctggaggctggcaccgagccacgctccctgatccctgcttcccacagccagggtgggaccatgtggggtctggcggaaaagctagggagggagcagaggtcacagagtccggcccactctgctgtcccgtttcggtacagtaagctcgggaaagttaggacacacccccacctgccctctggatttatggagctgacattccacaaatgatgctggagccgggtgggccgggctgcagtttaggaagtgatcagggtcaggtaggtgcgtgggcaaagggagcttctgggaccagccttgaaagatgggtggaattctgcaaaggttacttgtttcttattgctaaaagtaatacatcattcttgccaacagaatgattggcaggattttcagtaaaggtccaggtcagaagtcatttagactgggtcccccagtctctgtcagaaccatggtactctgttgtggtgtgaaagtagccacagatcatctgtcgattaaggggtgtggctttgttcgaataaaactttatttacaaacacaggctgtgggctggatttggcctgcaggctgtagtttgtgatccttgattcagacagtttagcaaggctgaaaagaacaccgacacccccttgttacccacagatgggtgggacttggccggaggccaagaggagggtgctcgcaggggaacatacagcatgtagaggccaggaggtgctccagggcaccaagtgtgggaaagtgggacatacggggaagtttccagaaagcatgatgtcaagttggaggcagagcgctgctggggcatgaagagtctcgagtccaagtgagggagttaggaacttgggaggggttgttgttgggtaggggacctggggtcagccaggtggtgacatgggatggggtggggacaggcaatgaggtaagctctgctctttatttttttgcaggtgcttttctcaaactttcctgatcctgcgggcaagctaaaccagttccggaagaacctgcgggagtcgcagcagctccgatgggattagagctgggtgcagactgtgctccctttggttatggacacataactcctgggccagaggctaaaaccccgggacccctgctgtccttcccacagcttcttctcagagtctcagggcaaatcctttcgagcagcgcctcccagtggccagaagctgaaatgatggcagtagtgccacctggtgaatgaattggttctgtgacccgggaagctgtgcttggctctgatttcttttctggaggctcggaaacacttcctctcttcttctgttcttcacgccccatgcccctgctagcgtattactgttctgtgacttccctgtgacctctgcagtactcctcatcctgcgtttggtctccaggtgtcacctttctgccgtgttcctaacattttgattcctgtcttgaaaaaagcacctgctgcaccataagcccagggatgtggcagctgcagcgggcttggctttgtgaagaaccgagtgtgtccagggatgtggcagctgcagcgggcttggctttgtgaagaaccgagtgtgtccagggatgtggcagctgcagtgggcttggctttgtgaggaatcgagtgtgtccaccgatgtggcagctgcagcgggcttggctttgtgaagaaccgagtgtgtccaccgatgtgacagctgcagcgggcttggctttgtgaagaaccgagtgtgtccaccgatgtggcagctgcagcgggcttggctttgtgaggaaccgagtgtgtccagggatgtggcagctgcagcgggcttggctttgtgaggaaccgagtgtgtccagggatgtggcagctgcagcgggcttggctttgtgaagaaccgagtgtgtccagggatgtggcagctgcagcgggcttggctttgtgaagaaccgagtgtgtccagggatgtggcagctgcagtgggcttggctttgtgaggaatcgagtgtgtccaccgatgtggcagctgcagcgggcttggctttgtgaagaaccgagtgtgtccaccgatgtggcagctgcagcgggcttggctttgtgaggaaccgagtgtgtccagggatgtggcagctgcagtgggcttggctttgtgaggaaccgagtgtgtccagggatgtggcagctgcagcgggcttggctttgtgaggaaccgagtgtgtccaccgatgtggcagctgcagcgggcttggctttgtgaggaaccgagtgtgtccacagatgtggcagctgcagcgggcttggctttgtgaggaaccgagtgtgtccacgttggggggaacatcatacttgatacacacgtttttatttgcacaaagaaaatgctatttttggagccagagttttcatgtctgattgatggcgattttcttaagaaccagaactgctggcagaaagggagcacccacaagcttagatagccgatgtcttatcagagggcagtttgtggttcctgatttggaaattaacattctccaaacattccagtccaatgaaagttttatccgctttcccatataaaaactcttcccacgagagtgacttgattctcacaatcccgttggagtcgtgtgtgagtcctacagtgtgaggttcagcattgccatctccaagtgctcttcgtagggaaacagtttctggtcatgacgaggttccacttcccatctgatcccggcccggcctggaaacagaggacatgtgtttgaagatggcagtgtttggggacaggacatgagcgtattgtgtggggctgctaggacaggcctggcggggtgggggcgtgtacaagtcagtttacttggttcacaggttctcaggcccacccaggtgcctagaattggcctccaggatgggaccagaaatctggttttgcatagaaatggctagcagcaggcaccgtgccgctgtccagtctctgcccgcgtctgcccagcacttggcacagcgggacagacgcagagatctgaacccacacttacctggctgctcagtcaactcactcttcacaaagcttagaaagcggccaggcacagtggttcacgcctgtaatcccaacactttgggaggccggccaaggcgggtggatcacttgagatcaggagttcgagaccagcctggccaacatggtgaaaccccatctctacaaaaatacaaaaattaggcaggcacaatggcgggtgcctgtaatcccagctacttgggaggctgaggcaggagaattgcttgaacccaggaggcagaggttgcagtgagcagagattgcgccactgcactcgagcctgagtgacagagtgagactccatctcaaaaaaaaaaaacaaaatcacacacacacacacacacacacacacacacacacacacacagcttagaaggggctggtgttctcataagcaaagatgtctgaagagccgttagccagaatgattcttttcttttttttttttttttgagatacgatcttgttctgtcactcaggctggagtgcagtggcacagtcattgctcactacagcctcgactcctgggctctagcaatcctcccacttcctgagtagctgggatgacaggtgcatgccaccatgctagtaatttttttattttgtagagatggggtcctgaatgcatggcctcaagtgatgctcctgcctcagactcttttattattttttttttagacagagttttactctgttcccaaggctggagtgcagtggtgcaatctcagctcactgcaatgcatcccaggttcaagtgattctcctgcctcagtctcccgagtagctgggattataggcgtgcaccgccacgcgtggctaatttttgtgtttttagtagagatggggtttcaccgtgttggccaggctggtcttgaactcttgacctcaagtgatccgctcacctcagcctcccaaatcctctgcctcttacagtgttgggattacaggcgtgagacactgtgacacgggatgattttcaatcacagtttttagttacgagtggaaaatgtgtatttataaaaataaagtagtacagacatgaacgtgtagaagtctctataatcctgccatccaaggatggcacctgttaatgtgtatatcagggatgtccaatcttttggcctccctgcaccacattggaagaagaagaatcgccttgggccacacataaaatacactaatgctcgcaatagctgatgagctaaaagaaaaaaaaatcacaaaaaaacctcgtactgttttaagaaagtttacagatttgtgttgggccacagattggacgagcctgctacatatatattctaggttttccccaataggtatacttatgtgaaaatgattattgtgatactttttttttgagatgaagtcttgctatgttgctcaagggggccacaaactcctgggcttaagccatcctcctgcctcagcctcccgagtagctgggactacaggtgtgcgcaaccatgcccggctagtttctgaatgttttgtggagatggggtcccactatgttgcccaggttggtcttgaaatcgtggtgtcaagaagtccccctgccttagcctcctaaagtgctgggttgacaggcctgagccccgcgcccggccagcctcctgtgcgaggttgtgcaggactttgtcgtggaacccagtatgccttcgtgtgctggcttgtttgttggctctgtagttaacgcgctgccccacgtggacaggcattggacccacgtctctgtgtgcaggcagaggctgctgcgcgtgcatctgtgcacatggctgccaggaggggctgtgctcagggtgatctggggcaaaggctggtggcaatggggggcttgggtgtagtgtggaggcacgagagccaggtggccgagctgcagtctgtgggagctcaggggttgcttggcctctgtgtgtcctagtgtctttgtcggtgagatgggacaatgatagcacactctcacaggtgctgggggctgacaaatgtcaggtctgaggacagtggctggcccactacggggacaattccccttctctatagtcaccctgctcgtcttccatcaactgggtgctcaggacagtggcgtggtggatccgcctgtacagcctgtgctccagcgtcctgcaggccacagctgtgtccagccctgaccccgactgcccctcccaccacctccattttatagatgaggaaaccgacgcccaagggcttagggaaccctgctctgaagcacacagtagggctgctgggctcagatcctccctccctgtgctgagctgccctcctcctgccgcaagctcccacgccccaggcccaccctgctcaccggcctctgccctagttccccgcatggtgtgggagtgtggggcatcctagcttttcctcggcccccagttctttcacttccactggagtcccgcagggacagctcggggaccatgcaggcccgggtgggcgtgtgggctcacatagctcggtggtgaacagctggcacgtctctgggttgcggacgataagggccacgtagacttgaggagcccgctggtgctcccggtaggcagccagcctccgcaggaccgcgaccagcgacacgatggattctgggcaatacagcacgtctacggtgaaagcttcaggttactgaaagggaccagcggacagttccaggtcatgctgacctcagcagcagggcgaggccagagaggcagcagtcatatgagactagtagatgccatttgaccatttgggccattagatggaaaggcaattgcttgggtgaaaaaggagaacccttagtagagaaagctgcaaaagaccgaagcaaaagaaaaaaatctccagactcactggtgttccttaaaaaatgagctctggttctcggcctatctagagggctgtgaatgacacaaagcctgaccctgccatgaacttcgtgtttcaggtgtctgccgatttgtctgctggcttgcaggggtgggcctgtgtccctggccaccgctggacctgtgggtttcagggctgggacccaggaccacaggcagagctctgttcaaccagagaggagaccgagtgtgctggcaggggcgaggggttttcggtggcccagccaaacaccaccttctctcaagggccctgtcctcatcccagaagtggttgttttcctcctgtggtctctgaaagacagaggcatggctctgggacagagccatgtggtgatgactgtaatgggagtatgcctgtctccaacaagagggctgtggctggaaggtcaccttaagaggcacccctgtcctttgatgtcaccctggaggcccagagtaactcttctggaagccccatcatgtccatgcccgacagcgtccattgttcccttttcccagagcccagagctgggtagagctgcaaggacaccgcctgcacagagtgcccggggctgggcattgcctgctgcaatgacaacatctggctggatggcagagagctgatggaccgtcgcgacgtcccagtccagctgggccactgtcaccctggggctgtctaagttggcagagatgtctgcctctaatgagaggccattgagaaggacattccctcggagcttctcgaggacctggctgtgacagtcgctgaagatgtatgcctggaggcggcacatcttgcagatggccaggcctgtgaggctggcgccactgccaagctctaggacagtcctggcgggaggaaaggggaccatgtctgtaactgcaccagggtgagcctgcctcggtgtcctgccgtgcgccccgaggtcacctatgagagaaggctgccgggttctcgatggcccattctgccaggtagagggcagcatctcatgtgaccaggcctgtgatgccatgggagatgatggctgtgctctcggagagtgtgactgagcctcccgagggctgcaccaagagagggcgagagagtcagtccagcaatcagaaggcaagtggcttagaagacaagtagccatccaccacatggctgaataaaccatgacaggaccaatcgccactcagcaatgagaagcagctaactgttgacatgccaacagcttgcacgggcctcaagggtgtcacgtggcatgaaagacactcatctcaggccacacaggattccattcatcgaacattcctgagacaacggaattctggtgatggagcacaggtcagtggtggccaggggccaggtgtggctatgaaggggtggctgccttgtgatgattcaatatgctatgtttttcctttgtggttttctgtatctatgttttatcttattttcttttgagctctgtcacccaggctggagtcagtggcacaatcttggctcactgcaacctctgcctcctgggttcaagcaattctcctgcctcagctgcccaagtaggtgcaactacaggcatgtgccaccatgtgtggctaatttttccacttttttttgagacagagtttccctctcgttgcccaggcaggagtgcaatggcgtgatcttggctcactacaacctccacctcctgggttcaagagattctcctgcctcagcctcccgagtagctgggattagaggcacctactaccacacccgctaatttttgtatttttagtaaagacagagtttcaccatgttggccaggctggtctcaaactcctgacctcaggtcatccacctgcctcagcctcccaaagtgctgggattacaggcatgagccaccacgcccggcctgatttttgtatttttagtagagacagggtttcaccatattggccaggctgctcttgaactcctgacctcggatccacccacctcagcctcccaaagtgctgggattacaggtgtgaaccaccacaccaggacctgtcaagtattctttgaggactggacaccaggtccttgtgaagcaggtagagtgtgtcacctattggacaaatgcccaacaaccccatgagacatgctgttgttgttgaagtgcttgatttacagacagggaaactgaggctaaagaaggttgacggacctcatgtctaagactgcagaatgggtgagtcaggatttgaacccacacccacgttttcactttgtgcaggaagggtatctgggctgtgagggggaggagggtgcccttctcataccagcaaatagctcgggtggccctgggtggactccttggccatcagggtctctgccaggtcctcgtacagcttgtccaaaagctctgtgtggacagcctcgtgctggggtcagacagagtgagagcttgtttgctttcgttctaatctgtaaaaatggtcagatgattttcaccaagtttggaggggagatttgggatggaatggtgtaataccagccagctggcatgtaaaatattcacttcattgggcatggtggtgtgtgccgaatagtccc

SEQ ID NO: 1188 - DNA, 2977 bp, Homo sapiens
tttgccattaaaggtggcaattacttctgcaccaacctagtatgaaagaaaagcatcccaaatactagaactccactcggggcttttgctcctagagtagaattggcgggaattgcctgcaggcttacatggttttctttgtttctttctctcccaccatgtcccttttggccaagctcacctggtgggtttgaatcagttaaacgattgtcatgctgtggcctcactccacccagcatagatggctgtttggaagggcggcgttagaggagattctagaagcagtagccccagcacaagctgagcccttggcccctgctcaggagctggctcctggatgggattcagggatgtgagcccctcatgtgaactgagctcaggaaatgtcgggatcaaacctggtgccctagaaaagtcatcttttatgtgctgagccagtccccagggtgttgtctttacttgttccatggccatggaattaagaaaaacatgcaaaaataattcttcagtccttgaagagcatccagcacagaaggtacaaaccctccttaaggctccctcctcaaatcagtttgtccattttgatgtgcacccccccaggcctttatacccttcagatgccaagtctaagaaccagctcctggaaaccacaccccctgttccaacccccagactggcttgagcatgcggtggtggggggagcccaggtgggcaccccaggggtctggtgtcttctccaggcagctctcaggctcccttggttctctctgcagtttacatgagctggtgaaacatgaagaaaatggcctggtctttgaggactcagaggaactggcagctctgcaggtagccacatctgccaccacgccagggtggggagggttctggagactggcactgagccacactccctgatccctgcttcccacagccagggtgggaccatgtgggatctggcggaaaagctagggagggagcagaggtcacagaggccggcccactctgctgtcccgtttcggtacagtaggctcgggaaagttaggacacacccccacctgccctctggatttatggagctgagactccacaaatgatgctggagccaggtgggccgggctgcagtttaggaagtgatcaggatcaggtaggtgggcgggcaaagggagcttctgggaccagccttgaaagatgggtggaattctgcaaaggttacttgtttcttattgctaaaagtaatacatcattcttgccaacagaatgattggcaggattttcagtaaaggtccaggtcagaagtcatttagactgggtcccccagtctctgtcagaaccatggtactctgttgtggtgtgaaagtagccacagatcatctgtagattaaggggtgtggctttgttccaataaaactttatttacaaacacaggctgtgggctggatttggcctgcaggctgtagtttgtgatccttgattcagagagtttagcaaggctgaaaagaacaccgacacccccttgttacccacagatgggtgggacttggccagaggccaagaggagggtgctcgcaggggaacatacagcacgttagaggccgggaggtgctccagggcaccaagtgtgggaaagtgggacatacggggaagtttccagaaagcatgatgtcaagttggaggcggagcgctgctggggcgtgaagagtctcgagtccaagtgagagagttaggaacttgggaggggttgttgttgggtcggggacctggggtcagccaggtggtgacctgggatggggtggggacaggcaatgaggtaagctctgctctttatttttttgcagatgcttttctcaaactttcctgatcctgcaggcaagctaaaccagttttggaagaacctgcgggagtcgcagcagctccgatgggatgagagctgggtgcagactgtgctccctttggttatggacatacaactcctgggccagaggctaaaaccccgggacccctgctgtccttcccgcagcttcttctcggagtctcagggcaaacccttttgagcagcgcctcccagtggccagaagctgaaatgacggcagtggtgccgcctggtgaatgaattggttctgtgacccgggaagctgtgcttggctctgatttcttttccggaggctcggaaacacttcctctcttcttctgttcttcatgccccatgcccctgctagcgtattactgttctgtgacttccctgtgacctctgcagtactccttatcctgcgtttggtctccaggtgtcacctttctgccgtgttcctaacattttgattcctgtcttgaaaaaagcacctgctgcatcgtaagcccagggatgtggcagctgcagcgggcttggctttgtgaagaactgagtgtgtccgcggatgtggcagctgcagcagtcttggctttgtgaggaaccaagtgtgtccagggatgtggcagctgcagcaggcttggctttgtgaggaaccgagtgtgtccacatacttgatacacacgtttttatttgcacaaagaaaatgctatttttggagccagagttttcatgtctgagtgatggcgatttccttaagaaccagaactgttggcagaaagggagcacccacacgcttagatagccgatgtcttattagagggcagtttgtagttcctgatttggaaattaacattctccaaacattccagtccagtgaaagttttatcagctttcccatatgaaacctcttcccttgagagtgacttgattctcacaatcccattggagtcgtgtgtgagtcctacagtgtgaggttcagcattgccatctccaagtgctcttcatagggaaacagtttctggtcatgacgaggttccacttcccatctgatcctggcctggcctggaaacagagcacatgtgtttcaggatggcagtgtttggggacaggacatgagcgtattgtgtgggg

SEQ ID NO: 1189 - DNA, 14129 bp, Homo sapiens
gcgggccagccaagatggcggcctcatgcttggtcctgctggcgctgtgtctgctgctgccgctgctgctgctgggaggatggaagcgctggcgccgggggcgggcggcccggcatgtagtagcggtggtgctgggcgacgtgggccgcagcccccgtatgcagtaccacgcgctgtcgttggccatgcacggcttctcggtgaccctcctggggttctgcagtgagtggccaagggtctgggagggacgatgctctctcagccgttgatcctcggttctaaccgccccggggagtcgaggcggaagtgctcctttagtcgccgcctttgggcagctctccgagattagacgagcggttctgccccagcctttcctgggtgggtctctaggtatagccggcgttaatcttgccacgtgtcagaagtgtgttaagtgaatccattgcgtggtctcacgtaattctcctagtaagtggaacccaggtgcgtggaactccagggctagtgctggtagctacgtccctgtgcagctacccttgtcaggctatgtctgagctgacaggatatttcattcctcatccctcaacgcagagctctgcagacagatgttttcatttgttcttcatgtccagcttttccccacagtgtgcagggcagcggtgtctgctccctcattattctccacgttggtatcttgagagggtagctcaaccccatctcaggaagaagtgggaacagcactagttgcctttaatccctgtttagaatctgctatcctagggtgatggggtagagtgggacttcctagggatggctctgtggtgggaaaattccactatccagacaatctagattagtttaattgagcacctactgtttgccaggcatcatgttaagtgaaggtaggtaagattcaggccctatctctgtgtgcctcctagagcaatctgaacaagaattggccgcattctctgttctggctagtgaggagcagagagaggttttgaaatatcttactttccaaaacactgtccgtgattcagcctgagttgggagattatctgactttagattgctgcttctggtacattaaagggatcattctcatttttcagactccaaaccccatgatgagctcttgcagaacaacagaattcagattgtggggttgacagaacttcagagtcttgcaggtaggatgccgtcaactccagaatcctctgaatccatgggctgggggcagggggtgttcgtttgaaaagccgtgcagattgccagacgctcctttggtagtcacaggtgttttctgacttgcagttgggccccgagttttccagtacggagtcaaagttgtacttcaggctatgtacttgctgtggaagttgatgtggagggagccaggtgcctatatctttctccaggtgtgtatcagcctctgcctccctctgtgagagccatgttagcagtttactttccagcacaaattggtactatattgcatattcatatgtgtgtgtgttgtgtgtatgggcgtttaaagacatgagtaggagcctatggtatgtgtctatttatggcacctatccatgctctctgtgtcattacagatagtcttacattgtactgactgtgtatcaagtgttttccatgtattaactcatttagtcctcacagttaccctaagaaatattgcatgtaggtaatacaagaacctgtttcttaaggttgttctcatttagatgagaaaacctagactgagaaaggctctgtaagtagcccatcgccatacagctaggaagtggtggaatcaggatttgaacgtaggtcgtcagtgtggttctatagtatacacacgcacgcatacgcgcgcacacacaaacacacatatatttttttgagacagagtttcgctcttgccgcccaggctggagtgcagtggcgtgatctcggctcactgcaacctctgcctgccgggttcaagtgattctcctgcctcagcctcctgagtagctgggattacaggtgcccgccaccacgcccagctaatttttgtatttttagtagaaatggggttacgccatgttggccaggctgttctcgaactcctgacctcaggtaatccgcccccctcggcgtcccaaagtgctgggattacaggcgtgcgccaccgcgcctggcctatcgttatacttttaatcccttcccttgatcactttttctttaaaaaatttttctttcttttctagctgaaggaagaatacttttttttttaaatcaatttttaatatatagaagcaccttcctcttttatttatttatttttatttttcctgagatggagtctctgttgctcaggctggagtgcagtggtgcgatcttggctcactgcaccttctacctcccgtgttcaagtgattttcctgcctcagcctcctgagtagctgggattacaggcatgtgccaccatgcctggctaatttttgtaattttttttagtagagatggggtttcgctatgctggccaggatggtcttgaactcctgacctcaggtgatccacctgcctcggcctcccagattgctgggattacaggcatgaaccatcgtgacccacaccttcctcttttaataggcagccttgaattccaatatgtgatgtactatactgcatgtatttagtctcatgttaatggatactcagattcttcctgattttgtttttacttttacaaatagtgtggctccaagcacagcgagcatatgccttttgtataagtccagtttctttcttagggtaacttcccagcagtggaattgtgtagtcaaagttgatgcattttaaaaatgtgtatgttactggatagctttagagtaaggttgggtcagtttggcccccgctgagtgggggtacctcttctcccccatgcttaccatcaccagctgttgttagacctttttagaatttgcattccaacaggtgaaaaatgccatctctttgttctgttttttgcctccttgattattgatgatcttggacttttcaggttggttctgtttgtttgtttggtttttgtttgtttgttttagaggcagagtctagctctgtcgcccaggctggagtgcagtggcacaatcatagcttaactgcagcctcatcctcctgggctcaagtgatcctacctcctcagcctcctgagtagctggggctgcaggtgtgtcccaccacacctggctaatttttaaattttttgtagagatgaggtctcactgtgtttcctaggccggccttgaactcctgggctcaaatgatcctcctgccttggcctcccaaagtgttgggattacaggcatcagccaccgcacctggcccattctgtttcttttatgactttttacatctattttggtggtggagagggtctttcttctgcttattatcaagagctctgtaaagataacagactcatcaccatgtgtgttgtgactatttttactgggtttattgcctagcatggtctgggtttcctccccttcaagtctctatctttcctagaaccccccaggtctgcctagcattgctgtctgctggttcgtgggctgcctttgtggaagcaagctcgtcattgactggcacaactatggctactccatcatgggtctggtgcatggccccaaccatcccctcgttctgctggccaagtggtgagagtctaggaagagggtaaaataccgtcccctaaaccactcaaggatgagtgagaagaagggccatagtgggcctccggaagtcggttccttgtgggctctgcaggaggtggggtgaggctggtgaatcaggccgaatgctggttccaaatgatagaaacaggcctcagcaaaggaccacattttttggcccatgaaatggaagtgtctgtggaaatggttggtttcgagctcagcagtgtcactgggacccagctcacgtctgtctccacactcccttctggtggtggttcccggaactctcctagctcttgtcctcacgtaggctcattggggagggcagccctttctgattggctcatgtaggttacctgccttcctctgatctgcctgttgaggccagggggcaagtgctccagcagaagagctgggtctcaggagcatccatatctcatggacagagggtgggtgagggcagatccccaaattaaaacccagggctgctgttggtagctggagaagtgggccacagttgctgcagctgatgtgacagggagggaagaagggccagtggtagcagtgggacgtggagctgggaaggtcatctgctgtcctctgagcccaactataacatctctgttatactctgcacggccagccttcaggtgcacatccagcctccgtgtgcatgtccagctgctgcgtgtacttccggccttgggccattggctggctgtggccttcgccctgatagtttgttcactggcagtggtgacagcagcagcaaacagcttagttgagcaaatggagcagaatggtcaatggtgagcacctgctgcatgccagtcctccatccaagccctttttgtattttaccctgttcaatctctatgcacctcaggagggtgtaccttttacaagtcaggaaactgaggctgagaacgattatgcctcttgccacacagctaagtgtgaggaccaaaatatcccaggcaagcccatttccgagctttctctgcatcttgagaggaacaggcgatgataccctggcggtgataaataacccagaatcgcgcatgccgtgttccggctctaccctgcgatcagggctcagtctccgttaggagagaatgtgtacaatgctcactgaatccctttgccccacgttgagagcaagccgtgaccttacagcctttgcagtggtagcacagggtggctgagatcgctagtgaggccttcattgtatttcttccttttttttttttttttttttttgagacagtctcactctatgtcccagactggagtgcaatggcgccatctcggctcactgcagcctccgccttctgggttcaagcaattctcctgcctcagcctcctgagtagctgggattataggcacccaccaccacgcctggctaatttttgtgtttttagtagagacagggtttcaccacgttggccaggctggtctcgaactcctgacctcaaacgatccacctcccaaagtgctgggattacaggcatgagccaccgcgcctggcctgtatttcttccttttacagcaagagagaggatgttcactttggcagtgatacacagtgtccttctatttatttttttaaatttgtatttatttatttatttatttgagacggagtcttgctttgttgcccaggctggagtgcagtttccttttaaagtgattgtatttaagccaacaagtgacacaacataaaggagggtatatacagcataaagaaagaacactggcacagctggggctcagggagctcaaactctcccagctctgcggccttttctctgttgagggatgtcgagtcacgctgtggtggtagcggaggcctgtctagggctctgctgactgctgatctctcttttcaggtacgagaagttctttgggcgcctgtcccacctgaacctgtgtgttaccaatgctatgcgagaagacctggcggataactggcacatcaggtaccatggcctgggatgacggcggcctgggagaggcgcggggcccctgattggctgcagtgagagctgccttgcctgctgccgtcctgctgaggggcaatttgaaatactgagggcctgggaggtggtctttggtttggggaagctgggggaggagggggcagagtttctttcttagccagccagggggtccaggcagttttggtcctaggacgtctctctgtgcattcccaagtaattgcaaggcttcttcttgtcatcatctgagacttggattccccaagcgtccttcttttcctggagcctctgagtcctctgttcctgaggcctttcttcagccctcccaatagccccgtcatgatttcattgcagggctgtgaccgtctacgacaagcccgcatctttctttaaagagacacctctggacctgcagcaccggctcttcatgaagctgggcagcatgcactctccgttcagggcccggtaggcctcccatcctcagctgccttctctcctgctcgccactgccctggcctctccccttctcactgcagacctgggaacccactcatccaggggttggcaaactaaggctacaggccagtctgctgcttttgtaaatcaagtttcactgggacacaacacactcattgccttctgagttgtctacagccgcctttgagctgcaatagcagaatcgcgttttgcaacagagaacctgtggcccgcaaagcctgaagtatttactctctggccctttaagaaatgtttgtggacccctgcgctgtcttactctcctgccagtggcttcccaggcctgtggcaggatctgtggacctgtgtgtcccctggggtgtctcatggggctaaggaggggacctttgtgcaggtctacgcaccctgaggtgtgccctgggtaagctggggtggtgtgggagggcgtccctgcaccctcatcttgagtccaggggatgataagacagtaagtcccgtggagaaaaggaatgagtcagtcttgtttgctgttgtaaccttagcacccagcaacaatattagagaaagcaagcccaggcctcagatggcaggggtggcctggtgctgctgatgtggctgggcaccccaacctctgggagcctgcaggcctcgccacggcaggagatgcctctcctgggtcccgggcctgctctatggcctctcacaggctttttttctgctccttcagctcagaacctgaggacccagtcacggagcggtcggccttcacggagcgggatgctgggagcgggctggtgacgcgtctccgtgagcggccagccctgctggtcagcagcacgagctggacaggtctgcaggacccctggggcacttggggttggtgtgacgggcacctggccaacctgtgttctcctcacccctgccagtcctgcatgctcccaccctgccacggtctcaatgagaacgggagggcctgtgagctggaagaggggtgtctagaaacaggcccctgacattcaattctcttctcatagaggacgaagacttctccatcctgctggcagctttagaaagtaggtgtgtggctgcggtgaggagctctgggcttgtcgggggccactgagctgtaagctgcttgcctggcctgcagcatgttcctgtcccaggccactgggtggggcagcctggggacagcgggggtggtggaagtgggccgccctgaatccccagttgggtcattgagtgaccaggccctcaggctgaaatgccccctccaggagagtatctcacacaggctggtggcctccccgccagagcagtgctctttctccacctgaccaggtgactctggctattgtttatttaaaaatttttttctgaatgggcatggtggctcaaacctgtaatcctagaactctgggaggccgaggcaggcagatcatctgaggtcaggagttcgagaccaacctggccaacagggcgaaacctgtctctactaaaaatacaaaaattagctaggtatggtggtgggcgcctgtcatcccagctacttgggaggctgatgcacgagaattacttgaacccaggaggcagaggttgcagtgagctgagatcgcgccattgcattccagcctgggtgacagagtgagagtctgtcagaaaaaaaaaaaaattctatcagaaattccatgtagaattgtttctttttctaaacacagagtttgaacaactgactcttgatggacacaaccttccttctctcgtctgtgtgataacaggtactgcctgggaccctgggtgtctgtttggttgggggatggcggagggggaggggcacgcagcctttaccctgtgcttcccatgatcttgtctccttaatcctcactgcagctctgccatagggtcttatactgcttgacatgggggaaactgaggctcagaggcagggcagggagcccagatttgaatctgtagataccaagctttctactttttcagtagtttccaagcatcttttttttgttgttgttacgtcattggtgtcttttttttttttttttgagacagagtctctgtcgcccaggctggagtgcagtggtgcgatctcggctcactgcaacctccgcctcccacattcaagcaattctcatgccccagcctcccgagtggctgggactacaggtgcccaccacaactgcctaatttttgtatttttagtagagacagggtttcaccatgttggccaggctggtcttgaactcctgacctcaggtgatccacccgccttggcctcccaatatgctggaattacaggcacaaatcactgtgcccggccatgtcattggtgccttaaccaagcctcttaatttttcaaacggaagagcccctgtcccacagttactgctgctgagccctttcaaggtgactcagtgaggagggagaaaagcggaagcggtgtgggaagaggccgggtctgggccagctgctggtcctgctctcctccctcctctggcctctaggctcccaggagtggtttggaacccgcgccatatgctctgggggctgtgccagggcaggaggagtcctcgtgtcccctgtgcacaacacagacaaaaggctgggtccacccagtgggcggtcgggtgccaggccagtgcttaccccgccatgtttgcagcccgaggccagctggctgcaggtgaaaggctatgcgtcaggggtcagggtgcacacacccctgcaggtctcagggctcctgggttgcttctggaagggcccggatggggcctgactggagctgctgaggggtggagcttctgggaaagggatccctcctaggggggagtgtcttgggcctggggccacgtggcagggacagagatgggtccatggcagtgtctgctcttctctgtgaaggcaaagggcctctgagggagtattatagccgcctcatccaccagaagcacttccagcacatccaggtctgcaccccctggctggaggccgaggactaccccctgcttctaggtgagaggccagcaggaggctcagggaggaggcggggggaacagggtgggcgggatgtactttttctgaaaaggtggctctggaggccactgggggacgggacctgggctctggctgaactcccaggaggaggctacttcctggtgtgccagcccctccctgccaggtggccccaggggccgtttaccaaggggtttgaggaggccacgtcctttcagcctgccacgccctccattcagtcctcttccttcctgcaggagggctgggcctggggttggggccactgttgcccaggtgtgggagggcagtggctttgggaggtacggggacgatgtgtcaaacagcgtcgcctctcccagtgagatggttctcctttgcctccgtctctttccccgttgatttctccaagtggggagtcgtgccttggtcctgatgcgtctctagagctgcatcttccagcttcgagtgagcagagcagttggaggctgaaggccttttcctggcaggactctccacctagtctttgttttagacagtctcgctccgttgcctaggctggagtgcatgatctcagttcatgcaacctctgcctcctgggttcaagcgattttcccacctcagcctcccgagtagattacgggattacaggagcccaccacaacacctggcttatttttgtatttttagtagagacagggtttcaccatgttggccaggctggtcttgaactcctgacctcaagtgatcctcctgccttggccttcctaagtgcttggattccaggtgtgacccatcacgcctggccccagctagtctttagaaatgttaagctatttggctttattttcacagtgacagctggtttgtggtgggtgtgctgtggtttattattattatcattttgagatggagtttcgctcttgtagaccaggctggagtgcaatggtgtgatcttggctcacgcaacctccgccttcccgggttcaagcgattctcctgcctcagcctcccgagtagctgtgactacaggcgcctgccacgatgcttggctaattttgtattttttttagtagagatggggtttcaccatgtgggccaggctggtcttgaactcctgacctcaggtgatctgcccgccttggcctcccaaaatgctgggattacaggcaggaggtgaacctgggaggtggaggttgcagtgagctgagattgtgccactgcactccagcctgggtgacagaatgagactctgtctcaaaacaaaacaacacaacaacaaaaaaaccaaattgtggttacgtataaaaagtgtcaacttacattttcagatgtcccagccaggctgtgtggctgcttggccagcttaagccacttgtgtttggggctgttgggggccttatctgattttcactctccttgggggatgctgcctcactgtgctgggaggatttgtgttcccagggcagagaccagtgctctgacccacccctcttgcctagcagggtcggcggacctgggtgtctgtctgcacacgtcctccagtggcctggacctgcccatgaaggtggtggacatgttcgggtgctgtttgcctgtgtgtgctgtgaacttcaagtggtaggagcagaacccaaatccttctggggatagctttgcagatccaccgctgagggggaagcagtgcagagggagctgcccacagtgaggccctgcccctcggtcagtccggcacacactggaggccatgaggaggagccctgcggttactgtggctgggctgagcctcactgaagtagttgcttccatttagagctcatgttatatttaggttggtacaaaagtaatcatggtttttgccattaaaaatggcaactacttttgcaccaacccaatatgaaaacaaaaagcaccttaaataccagaactccactcggggcttttgctcctagggtagaattggtgggaattgcctgcaggcttacatggttttctttgtttttctctcccaccatgtcccttttggccaagctcacatggtcggtttgaatcagttaaatgagtgtcatgctgtggcctcactgcacccagcgtagacgggtgtttggaagggcagtgttagaggagattctagaagcagtagccccagcacaagttgagcccttggcccctgctcaggagccggcccctggatgggatttagggatgtgagcccctcgtgtgagctgagctcagggaatgtcgggatcaaacctggtgccctagaaaagtcatcttttatgtgctgagccagtccccagggcgttgcctttacttgttccatggccatggaattaagaaaaacatgcaaaaataattcttcagtccttgaagagcatccagcacagaaggtacaaaccccccttaaggctccctcctcaaatgggtgtggccattttgatgtgcacccccccaggcctttatacccttcagatgccaaatctaagaaccagctcccggaaaccacaccccctgttccaacccccagcctggcttgagcatggggtgtgtgggggagcccaggtgggcaccccaggggtctggtgtcttctacaggcagctctcaggctcccttggttctctctgcagtttacatgagctggtgaaacatgaagaaaatggcctggtctttgaggactcagaggaactggcagctcagctgcaggtagccacgtctgccaccacgccagggtggggagggttctggagactggcaccgagccaggctccctgatccctgcttcccacagccagggtgggaccatgtggggtctggcggaaaagctagggagggagcagaggtcacagaggctggcccactctgctgtcccgtttcggtacagtaggctcgggaaagttaagacacacccccacctgccctctggatttatggagctgacactccacaaatgatgctggagctgggtgggccgggctgcggttgaggaagtgatcaggatcacgtaggtgggcgggcaaagggagcttctgggaccagccttgaaagatgggtggaattctgcaaaggttacttgtttcttattgcaaaaagtaatacatcattcttgccaacagaatgattggcaggattttcagtaaaggtccaggtcggaagtcgtttagactgggttccccagtctctgtcagaaccatggtactctgttggggtgtgaaagtagccacagatcatctgtagattaaggggtgtggctttgttccaataaaactttatttacaaacacaggctgtgggctggatttggcctgcaggctgtagtttgtgatccttgattcagacagtttagcaaggctgcaaagaacaccgacacccccttgttacccacagatgggtgagactgcgttggccagaggccgagaggagggtgctcacaggggaatgggcagcacgtagaggccgggaggtgctccagggcaccaagtgtgggaaagtgggacatgcggggaagtttccagaaactgtgatgtcaagttggagtcggagtgctgctggggtgtgaagggtctcgagtccaagtgagggagttagggacttggaggggttgttgttgggtcgggaacctggggtcagccaggtggtgaccctggatggggtggggacaggcaatgaggtaagctctgctctttatttttttgcagatgcttttctcaaactttcctgatcctgcgggcaagctaaaccagttccggaagaacctgcgggagtcgcagcagctccgatgggatgagagctgggtgcagactgtgctccctttggttatggacacataactcctgggccagaggctaaaaccccaggacccctgctgtccttcccgcagcttcttcttggagtctcagggcaaaccctttcgagcagcacctcccagtggccagaagctgaaatgacagcagtggtactgcctggtaaaagaattggttctgtgacccgggaagctttggttggccttgatttcttctctggaggcttggaaacgcttcctctcttcttctgttcttcacgccccatgcccctgctagcgtattactgttctgtgacttccctgtgacctctgcagaactcctcatcctgcgtttggtctccaggtgtcccctttctgccgtgttcctaacattttgattcctgtcttgaaaaaagcacctgctgcaccgtaagcccagggatgtggcagctgcagtgggcttggctttgtgaggaactgagtgtgtccacgttgggggaacatcatacttgatacacacgtttttatttgcacaaagaaaatgctatttttggagccagaattttcatgtctgatttatggtgattttcttaagaaccagaactgctggcagaaagggggcacccacacgcttagatagccgatgtcttattagagggcagtttgtggttcctgatttggaaattaacattctccaaacattccagtccaatgaaagttttatccgctttcccatataaaaattcttcccatgagagtgacttgattctcacaatcccgttggagtcgtgtgtgagtcctacagggtgagattcagcattgccatctccaagtgctcttcgtagggaaacagtttctgctcatgacgaggttccacttcccatctgatcccggcccggcctggaaacagagcacatgtgtttgaggatggcggtgtttggggacaggacatgagggtattgtgtggggctgctaggacaggcctggcggggtaggggggtgtccaagtcagtttacttggttcacaggttcccaggcccacccaggtgcctagaattggcctccaggatgggaccagaaagctggttttgcatagaaatggctagcagcaggcaccgtgccgctgtccactc

SEQ ID NO: 1190 - DNA, 6480 bp, Homo sapiens
agtttgaacaactgactcttgacggacagaaccttccttctctcgtctgtgtgataacaggtactgcctgggaccctgggtgtctgtttggttgggggatggtggagggggaggggcacacagcctttaccctgtgcttcccacgatcttgtctccttaatcctcactgcagctctctgccatagggtcttacactgcttgacatgcgggaaactgaggctcagagggtttcacagcagggcagggagcccagatttgaatctgtagataccaagctttctactttttcagtagtttccaagcatcttttttttgttgttatgtcattggtgtcttttttttttttttgagacaaagactctgtcgcccaggctgggatgcagtggtgcgatctcagctcactgcaacctctgcctctcacattcaagcaattctcatgcctcagcctccagagtagctgggactaaaagtgcccaccacacccagcttatttttgtatttttagtagaaacagggcttcaccatgttggccaggctggtcttgaactcctgacctcaggtgatccacccgccttggcctcccaatatgctgaaattatagatatgaaccactgtgcccggccatgtcattggtgccttaaccaagcttcttttaatttttcaaacagaagagcccctgtcccagttactgctgctgagccctttcaagatgattcagtgaggagggagaaaagcggaagcggtgtgggaagaggcggggtctgggccagctgctggtcctgctctcctccctcctctggcctctaggctcccaggactggtttggaacccgcgccatgtgctctggaggctgtggcagggcaggtgcggcttggaacccgcgccatgtgctctgggggctgtggcagggcaggggcggcttggaacctgcgccctgtggtttgggggctgtgccagggcagagggagtcctcttgtcccctgtgcacaacacagacagaaggctgggcccacccagtgggtggtcgcgtgccaggccagtgcttaccccgccttgtttgcagcccgaggccagctggttgcaggtgcagggctatgcatcaggggtcagggtgcacatacccctgcaggtcttggggctcctgagttgcttctggaaaggcccagatagggcctgactgcagctgccgaggggtggagcttctgggaaaaggatccctcctaggggggagtgtcttgggcctggggctatgtggcagggacagagacgggttcatggcagtgtctgctcttctctgtgaaggcaaagggcctctgagggagtattacagccgcctcatccaccagaagcatttccagcacatccaggtctgcatcccctggctggagggccgaggactacccccgcttctaggtgagaggccagcaggaggctcagggaggaggcggggccttatgcagggggaacaggggtgggcggggtgtaccttttctgaaaaggtggctctggaggccacttggggacaggacctgggctctagctgaactcccgggagaaggctacttcctggtgtgccagcccctccctgccaggtggccccagaggccctttaccaaggggtttgaggaagccacgtcctttcagcctgccacgccctccattcagtcctcttccttcctgcaagagggctgggcctggggttggggccactgttgcccaggtgtgggagggcagtggctttgggaggtacagggacgatgagtcagacagcgtcgcctcaccagtgagatggttctcctttgcctccgtctctttccccattgatttctccaagtggggagtcgtggcttgttcctgatgcgtctctagagccacatcttccagcttcgagtgagcagagctgttggaggctgagggccttttcctggcaggattctccagctagtctttgttttagacagtcttgctccgttgcctaggttggagtgcatgatctcagttcatgcaacctctgcctcctgggttcaagcaattctcccacctcagcctcccgagtagattacaggattacaggagctctccacaacaccttgcttatttttgtatttttagtagagacagggtttcaccatgttggccaggctggtcttgaactcctgacctcaagtgatcctctcgccttggcctccctaagtgctgggattccaggtgtgacccatcatgcctggccccagctaatctttagaaatgtttagctatttggctttattttcacactgacagctggtttgtggtgggtgtgctgtggtttattattattattattattattattattattattttgagacggagtttcgctcctgtagcacaggctggagtgcaatggtgcgatcttggctcactgcaacctcttctttcccaggttcaagtgattctcctgcctcagcctcctgagtagcggggattacaggcacctgccatgacgcttcgctaattttacatttttttttttagtagagatggggtttcaccatgttgaccaggctggtcttgaactcctgacctcaggtgatccgcccgccttggcctcccaaaatgctgggattacaggtgggaggtgaacctgggaggtggaggttgcaatgagctgagattgtgccactgcactccagcctgggtgacagagtgagactctgtctcaaaacaaaacaacaaaaaaatcaaattgtggttacgtagaaaaagtgtcaacttacattttcagatgtcccagccaggccgtgtggctgcttggccagcttaagccacttgtggttggggatgtcgggggccttatccaattttcactcccctcggggggtgttgcctcactgtgctgggaggatttgtgttcccggggcagagaccagcgctctggccacacccctcttgcctagcagggtcggtggacctggatgtctgtctggacacgtcctccagtggcctggacctgcccatgaaggtggtggacatgttcaggtgctgtttgcctgcgtgtgccgtgaacttcaagtggtaggagcagaacccgaattttttctggtgatagcttcacagatccaccgctgagggggaagcagtgcagagtgagctgcccacagtgaggccctgcccctcggtcagtccagcacacaatggaggccacgaggaggagccctgcggttactgtgggtgggctgagcctcactgaagtagttgcttccatttagagctcatgttacatttaggttggtacaaaagtaatcacggtttttgccattaaaaatggcaattacttttgcaccaacccagtatgaaaaaaaaaaagcaccttaaataacagaacttcactcggggcttttgctcctagagtagaattggcgggaattgcctacaggcttacatggttttctttgtttctttctctcccaccatgtcccttttggccaagctcacgtggtgggtttgaatcagttaaatgagtgtcatgctgtggcctcactccacccagcatagacgggtgtttggaagggtggagttagaggagattctagaagcagtagccccagcaaaagttgagcccttggcccctgctcaggagccggcccctggatgggattcagggatgtgagcctctcgtgtgagctgagctgagggaatgtcgggatcaaatctggtgtcctagaaaagtcatcttttatgtgctgaaccagtccccagggggttgcctttacttgttccttggccatggaattaagaaaaacatgcaaaaataattcttcagtccttgaagagcatccagcacagaaggtacaaaccttccttaaggctctctcctcaaatcggtttgaccattttgatgtgcaccccccccaggcttttatacccttcagatgccaaatctaagaaccacctcccagaagccacacaccctgttccaacccccagcctggcttgagcgtggggtgggtgggagcccagctgggcaccccaggggtctagtgtcttctccaggaaactctcgggctccttttgttctctctgcagtttacatgagctggtgaaacatgaagaaaaccgcctggtctttgaggactcagaggaactggcagctcagctgcaggtagccatgtctgccaccacgccagggtggacagggttctggagactggcaccgagccatgctccctgatccctgtttcacacagccagggtgggaccatgcggggtctggcggaaaagctagggagggagcagaagtcacagaggctggcctactctgctgtcccatttcggtacagtaggctcggtaaagttaggacacaaccccacctgccctctagatttatggagctgagactccacaaatgatgctggagccgggtgggccaggctgcagtttaggaagtgatcaggatcaggtagtgcgtgggctaagggaacttctgggaccagccttgaaagatgggtggaattctgcaaaggttacttgtttcttattgcaaaaagtaatacatcattcttgtcaacagaatgattgggaggattttcagtaaaggtccaggtcagaagtcatttagactgggtcccccagtctctgtcagaaccatggtactctgttgtggtgtgaaagtagccacagatcatctgtagattaaggggtgtggctttgttccaataaagctttatttacaaacacaggctgtgggctggatttggcctgcaggctgtagtttgtgatccttgattcagacagtttagcaaggctgaaaagaacacccccttgttacccacagatgggtgggactgtgttggccagaggccgagaggagggtgctcacaggggaacgtacatcatgtagaggccggaaggtgctccagggcaccaagtgtgggaaagtgggacatacggggaagtttccagaaagcatgtcaaaatggaggcggagcgctgctggggtgtgaagggtctcaagtccaagtgagggagctagggacttgggaggggttgttgttgggtcggggagctggggtcatccaggtggtgacctgggatggggtggggacaggcaatgaggtaagctctgctcttcagtattttgcagatgcttttctcaaactttcctgatcctgaaggcaagctaaaccagttccggaagaacctgcgggagtcgcagcagctctgatgggatgagagctgggtgcagactgtgctccctttggttatggacacataactcctgggccagaggctaaaaccccagggcccctgctgtccttcccgcaggttttttttggagtctcagggcaaaccctttcaagcagcgcctcccagtggccagaagctgaaatgacggcagtggtgccacctggtgaatgacccggaagctgtggttggcccgatttcttctttggagtctcagaaatgcttcccgtcttcttctgttcttcacgccccatgtccctgctagcgtattactgttctgtgacttccctgtgacctctgcagtactcctcatcctgcatttggtctccaggtgtcacctttctgccatgttcctaacactttgattcctgtcttgagaaaagcacctgctgcaccataagcccagggatgtggcagctgcagcgggcttggctttgtgaggaaccgagtgtgtccagggatgtggcagctgccgcgggcttggctttgtgaggaaccgaatgtgtccagggatgtggcagctgcagcgagcttggctttgtgaggaaccgagtgtgtccagggatgtggcagctgcagcgggcttggctttgtgaggaaccgagtgtgtccacgttgggggaacatcatacttgatacacacgtttttatttgcacaaagaaaatgctatttttggagccagaattttcatgtctgatttatggtgattttcttaagaaccagaactgctggcagaaagggggcacccacatgcttagatagccgatgtcttattagagggcagattgtggttcctgatttggaatttaacattctccaaacattccagtccaatgaaagttttatccgctttcccatataaaaattcttcccacgagagtgatttgattctaacaatcccgttggagtcgtgtatgagtcctacagtgtgaggttcagcattgccatctccaagtgctctccatagggaaacagtttctggtcatgatgagcttccgcttcccatctgatcccagcccagcctggaaacagagcacgtgtttgaggatggcggtgtttggggacaggacatgagcgtattgtgtggggctgctaggacaggcctggcggggtggggagtgtctaagtcagtttacttggttcacaggttcccaggcccacccaagtacctagaattggcctccaggaagggaccagaaatctggttttacatagaaatggctagcagcaggcaccatgcagctgtccactc

SEQ ID NO: 1191 - DNA, 931 bp, Homo sapiens
gcctgtagtcccagcttcttaggaggctaggcacgagagttgcttgaacccaggaggcagaggtttcagggagccgagactgtgccacggtaatccagcctgggcaacacagtgagactctgtctcaaaaaaataagtaaaaaataaaatccatcctgcatcagtcaggaaagagctcattccagcaggatcaatgcagagaattcaccagaggaactagttccaaaggtatggcaagagctaaaccttccaacaggggcccatggggcaacccagagacagacaagagcaggaaactccaaacccttcggcgggcaggacagagggtgtgggtgagggttccagtgctgtgggctggaccagcctggtaggaatgagaatccatatgctaggagctggggccccagagaagcagctgctgtggaaaccccaggaggcagagtgagggagagacactggcctccccttcttcctgccctgcactgtctcccatgggtcacacgtggctgcagccagttgcctggggaggcccctgtcatgctgctgtttgcaaagcaggcccagggcctgggaaggacaggggctccagcacgcaggtggctatgctgtctggctactgggcggacactccccataacggacctttttggtgagttctgagagaaagcaccgggcatacttgactgacagccggtgcttcacacacacaggatgcttcacagtctacggcaaaggacagaacgttggttgctcgagagcccgtcttaagtcccctatgagcttcaagccaacacagcagagggcaaactccaggctacccgatccctcagcaaagatgtagatggacacagcgttctggccccatgcatctgaagtttgtcttaagatataaaccgtttcctaaaaatgcttccactgcagtggcacaggc

SEQ ID NO: 1192 - DNA, 1510 bp, Homo sapiens
gtttgagcaaaaagtagcctccacgctggactaatgcttggcaacattatgggaaaatttggggaagctgggagaggagggggcagagtttctttcccagccagccagggggtccaggcaattttggtcctagaacatctctctgtgcattcccaagtaattgcaaggcttcttcttgtcatcgtctgagacttggattccccaagcatccttcttttcctggagcctctgagtcctctattcctgaggcctttcttcagccctcccaatagccctgccatgatttcattgcagggctgtgaccgtctatgacaagccagcatctttctttcaagagacctctggacctgcagcaccaactcttcatgaagctgggcggcacgcactctccgttcagggcctggtaggcctcccatcctcagctgccttctctcctgcttgccaatgccctgtcctctccccttctcactgcagacctgggaacccactcatccaggggttggcaaactaaggctacaggccagtctcctgcttttgtaaatcaagttccattggaacacaacacactcattaacttctgagttgtctacagctgcctttgagctacaacagcagaatcgtgttttgcaacagagaacctgtggcccgcaaagcctgaagtatttactctctggccctttaagaaatgtttgtggacccctgcgctgtcttactctcctgccagtgggttcccaggcctgtggcaggatctgtggacctgtgtgtcccctggggtgtctcacggggctaaggaggggaccttagtgcaggtccacacaccctgaggtgtgcccctgggtaagctggagtggtgtgggagggtgtccctgcaccctcatcttgagtccaggggatgataagacagtaagtcgcgtggagaaaaggaatgagtcagtcttgtttgctgttgtaaccttagcacccagcaacaatattagagaaagcaagcccaggcctcagatggcaggggtggcctggtgctgctgatgtggctgggcaccccaacctttgggagcctgcaggccttgccatggcaggagatgcccgtcctgggtcccgggcctgctctgtggcctctcacaggcttttttcctgctctttcatctcagaacctgaggacccagacacggagcggtcggccttcatggagcgggatgctgggagcgggctggtgatgcgcctccgcgagcggccagccctgctggtcagcagcacaggctggacaggtctgcacgacccctagaacacttgggcttggtgtgacgggcacctggccaacctgtgttctcctcacccctgccagtcctgcatgcccccaccccgccacagtctcaatgagaaggggagggcgtgtgagctggaagaggggtgtctagaaacaggcccctgacattcaattctcttctcatagaggacgaagacttctccatctgctggcagctttagaaagtaggtgtgtagctgcggtgag

SEQ ID NO: 1193 - DNA, 313 bp, Homo sapiens
ggctagcagcgggcaccatgccgctgtccactctctacccgcatctgccccagcacttggcacagcaggacagaagcagagatctgaacccacatctacctggctgctccgtcaacccactcttcacaaagcttagaaagcggccaggcacagtggctcacacctgtaatcccaacagtttgggaggccaaggcgggtggatcactttagttcaggagttcgagaccagcctggccaacatggtaaaacccatctctacaaaaatacaaaaattagctaggcacgatggcgggtgcctgtaattccagctact

SEQ ID NO: 1194 - DNA, 401 bp, Homo sapiens
gccctcaggctgaaatgccccctccaggagagtatctcacagaggctggtggcctccctgccagagcagtgcactttctccacctgaccaggggactctggctactgtttatttaaaaatttttttctgaatgggcatggtggctcacacctgtaatcctagaactctgggaggccgaggcaggcagatcacctgaggtcaggagtttgagatcaacctggccaacatggcgaaacctgtctctactaaaaatacaaaaattagctaggtatggtggtgggcgcctgtaatcccagctacttgggaggctgatgcacgagaattacttgaacctgggaggcagaggttgcagtgagctgagatcatgccattgcattccagcctgggtgacagagcgagag

SEQ ID NO: 1195 - DNA, 1039 bp, Homo sapiens
ctacgttccagggattacggcatgaacatactgttttcaggaccctatctagcccaccatggtaaggaaacacccaacaaacatcatgcttattaagtttccaggcaggtgcctctctatcccagcttcattgttgtgttcttttcttcacaagtattttcagagctgcccttggccatctggaagatgcatggtgaaagaaacggatgcttgctctcagcacacacttccttccctgacagtttgtcgcctagcagctattttggcttcccaagggaaatcttgtcctttgcccttgtggggcttactgcaaatcaactcatcatgaggaagattaatcagagaaaagacatacaattttttttttttaaactgtgagcatgaagagaatcacagagtgtatactcaatctcccaatgggggcaaaatacttctgtaacctcctttcaggtggcgagaggggacatgggaatgtaggtaattctgttgagcggtaataagtgatgactaggaagattgaatggatacttgggagaatgaatagggggaggaaacagagattgacttattaatggttccctttggaaattaaatactccttggagaccagtcattactttgtaaaaaagtctgtttgagcgggcttacatcttaacgttctttcctgtagtcaagaagaagatcccagggagggagggaaagtgaattgtaataatcccgacatgttcagggagggaccctgtgggaggtcattgaatgatggggggcaggtgcttcctgtgttgttcttatgatagtgattaagtctcacaggatctgatggttttataaagccaggttccgctgcacatgccctcttgcctgccgccatggaagatgtgctttttctcctcctttgccttccgccatgattgtgagtcttccccagccatgtggaactgtgagtccattaaacctgtttcctttatacattacctagtcttggatatgtcttcattagcagcgtgagaacagactaatacagaacggaaaaaaaaaa

SEQ ID NO: 1196 - DNA, 100 bp, Homo sapiens
caaaaaagaaaaagtaagtaaagaaataaagaatagctactccattgcagagcagccctgagggctgctggttggatatttttgtggttgtttcttgatg

SEQ ID NO: 1197 - DNA, 4478 bp, Homo sapiens
gcttcctgcctcaccagttggtacattttgtttttgaaagaggtgggatccaaaagagctgtttctagccacactccaagcacctgagactttgggcacaaggacacttttttttttttttttttttttttttggaatctcaccacacgggtgctctgacctgcttggaagaggccaacggggcagctctggaagggttgggggctcccctgacaaggcgctggggctgcagctctgtttagaatcaccttcgtggaccctgatgttagaatcccacccccagataattacctttcaagtcttaggtgagcagaattgcatatttattgagaaaagcaaagtggaccctttcttcctctccccttagtaatttatttttctgaaaatggattcttttgtgtttgtacagattgctagtctgtgtctgtctgatcagaaggatgtatccccatacctaacattccatatcactacactgatgtgggctggggccagtaggggcaggacaggtgccaggctggctgttcctctgcatgcctggtgcaccctgtggccgctagcccttggccaggccatcctgttgcagatcccagtgctgccacagggacaccaccaggcacctccctaggcaacgccaagcaggaggacctcacccacacccatggcaaagcaaaacaaaagaggcaccccgaccccattctacagaagccccagtccatggtcacctgtattctacctcacactccagcgtgggctttttccaggatgtgccctgagcctgttctgaacagctgtaaccccaactcccccacacaatgtgtctgcctgggaggtaagtaagtccagactgggtgtccaggagctggaacccagagagcgtcctgtccctaaccagccactgcagccctccagctctggccctcagctgcttgacaggacggactgctgggagatggcagccggttggcagggcccttgccctcacaccccgctgcccaggagccaggtctgaacttctgtgcacaggcctggcccctcagactcactcctgccaagaggggccacttcttcagggtgagccccggctatcaggcagccgtgagctccagggcgggctgcagctcccatccccttgcgccatgtttggagtaaagggatcagtggaagtggaggagccacttgggttctcctaagaccagcccttccggaggggccggtcctggaagaaacccataatccctggagtgtgaaaaagggcaaaaagaaaaagctggcctggtttccttcctccctgattgattgattgataggcacttcctcttgctcagtgcaatacctaccagtgctgctaaaccagggactcgcccagacctcagcaggcccccagggcctctccgtgcaacactccgtagccatgacagcagctctctgctgcccgcccctgcccagagctggcagaagccctctgttgcctttcctccctcagagcagagaggccccaggggagccagggccgagtggatcctaggatggccacggagagccactcgctcccagaacaggcaccccttcccaaaccagcttttctgcagccaattgcctgttgcagctgtggccactgcctcccggcactgtggcagactccccccaaggagggatggggggggcaccagtgaggatgccccatcctgcctcaggtccagaactctgaaaggtagggtgcccaccccgtgcttacttccggcccctagaggttgggggtggtcgttatctctcaagtggcctccaataccccatccagccacaccacctctgccttccatctgaccaatccccaggcctctggtcagggccaggacacctgagactcacccttagcacagcacaacctccagtgcccaaggcctctcccacaccccagccatccacacatctggccccacctgctcagtactactcaacatttgaattcgtgtaaatatttatttttgtgtgtgaacaatactacaaagtaatcagtaagatcttttgcaaaaatgttaccccaggcaattatttgtgaaaatcttaatgttaaaacctggcagagacaatcgccaccctagaattcctggtatcagttacttaacgtgtcacttctcctcccagaggcagtacccaagctagacatgaaccgtttgcatttcttggcagacaggagtgagaaagactggggaaggggctccctccccctacccacacaaggattagatctaaagatcagcataagctacagtttgaagtcatgtttttctgagttcaagctgttggaactgaccaccctccagcctgccttagtactgcggcaagagcgtaggttcaatgtgttttcaagagaaaggaaagaatatgttgttaaagtccattgggcctcccaggcccctccaggacaatggatttcatcatgtcgaccccacctcttgggtgggctcctcctttccagtgaaactacacctgaagccctagagatggcagaatcaggagcaagtttctgcatggaaacaggattccatttagctggctcagtcagggaacttgttttgcttttgttttaaaagatgcagcttcaaccccttccccctactcccgacttggagggcaccaaagagctggttctgatgaactaagctcactgctgtctcaccctcaccagagggactgccttctcccaaaaggagctcccaaagcccttgtcccacagccatttaaaaatcttctgaagggcctcagggcacaaagtgatcatttgggatcctaagttaaaaaggaaatgcaagagtaggatactccaattccagagtctttgcaggaggctaatcccacaagaagggtagcatcagagaagtgggcattggtcttagtggtggatcatcaggtagacaagtgatagtgtgtgtaacccatctgaaattcattttaccgtcaccactcttacaaaggacagtttattcccaaggacagtgctgacggggagggggacaggcagggagttaggagggttttcgaggatttcaaacaggtggaacccatccatccctattcccaagggccacttacaactctaagggtggttacaggattaactaccagttcattttcaaaatgctgctttgaactcagagggttgatacttttaatttgtaattttttgtaaaactttttacaaaatagtaaagtatttcaccagaataccagtttcaatccgtccatggtctgatttttatataatttagtggtgctttagaaactttgtttttgttgtttctgagctaaacagctcaatcctttttcgcctgtatctacctaagaccaatgtgaacctttgtatttttgctcctaattttggactcagtgaaagtgtactgtttacatgtacagatgcccccagtccctgtgtgttctgcaagacttgctcttgaggaggaagatgcacctcactaagctcatctgcttagcaaagccacaaacaaaaacctctcactttttacctacgtttccacctaaaaatacaacaaaaaacctataccacgtagaactcagattggctgaaaaacactttccacctggtagatggcccatatgcctcaattatgtggtccatttaggagcaggagtcagaagagagacctcttattggctgctggtgggtaactgcatggacagaggaaaagggaaggcaggactttgctgcagagctgtgggatgaatgtagttcttccctgggcagcctgggagtgggaaggtcagaatgactcatgttgccttcaggatcaagccatccaggatttagggacaacccaagaggtctttagtcctctggcataatttagacatgttttggaagagcatgagttccatatctgagatgagatttaagactttcagtgcagatagtacaagccatttcttcagggttcctctgggggcagctccttcatgaggtcccacctccggggaggggcacagggctccagatagtaagcacttaaggcaaacagtggatggcaccaacttttaaaggtgactctattaatggcttcacctctaaattatatttttacagatatgcacctatgcaacttaacgtggctcttctaagcaggtgaggacttcctcctcaatgctctctataaaaattatttgtgttctatatagtgagttttaccagtaaatgtggcttaatattttaattcttagaatgtgtcttctctacgtgatgtgactaaattctgttttgtttgtggaatgactagcacaggccgactccctctctccctcacttaacaaaagaccaatgagctgttaatcgagctgttatctccatggtattacttgctaaatgcactgatttcataagtatgtggaatccttttccttttgaatctgtatatcatatataagactgaatctacttaataaacactgaacaacaaaccgaa

SEQ ID NO: 1198 - DNA, 5681 bp, Homo sapiens
gcccatctccaagcagcccaaggagaagatccaggccatcatcgagtcctgcagccggcagttccctgagttccaggagcgggcccgcaagcgcatccgcacgtacctcaagtcctgccgtcgcatgaagaagaacggcatggagatggtgagtcccccctgcctggcccacactttccctcggtgccactactgacctcctgccacactcccaggatgcccgggccccttcacccagggtcttcccaggagccctggaagcaagtaccataatccctggtttgcaaatgagggaactaaggcccagaaagatcacacagctccatagactgaggcgctggagcccaaaccccaccctgtgccacccacccctggggcagggtctctgcacaagcccagggcccccacgggccccatgctagctccatccccgttctgcctgcagaccagacccacgccaccccatctgacctcggccatggcagaaaacatcctggcagctgcctgtgagagcgagacaagaaaggcagccaagcggatgcgtctagagatctaccagtcctcacaggtacctgccaccgcagccactacaggggccgctcctgggcagccagggagggcaggccttatatgggtgtggactgagggagctgtgatgggtacagtcgggagaagggcagagggggaacaggagggcaaagacaaggagaggaggtgggtggaggtcaggtgtgttgttctcagagctcctcagacctcatacggaagcctggacttcatctggagaccagagggccctgatcaaatacgctgacagggagatgagcagagttggggaaagcccccggggggaaggtggctgggggaggggacagacagaatcccacaggtcaaaccgcagcattgggtcccaggagtcctggggccgcagcatttatccaccttgtgtccagggatggtagttggggccagctgccccttggtttccccagcgcccccctctcccctctgcaggatgagcccatagccctggacaagcagcactcgcgggactccgcagccatcacccactccacctactcactgccagcctcctcctactcccaggaccctgtgtacgccaacggcggcctcaactacagttaccgcgggtacggggccttgagcagcaacctgcagccccctgcctccctccaaacaggaaaccacagtaatggtgagtcgggggaggcctgggctctggcttcccgaccagcacccagctgggtctgcagagcagccctgggcagcggaatggggagagggaagcagaggccagtgatggaaaggggctgcctcacagcatagggagcaggaggggcggctctggcacccttccacttcatcgtcttagctggtccttagattggaaggtgaaggagactcagttggttaaagcaaaaacctaccgcccccttctcaccgccagtgacgcttgctccaacacttcccaccttcactaccggcgcctctcactggttccactcccccagggtccctgtgggtgccgagtcccagccaagggcctgttcttggcctgagttgaatctccgcagccccgtctgtctcacccatagcgactgaggctcagtgagacagctgctggcctggcccagctgtggccccgctggcctgcagggcggctccctccccaggcctcagctcagggcctgccttgtgaggtgaaagctttcctcacctgggtgctgggcctccgttcttgcccctgcattcatggagcctacatctgagacacctggggtgatggtgcacacctgctccctcgctccgctcctgtagctgggtgattcagtaggtgcttttccggtaactccccaggctactctgcgcagatggggcacagaccattagaggagacagcccccgaagagacagaggcttcctcatggagtcaggtgctgccgtgagcacgaactggaatggggaacctcagacccctttactgtgaggccaagggaagcaggggaggagtggggtcagcctggtgggtcacaggacctcttgggccaggcactcgggttgtgttctgtgtgcaggaggagcccctgctaggttttaagcacagaagggccgtgaattgtgtggtctgtgtcattctgtctgcccctgtaagaaggtttgaatgggcagagcaagaggcagaagccatgtgctttgggggtcgttcagaagccagggaatgaagggaagaattgaggaacctgagtaggttggagaaaggtgccacctgtaagctggggaaccctggtgcaaggtcttggctaaacatgcctgaggattccctaagcccccatccttggctgcaggagacccctcactgttcctgggcagcaagggagggagctagtccccacccatggcaggaagcccaggctgcctccactcgccttgacccccgccaccccccagaaccaggaagtgtatgcaggtccctggaagattcctgcctgggcttaactcctcatcccttcctaatgcctcttaacctaaaataagaggccgcctggccctaatccctgaagctaaggccggagtggccagcacggtgagaggtggagtggctgtcctaggcgggctcctttcattccaggaagaaaagccctgccccccctacacatgggggtctggggctcagcaggtgaggtgagggtggtctggggcctgctccctcctagcagcaggcgatggtgacaagcctctacctggtgtccacccagcatgacctatttcagggctgcggctgccaagtccccctgaccctcctaagggcctctcatattagggctgagcctgcttcatgcctgcccgttcacacctgcccaagaggcacaaacagcagccagagaatgattcttccagggaggcagctggctctgcccttgtgcatcctggggtctcagtctcccatctgtgaataccctggttccttcatggtgggtggggaggccactgacgcagaaatctggtcatttacctccttgcctggggcagcccctgtccttgagcactagtacctcatttgaagaacattgtttaaatcctccagcagttgaaggaagacaacaggcagccacgtggttgcagggccacccagccccactggcctccccagcctcagcctttcaagtattgttcaatcagtttggtacctcagccgggcagccgtattaatggctcagagctcctcactttgctcattatgttgtcatctggagatgcaaatcagcttagatagaatcaggctcggcctgtcttgcctggggtgctgggtaactcatgctcactcctatccctctacccaccatacggcagtccctcggcaacctgagcatctggctgtaaccagagtctacacgggggtgtctccagatcagatcagctgcaggaaacagggaccttctcctttccaagcctcagctacagcccaggagagaagggaggaagctctgagcacaggcatgaacaggatagcacttggggagaggagaaaagaaaggaaccgggaccactgctcatgttgactatgccaggaggctctggccactcccaagcatgacgcagaggggaccagaaccaccctagagagaaccagaccctcttcccccgcatccctctgggtccatcccctgcaatatccagaagttagcagaggcactcctgttccaagcttctcagtcccgcattgtgacaacaccctgggagtcagtcacctgtttggctgctgtttccagacacagccccaaccccttccccctgtgtttgattttaacagactcaactgtttccttaactctcaattccaaggacgctatttagaaaatagttcctaggacctcctccttggtgtccacattctctggccggagaggaaataaccccatgtgacaaactgtcccatcttagactccagcttccttccccatttgggggctgcaccagcttccttttagcagcagtcaggtttccatagtttatcccaagatgttacttccagtctggatacctcccgtgacaagagcttgtccatctctcttcatagcagcataaaaactgccatggagatgcaatcatgagagaatgtgaccatcagaactttcagggtagctgggggagcctcacacccccgtggaagataaagctgtggggaagggactccagggggagggcagacaacagagaagctgacctggctgcatcagagaaggcttcccagggaagcggcagctctgcctgcacctgcccagattctctcttctttggctgtttcttgccgaacaccttgtagaatgcttttcaaattccaggagcttccaggtctcctgggagcccattcagaaagccctgaaacctctttggaagcccttccctattgggccagtctaggcagtcaggcctcctgtgggctgagaaggagcctcagcctgtgctgagtgtttcacagccggcatctcagcttctgctcgcaggagccgcctagttttggcagatgagggctctgaggcccagagaagttaaagaatttgccaatgaagtagcagagcaggacttgaatccacacttgcctgactccaaagccaggagcttcttgggaaaggccaagagaggacagggcctggcggtcccctccccaacacgcacacccctagtgtgttttgaaagatggcaggctccctctttgccatcatccgaggacaaagggcgggcagtttctccagaagcgagtctgagtcttgtcctgatggttccggcccacactccctcgtatcctagcagcatgaaccctccacctcactcaggcacaggactcctcccaggaggggggattcgaggtgcttgaggcttagcagaaagaggcttcacacacccagccccttcctccatccactggctgccatggtccctcctgggggtgcagttatggcctggccagtctggcctgtacctctccccccagacaaccagggcagctggcctctctccagctggacagaagcccctttcttgtctgggcacacagatgtttcttctcctggccttttgtggctcgactctcagctcctcctgggctttccccacacgcatctctcaggtgtgttgggcccctgcctacctgcagagtctcctgcacaccatctccccttccagcctcggtgtctgggctggggaagagcacacagatgggtgctgctcctttaggcacactggcagaggctttcttttagcacttgtcccacagttcctcaatggaagtagtatttcccattcccaagctctgctcaccacactgaggagaggcagatcttaggagttcctttgccccaaggccgcctcttcctcacctaaaaccggatccttgcaagatcaccctgaggattctctgagaaccctgtcgcccgcaggcccattctaagcactagggatagagccatcagggagatggaccagagccacggacttcagtgcccaactcacagtgggcactaggccataggttatgacagtgccaaggaaggtacacctcccagatgccaggcagggtggctgctcccttctcaccctacttccctctccacagggcccacggacctcagcatgaaaggcggggcctctaccacctccac

SEQ ID NO: 1199 - DNA, 12796 bp, Homo sapiens
ggacggatgaaatggttcaaattgccattttatgtgggagcccagttcttgggagcctttgtgggggctgcaaccgtctttggcatttactatggtgagtaaagtccctgagtcctaaggttaggaagagctgggcataatttgaaagtcagaattacttggtaggcacaggcgagaaaaagcaaggacgggaagcattctacaagtgacagcaagttctaaatttgagaaaatgaggccatattaccattccagcaaattcgtgaatcctgttaatgaaaatggtcatatcttaaatggggagcagaacttaaaggaagcctgtctttgtgccaagccagcactgcaacatacacatccatacaacaagcagtaggccagtggcttccccactgctgtctctgatttggctgggaaaagaggtgttttctggtgacaaaggtgtgaccagtaagtattgagagaaggactctgggaagatgtctttgaaggaagagacacagcagagatgtgggctgggtgggagcctcattgcccttctatcaaacagccagggcttccactctgcaacagtccttgggaaaaacacagtattggtcatagaagaccagactttagctctagctgttcagtaaatacctgtgcaacttaaataagtcatctgatctgactagcctcagtttcctcctctggaaaatgagggaattgaatcagatgactctcgaggcctttcaaactaaaacaccttggtgttcccatgaaatcaactgttaaagcagctccttccttctaacccaaggtaagccttaatacattatgacttacccaaactgaagaccttaggaagtagaatttatgaaccaggccttatagaaatgggtcatggagggctgggtgtgtggtggctcatgcctgtaatcccaacactttgggaggcataagtgggaggatcgtttgagcccagtagttcaagaccagcctgggcaacatagggatacctcgtctcttcagaaaaaaaaattaaaaataagccaggtgtggtaactcacatctgtagtcccagctactcaggaggctgataagaggattgcttcagcccagatcaaggctgcagtgagccaggatcatgccattgcactccagcctgggcagcagagcaagaccctgtctccaaagaagaaaaaaaagaaaaaaaaaaaggaaaagaaataggttatggaaagggacttttccccatagagtgtctctctgagaattagagtctaaaagggctaaaatggaattcaagaacacacaggaaattcagagcccgctgctgtggcaagaatggcctggggtcagtgctagctgtggcagtggctgcaatacccctggctctaagggcatcttcagtatactgcaacaccctcaaattctggagtggtattaggggttactgagagccctctgggaattataaattattcctagagcaagaccaagccccactttggcttacagttgacctcgaaaactccaagaattcccccaaaagagaactcattcccaggaccctatcgaagaataatttgtccaagtttgcagtgggccattcagagaggccaaaggccttcttcctttgaccctccatcctgggattcacctgggcatctctaaaactatcattcctcggaagtagagagagacaaatgacatggctatgccaagctcaatctgagtgactggttgtttagcacaaggcttggcacaggcctccttcaactcttcccagggaacactaatgtgccagagctttctctttcatagatggacttatgtcctttgctggtggaaaactgctgatcgtgggagaaaatgcaacagcacacatttttgcaacatacccagctccgtatctatctctggcgaacgcatttgcagatcaagtaagtgtagattcaacaaagacttaactttggtgaaaagatatgctctcataaggggaatgcattggagaattagagaccaatcagaaaggagagattatatttccaaaggcagaggttgctgggcataacccaagctttcttgataatcgttttacctttacaaggagctgataccaccagaaaagttttctccttcctctttaatacatacacttgtttaacattagttgagatccagaaaagagtgaatgactaaacatttcaatccctgtagacacaaatggagttcacttcactattgactcttttgaacaagtggtctaagtgtggaggccacaagagaagatatttctatttcaaatcaaagactgtgaagggtggtagttgagcctaggggatcatcaatcctctctgtctcaccatgtgcataggtttatttatttaaactctcaaggtggccagaagtatctctgcttattgacctttaaacaagcttctagcacccaagcatactgtggtgtaaccaatagcacacctatttggtcagcttatggcaggactaacattgtcaactcaaaagactcttcttcccttactgtgtcccaagaaggctgctggttatcttggtcagggcagtggaaggaaggctatatttttcagtatctctaagttcttcctctatgatcaggacttatacagcagatcagaatgggcatgtgtatcaaatggatcttccagttcatcagctatgcccacctccattcaatgtatggatgaaaaactatgccctcatgtcctcagcttttttactttccactttcatcaataaatcaaacaggcaacaagtgttcattaaaaactcactatgtgcttggccctttgtctggagcttgaaagactgacgagtaaatgtgagttgtaaagatccaagatgcagagtctgaatgcttgaattaaaatagctgttctgcctccaacttcctgcgtggcttcagcaaagtactgaactttttgggtcgcaagttattcacttgtaaaatggggataatatgagccttcatgaagttacttatgaggataaaaagaataatatgagaaaaacgcattgtaagcagtatctgcccagaaattttgaatctagttgaagagcattgaacaaggaaacaatgcaaaataagatataattagacagagctgggcacggtggttcacatcttactccctgcattttgggaggccaaggtggacaggtcacttgagcccaggagttcactaccagcctgggcaacatggcaaaaccctgcctctaccaaaaatacaaaaattagccatgcgtggtggtgcttgcatgtagtcccagcaacttgggaggctgaggtgggaggatagcttgcacccaggagttggaggctgcagtgagctatgattacaccaccacacctcagcctgggcaaaaaagaagaaaattagataggaaactggagtatagcgaccatattataatagaaatttgaagcagagagcatagaagagcgaggacaattttggttattttggtgtttttctctaagcttttttttttttttttaagactgagcctgttgccccaggctggagtgcagtgacgtgatctcagctcactgcaacctccacctcccaggttcaagcaattctcctgcctcagcctttggagtagctaggattcccagtgtgagccaccactcctggctaatttttgtatttttagtacagacggggtttcaccatgttggccagactggtctcgaactcctgacctcataatccgcctgcctaagcctcccaaagctgtatcttgatcaatgctgacctgcataccatatcctgagcttccttcattgtgtccttgtctcagagtgagttggcaatttctctaaggtctgtggtttctaagcccattattgtgtataaagtcaagtagaaaaagcgaatattagaaaaccctgaggctgtaaccgtcagcaaaccctgaatgctgtccgtattcttaggctttggagagagttccaaaaattgccaattatcagtcagtcaacacccaacagagctcttggccatcatgaccatattttggggtcaccttatttcaagattactaaattgtttagctgtaaatactcttcaagcatattccttggtttagttaataatcaatcatttatttacccaataactatttactgggcacctacttagccaagtacagctctatactcttccttcttcaaggagttcagagtctgaggctcaatctaacaagtaagtagatactcttttgcagagtgacaaggacactgatagaagtaaagtcagaatgtcatggaagcccagaggagggagcttttactctgcaagagagagttggagaaggcattccagagaagagtgctcttgggggaacatgtgtcttttaatattaattaaaaattattttaacattattattttggaaagcagatgaaatgataatgaacttaaactttaaaatcagttgcctggttcccatcctgattcttctgcttacaagtttgacattggacaagtgtcttaaccttgttttactcgagttttcttatctataaactgagaataatagcaggatttacctcacagcattactgtgaagatttaatgagataaagcatatgaagtacctggcacataataaatgttcaataaataatagctatcatttaactgttaaagtaaaacagtagtttggaaaactaataacatagaaaccagctataattggccaattcaaatacctattatcatttttgtttattgtcttaaaatttttcttttacgtatgtttttaagtagagtcaaccctacatatccatgaattctgcatccatggattcaaccaaccatggatcaaaaatatttttaaattgcatttgtattggacacgtacagacttttttcttgtcattattccctaaacaataccgtattcacattatatcagatattataataatctagagatgatttaaagtatacaggaggatgtgcataggttatatacaaataaaacacaattttatattggggacttgaacatccatggatttttggtacttgcaggaagtcctggaaccaatcccccacagacaccaagggacagctgtataaaacacaaaacaaaacacaaacacaaacaaaaaaatacaaatttttttcacttaatgttataagtatttttaaatattactacatagcttttatgtttatagtttttaatggctatacagtagactaaaaaaagagtaaaagcttccagtttttcagtactataaattttgctaaagtggacattttaaaatgatttttccacgttttagattatttccattgtgtaattctcaaacatccagcagcatcaaattgtataaataaatttatgtttttgaatgcatattgctaaattattgctgaatttccttttaaaagcatagtacttgtttagatctattagaaaagcctgaaataacgggtatctttttcctaacatttgatattgtttggatttattttattactaatgagtttttaccactgctttcctaattctgttttccttttttgaattttctgttcacttcctttgcacactcatctattgatatctcacattgcttttctcaccaatttgaacaagcctttcattcatttttccagcctgcagcttgccgttctacttagctgagtagtagcttagcaggatagtgtggtattaagataacagtctctggagccaaactctctggatccaaacctgactgccacctactaagtgggcagggtaaccaatctgtaaatgagaattatattggcttctcctctagaattgctgtagaaagaagagagactggcacaattattcacccagtacatgccagttattactaggcatattgtaatataagtaaaatagtaatattgtaatattgtaaaatagtaagaagggatgattttgagacatgcaggtgagcagaatgcaggctaaagccctggctcaacttctccctctccaggtggtggccaccatgatactcctcataatcgtctttgccatctttgactccagaaacttgggagcccccagaggcctagagcccattgccatcggcctcctgattattgtcattgcttcctccctgggactgaacagtggctgtgccatgaacccagctcgagacctgagtcccagacttttcactgccttggcaggctgggggtttgaagtcttcaggtaagtaacagtggtggggaagagagagacagagtcatgctgcgcctcaccagtggggcggggctttgacatggagatccagggaagttcagatgacagcgccaacgttaactgcacactctggtcataagcatgagacatttcactggtattttgtggtatgatgtgtgtgtgtgtgtgtgtgtgtgtgtgaaagagagagagagacagagaaagagaggcggctctaggtaaattcaatagagataaaactgtcccacataataataatccctcaattgctatatgattttatgtgaacattttagctgtataacttgtctgcagattcattttgtgacaaagttgggctacaatttgcatcctatgatgccactacagggctcttcctcgtgaaccacgcaacctatgctgcacttattccacagatatttgttgggcattatctgtgctttagtcactgtgctaagcaaggaaatttcaaatcagcaaaagcactcaccttgagcgatataataagtgctctggcaacccctaaaagtgctgcaggaacacagataacgtgtgagtaactgccagggaagcagggaaagacatgactgcaaatgtgagagctgacttggttctggagatatgagtaagaacttccggacaggacagacgtaagattgagcctctgccccagaaatggcaagactccacactttctacttcagaatgtgctgaggaaatacgccaactgttggtacctatcttctaggacaaaatttgccccttcactacttcctggtttccctgcatgcagtcacagaggcgcatcctcatccacccatggcaacttcctatggggaaggagctcactttggttcatcaggaaacagggctctaccatggagaaaagtaggaaaaacatgtgtgagcaaattctactttaatgtttcctgtgagaacaaaggacgtgagtgttcccaaatgatgacctagacatagagtcatcagggtttggcctgcatttcaccagggtgaaaaataagttaaaataactggtaccattgagatcaccaccacagatagcactcagagcatctagagtgtaagtgccatgagtaccttgacagccttttcccctggtatatccacagtgcctagaacagggtgtagctcatagaaaggctcaataaaaaggtattgaataaaagaatgaatgaattctatgtgacggacacttcctaggagttgaaggatgcaaagcaactcagtcaacattccctgtcctcaagaaattgacaatccaataaatttcctagaacagcagttctcaaccagaggtgggcaactgttccccagggcatttttggttgtcacggctggacctgagggaaggggctgctactggcatctaatgggtagacgccaggaatgctgttaagcatcctacaatgcacacggcacacctcccacaacaaagaattattcagtccaaaatgttaataggtttgtggttgagaaattctctcctagaatgatcacaactagaacacgaaaatgtccgcaactaggatggatctcttgtatctttccaatggagcatcaaaaacatatgtcctaaggatctccttattcccagagcccagaattcgcccatgagtttcccttaattccaccatccagagtctcagtcttggagaccaagctcttcttccaccccctttgagacctccttggtgattcattcaaaagtcaaagagacatggtggttccaaaacagatggagatcttgcccaatgtccctttgctctgttaagtatatgttaggagaactcacgtgaaggaaaatgttggaatcacctaatgtcccatgtccttagctagcatcaggatcttttcccttccatggagtcatttattcattcatgcagctacttgatatcttactcaaggctctccactaaagatgataagacctagtttctgtccttcactgttgtgtttatattctacttaagaggttattccagaagctcttacacaaggtggaagcagtcaagtgccattaaagagatttgactaattaactccaggagtttagaggtctacagctccaaatttaagaattatgggagtggaagtgggaacatttatagtatttggatatgcttaaacaagcaacagaggggttatctcaggcagagagaaccgttattcaaagacacaatgttaaaatcacaagtgatctagtctagctggaagggtgcagaaagaaagttggaaagggccgttgtcagatcatagaggacctggactcccagaatgagaattttggcttttcttctgctccctgttttgtaggttatagggagtagcaaagtatttggggcagaagtttggcaggtttagaatgtcaatttagcaaaattaatctggcatcatcctataagactgattgaaaaaggagagagtggggaagtagaaacccattaggaaagagcagggttggctggtaatcctcaaccaaaaatttctccccaaaacctttgagggacaacaggcttccaaagtgttcttagagtgtctcatttcctcagagttctatattcaagggaaatccctcagtagatatcctagcttggacctacacctaaggtcttagaaaaaaaacaaggctaccttgttcccaggtccccatgtactcctgaacggcaagcagtggaatgatggcaggtacagcgagatgccagagggtttgatgagggcaagagtcaacagaccctggccaaagactcttggtttttcctttaaatgttaagatgtttcccatcaaatttctctccacttattcacattgttaatgacttaatcagtgaaagctctcaggagtattattaaatttttcaaatagttggcccaaagtattgaatccctaaagatggtcctttagacagttaacatacacatgttcctggcatctcccgaatcatagtgtgcaaatgatcactatttgtgtgcatataggactaggctaggcaggtaaccacatctgagcgcctccatttgtgacttgtgaacctgatacaacatgtccaatctgataaaataaaaagcatccagccagtgaagaggacgtgtaccctggctgatatcttggaccttcatctgctaaatgacaggaagaaatttgccataaaaggaaatgatggacccaacaggtagcttatactcccttcatgttttgacctctagagaagacttcaagtctttacagccaaacgggagaggcagccaccctccatgtgcctcccctagaaaaatccatctggatttggggcctggggaagggcactgtgagggcggccgagtacagcatcctcgctgccgtgtggtaagagtgacatctggtggctgccatgctcaggctcagtgctcttccatcaaccctgcaagggcaatggaggacttcggagaccacttaggtgccccaggtggaagggaccatgcagatgaaggaaatggagctcacgatggggaatgggggtttgatttgctcaaagaccttctagataatcttgagattagacttagtttcctggattctaggacagggttcttgtgtcctgcttatttcctttatcgttctttctaatcaaagtttgagatatacaaaaggccacatggaacatatgtgtagttattcagcataatgatgaaaagaaaagctatgggtccttctagaatccaactagaacactgaaattcttacatgcctctgggtactcctcttgtctcccatcccctctgcatttatcctgaagttttgtgttttccattcccctgctttttaaaaatacttttatcttaaatgtatatatccttaaacaatatactgtataatttgtttgctttcctgatcctttctaagaaattatttacatggattttctctctccaaagaagatggtgacaactcacaaagatacctgcttttccccagaactatagctttgctgtaatgtactaacattgaggatttctggaagagagagagccatggcatgacagccttatcagagggtagcctcaagctaagatcttaaaaaataagtactgatttaaattatatttagaaggcaattcacacatccaccttagattttttaaaaattcattcattcattgaaaaacatttcctgattgattagtttgattgtcctcatacactaatgatgcccaggaatctctccacattctgcttgtaatccacaggaatcattatttcaggatgagggaaaggcaattctgaataattgacctgaactttcttaggggccctcaatcttaacgatgggctcaggcactatattttataaaaagaaaataaataagacataatatctcacaaatattagtaggacaattaaatagatcatctgaaatcaggtgtagtggaaagtcaaggatggcagttgccatgctgcactgagccccccttatacttagctcttgctgagttaagagggaaccatgagtgtgagaaagactaacaagtgagtgaaaaaactagacagtaataccaggaggaaggccaagaaatgtatcactaatttcttgtttgatttcagagctggaaacaacttctggtggattcctgtagtgggccctttggttggtgctgtcattggaggcctcatctatgttcttgtcattgaaatccaccatccagagcctgactcagtctttaagacagaacaatctgaggacaaaccagagaaatatgaactcagtgtcatcatgtagtggcatgctcagctctggatttgcagtcagtttgggattctcttcagaaagatggcatctaagtgtctgtgttcttgtaagcctgaggtggaatccacccagttttgtctgctagccatatgggacatctaattggaaaagcatctgcataaaagtttggaaacaatgaccacttctctaccattgtcccccacccccaccccccagaataacgctgactgtcccctgaaacagccttctctcctgccctgtttatttcatcctcgatgggaattcttgctaggtaagcactaataactcggcatcttgacgatagtcccatttgggtggtttcagctgcactatctgtatgaaatggtgtcaccaaaacccttttcttcagtatcgacaaagattacattctgagtaccaaccaaaccctaaattgaaagacaaaactatggtttcagtcaacatattcatgaattagggagctaatgggttaagcttccagttcccgctatgctactggatttgtataaatactgatattctccaaacctagtggtgtagggagcaagagaatgcagctggaaggcacaaggggaggacattgtggcattcagaaactgcaggagacaagatgaatttgagaagccaaatggaatttttaatggaaaccatttatcagattaatctcttgctctcctgcattttagaggacaccaattaatttcctggtctttagtatataataacctaaaataccattgtaacctcagtcatgaaaaatacatcactctgtctttttagctcaaatgtattttcctaattgcccacttgagaacagacatttgacaagttatatcaacgactgtgcttgtccattattttacacatgccctagaagccaaaactgaaagccactggatcctggtctagctgaatcttcagagtgggaggtctccaaaaagatattaccttattgggcttaacaattcacaaggcactttcacacccattatctaatttaatcctcataatgactatgtgaggcaaatgccacattgcccatttttcagataaagaaacaaaatcttagggaagataagttgagttgtccaagagcacactgaaagttgaatgttatctaatgcattcctctacctttcagaagatcagtagctggctgacaatctttgccaaatcttccttgctagccagaagtggaattggcagcttctagaatatgtacacctctggacaaaatgttcctcaatcttaagatacaaagaccctcattgtctgggtctattcccacacttactgagtacagatgaaggaaagtggtagcaatttaatcataactttcatttgctgaaaaacattatgagaaggcctcccttcctaagccacctctggtcttgctaagtcttgatcttgcttcctgccagcaccaaacattacattcaggggatttcctctggctcagtcttttccccttgaagttctctaatagatgttacttttgacaaaagatcgcctatgagttacaagcaccaggggatgctctacatcaagggatgcaccttcagtcaaactgtcaaaaagcccagaattcccaaaggcattaggtttcccaactgctttgtgctgatatcagaacagcagaaattaaatgtgaaatgtttctgatgacttatgttctacaatctatggacatacgggatttttttttcttgctttgaagctacctggatatttcctatttgaaataaaattgttcggtcattgttgg

SEQ ID NO: 1200 - DNA, 12801 bp, Homo sapiens
ggacggatgaaatggttcaaattgccattttatgtgggagcccagttcttgggagcctttgtgggggctgcaaccgtctttggcatttactatggtgagtaaagtccctgagtcctaaggttaggaagagctgggcataatttgaaagtcagaattacttggtaggcacaggcgagaaaaagcaaggacgggaagcattctacaagtgacagcaagttctaaatttgagaaaatgaggccatattaccattccagcaaattcgtgaatcctgttaatgaaaatggtcatatcttaaatggggagcagaacttaaaggaagcctgtctttgtgccaagccagcactgcaacatacacatccatacaacaagcagtaggccagtggcttccccactgctgtctctgatttggctgggaaaagaggtgttttctggtgacaaaggtgtgaccagtaagtattgagagaaggactctgggaagatgtctttgaaggaagagacacagcagagatgtgggctgggtgggagcctcattgcccttctatcaaacagccagggcttccactctgcaacagtccttgggaaaaacacagtattggtcatagaagaccagactttagctctagctgttcagtaaatacctgtgcaacttaaataagtcatctgatctgactagcctcagtttcctcctctggaaaatgagggaattgaatcagatgactctcgaggcctttcaaactaaaacaccttggtgttcccatgaaatcaactgttaaagcagctccttccttctaacccaaggtaagccttaatacattatgacttacccaaactgaagaccttaggaagtagaatttatgaaccaggccttatagaaatgggtcatggagggctgggtgtgtggtggctcatgcctgtaatcccaacactttgggaggcataagtgggaggatcgtttgagcccagtagttcaagaccagcctgggcaacatagggatacctcgtctcttcagaaaaaaaaattaaaaataagccaggtgtggtaactcacatctgtagtcccagctactcaggaggctgataagaggattgcttcagcccagatcaaggctgcagtgagccaggatcatgccattgcactccagcctgggcagcagagcaagaccctgtctccaaagaagaaaaaaaagaaaaaaaaaaaggaaaagaaataggttatggaaagggacttttccccatagagtgtctctctgagaattagagtctaaaagggctaaaatggaattcaagaacacacaggaaattcagagcccgctgctgtggcaagaatggcctggggtcagtgctagctgtggcagtggctgcaatacccctggctctaagggcatcttcagtatactgcaacaccctcaaattctggagtggtattaggggttactgagagccctctgggaattataaattattcctagagcaagaccaagccccactttggcttacagttgacctcgaaaactccaagaattcccccaaaagagaactcattcccaggaccctatcgaagaataatttgtccaagtttgcagtgggccattcagagaggccaaaggccttcttcctttgaccctccatcctgggattcacctgggcatctctaaaactatcattcctcggaagtagagagagacaaatgacatggctatgccaagctcaatctgagtgactggttgtttagcacaaggcttggcacaggcctccttcaactcttcccagggaacactaatgtgccagagctttctctttcatagatggacttatgtcctttgctggtggaaaactgctgatcgtgggagaaaatgcaacagcacacatttttgcaacatacccagctccgtatctatctctggcgaacgcatttgcagatcaagtaagtgtagattcaacaaagacttaactttggtgaaaagatatgctctcataaggggaatgcattggagaattagagaccaatcagaaaggagagattatatttccaaaggcagaggttgctgggcataacccaagctttcttgataatcgttttacctttacaaggagctgataccaccagaaaagttttctccttcctctttaatacgtacacttgtttaacattagttgagatccagaaaagagtgaatgactaaacatttcaatccctgtagacacaaatggacttcacttcactattgactcttttgaacaagtggtctaagtgtggaggccacaagagaagatatttctatttcaaatcaaagactgtgaagggtggtagttgagcctaggggatcatcaatcctctctgtctcaccatgtgcataggtttatttatttaaactctcaaggtggctagaagtatctctgcttattgacctttaaacaagcttctagcacccaagcatactgtggtgtaaccaatagcacacctatttggtcagcttatggcaggactaacattgtcaactcaaaagactcttcttcccttactgtgtcccaagaaggctgctggttatcttggtcagggcagtggaaggaaggctatatttttcagtatctctaagttcttcctctatgatcaggacttatacagtggagcagatcagaatgggcatgtgtataaaatggatcttccagttcatcagctatgcccacctccattcaatgtatggatgaaaaactatgccctcatgtcctcagcttttttactttccactttcatcaataaatcaaacaggcaacaagtgttcattaaaaactcactatgtgcttggccctttgtctggagcttgaaagactgacgagtaaatgtgagttgtaaagatccaagatgcagagtctgaatgcttgaattaaaatagctgttctgcctccaacttcctgcgtggcttcagcaaagtactgaactttttgggtcgcaagttattcacttgtaaaatggggataatatgagccttcatgaagttacttatgaggataaaaagaataatatgagaaaaacgcattgtaagcagtatctgcccagaaattttgaatctagttgaagagcattgaacaaggaaacaatgcaaaataagatataattagacagagctgggcacggtggttcacatcttactccctgcattttgggaggccaaggtggacaggtcacttgagcccaggagttcactaccagcctgggcaacatggcaaaaccctgcctctaccaaaaatacaaaaattagccatgcgtggtggtgcttgcatgtagtcccagcaacttgggaggctgaggtgggaggatagcttgcacccaggagttggaggctgcagtgagctatgattacaccaccacacctcagcctgggcaaaaaagaagaaaattagataggaaactggagtatagcgaccatattataatagaaatttgaagcagagagcatagaagagcgaggacaattttggttattttggtgtttttctctaagctttttttttttttttttaagactgagcctgttgccccaggctggagtgcagtggcgtgatctcagctcactgcaacctccacctcccaggttcaagcaattctcctgcctcagcctttggagtagctaggattcccagtgtgagccaccactcctggctaatttttgtatttttagtagagacggggtttcaccatgttggccagactggtctcgaactcctgacctcataatccgcctgcctaagcctcccaaagctgtatcttgatcaatgctgacctgcataccatatcctgagcttccttcattgtgtccttgtctcagagtgagttggcaatttctctaaggtctgtggtttctaagcccattattgtgtataaagtcaagtagaaaaagcgaatattagaaaaccctgaggctgtaaccgtcagcaaaccctgaatgctgtccgtattcttaggctttggagagagttccaaaaattgccaattatcagtcagtcaacacccaacagagctcttggccatcatgaccatattttggggtcaccttatttcaagattactaaattgtttagctgtaaatactcttcaagcatattccttggtttagttaataatcaatcatttatttacccaataactatttactgggcacctacttagccaagtacagctctatactcttccttcttcaaggagttcagagtctgaggctcaatctaacaagtaagtagatactcttttgcagagtgacagggacactgatacaagtaaagtcagaatgtcatggaagcccagaggagggagcttttactctgcaagagagagttggagaaggcattccagagaagagtgctcttgggggaacatgtgtcttttaatattaattaaaaattattttaacattattattttggaaagcagatgaaatgataatgaacttaaactttaaaatcagttgcctggttcccatcctgattcttctgcttacaagtttgacattggacaagtgtcttaaccttgttttactcgagttttcttatctataaactgagaataatagcaggatttacctcacagcattactgtgaagttttaatgagataaagcatatgaagtacctggcacataataaatgttcaataaataatagctatcatttaactgttaaagtaaaacagtagtttggaaaactaataacatagaaaccagctataattggccaattcaaatacctattatcatttttgtttattgtcttaaaatttttcttttacgtatgtttttaagtagagtcaaccctacatatccatgaattctgcatccatggattcaaccaaccatggatcaaaaatatttttaaattgcatttgtattggacatgtacagacttttttcttgtcattattccctaaacaataccgtattcacattatatcagatattataataatctagagatgatttaaagtatacaggaggatgtgcataggttatatacaaataatacacaattttatattggggacttgaacatccatggatttttggtacttgcaggaagtcctggaaccaatcccccacagacaccaagggacagctgtataaaacacaaaacaaaacacaaacacaaacaaaaaaatacaaatttttttcacttaatgttataagtatttttaaatattactacatagcttttatgtttatagtttttaatggctatacagtagactaaaaaaagagtaaaagcttccagtttttcagtactataaattttgctaaagtggacattttaaaatgatttttccacgttttagattatttccattgtgtaattctcaaacatccagcagcatcaaattgtataaataaatttatgtttttgaatgcatattgctaaattattgctgaatttccttttaaaagcatagtacttgtttagatctattagaaaagcctgaaataacgggtatctttttcctaacatttgatattgtttggatttattttattactaatgagtttttaccactgctttcctaattctgttttccttttttgaattttctgttcacttcctttgcacactcatctattgatatctcacattgcttttctcaccaatttgaacaagcctttcattcatttttccagcctgcagcttgccgttctacttagctgagtagtagcttagcaggatagtgtggtattaagataacagtctctggagccaaactctctggatccaaacctgactgccacctactaagtgggcagggtaaccaatctgtaaatgagaattatattggcttctcctctagaattgctgtagaaagaagagagactggcacaattattcacccagtacatgccagttattactaggcatattgtaatataagtaaaatagtaatattgtaatattgtaaaatagtaagaagggatgattttgagacatgcaggtgagcagaatgcaggctaaagccctggctcaacttctccctctccaggtggtggccaccatgatactcctcataatcgtctttgccatctttgactccagaaacttgggagcccccagaggcctagagcccattgccatcggcctcctgattattgtcattgcttcctccctgggactgaacagtggctgtgccatgaacccagctcgagacctgagtcccagacttttcactgccttggcaggctgggggtttgaagtcttcaggtaagtaacagtggtggggaagagagagacagagtcatgctgcgcctcaccagtggggcggggctttgacatggagatccagggaagttcagatgacagcgccaacgttaactgcacactctggtcataagcatgagacatttcactggtattttgtggtatgatgtgtgtgtgtgtgtgtgtgtgtgtgtgaaagagagagagagacagagaaagagaggcggctctaggtaaattcaatagagataaaactgtcccacataataataatccctcaattgctatatgattttatgtgaacattttagctgtataacttgtctgcagattcattttgtgacaaagttgggctacaatttgcatcctatgatgccactacagggctcttcctcgtgaaccacgcaacctatgctgcacttattccacagatatttgttgggcattatctgtgctttagtcactgtgctaagcaaggaaatttcaaatcagcaaaagcactcaccttgagcgatataataagtgctctggcaacccctaaaagtgctgcaggaacacagataacgtgtgagtaactgccagggaagcagggaaagacatgactgcaaatgtgagagctgacttggttctggagatatgagtaagaacttccggacaggacagacgtaagattgagcctctgccccagaaatggcaagactccacactttctacttcagaatgtgctgaggaaatacgccaactgttggtacctatcttctaggacaaaatttgccccttcactacttcctggtttccctgcatgcagtcacagaggcgcatcctcatccacccatggcaacttcctatggggaaggagctcactttggttcatcaggaaacagggctctaccatggagaaaagtaggaaaaacatgtgtgagcaaattctactttaatgtttcctgtgagaacaaaggacgtgagtgttcccaaatgatgacctagacatagagtcatcagggtttggcctgcatttcaccagggtgaaaaataagttaaaataactggtaccattgagatcaccaccacagatagcactcagagcatctagagtgtaagtgccatgagtaccttgacagccttttcccctggtatatccacagtgcctagaacagggtgtagctcatagaaaggctcaataaaaaggtattgaataaaagaatgaatgaattctatgtgacggacacttcctaggagttgaaggatgcaaagcaactcagtcaacattccctgtcctcaagaaattgacaatccaataaatttcctagaacagcagttctcaaccagaggtgggcaactgttccccagggcatttttggttgtcacggctggacctgagggaaggggctgctactggcatctaatgggtagacgccaggaatgctgttaagcatcctacaatgcacacggcacacctcccacaacaaagaattattcagtccaaaatgttaataggtttgtggttgagaaattctctcctagaatgatcacaactagaacacgaaaatgtccgcaactaggatggatctcttgtatctttccaatggagcatcaaaaacatatgtcctaaggatctccttattcccagagcccagaattcgcccatgagtttcccttaattccaccatccagagtctcagtcttggagaccaagctcttcttccaccccctttgagacctccttggtgattcattcaaaagtcaaagagacatggtggttccaaaacagatggagatcttgcccaatgtccctttgctctgttaagtatatgttaggagaactcacgtgaaggaaaatgttggaatcacctaatgtcccatgtccttagctagcatcaggatcttttcccttccatggagtcatttattcattcatgcagctacttgatatcttactcaaggctctccactaaagatgataagacctagtttctgtccttcactgttgtgtttatattctacttaagaggttattccagaagctcttacacaaggttgaagcagtcaagtgccattaaagagatttgactaattaactccaggagtttagaggtctacagctccaaatttaagaattatgggagtggaagtgggaacatttatagtatttggatatgcttaaacaagcaacagaggggttatctcaggcagagagaaccgttattcaaagacacaatgttaaaatcacaagtgatctagtctagctggaagggtgcagaaagaaagttggaaagggccgttgtcagatcatagaggacctggactcccagaatgagaattttggcttttcttctgctccctgttttgtaggttatagggagtagcaaagtatttggggcagaagtttggcaggtttagaatgtcaatttagcaaaattaatctggcatcatcctataagactgattgaaaaaggagagagtggggaagtagaaacccattaggaaagagcagggttggctggtaatcctcaaccaaaaatttctccccaaaacctttgagggacaacaggcttccaaagtgttcttagagtgtctcatttcctcagagttctatattcaagggaaatccctcagtagatatcctagcttggacctacacctaaggtcttagaaaaaaaacaaggctaccttgttcccaggtccccatgtactcctgaacggcaagcagtggaatgatggcaggtacagcgagatgccagagggtttgatgagggcaagagtcaacagaccctggccaaagactcttggtttttcctttaaatgttaagatgtttcccatcaaatttctctccacttattcacattgttaatgacttaatcagtgaaagctctcaggagtattattaaatttttcaaatagttggcccaaagtattgaatccctaaagatggtcctttagacagttaacatacacatgttcctggcatctcccgaatcatagtgtgcaaatgatcactatttgtgtgcatataggactaggctaggcaggtaaccacatctgagcgcctccatttgtgacttgtgaacctgatacaacatgtccaatctgataaaataaaaagcatccagccagtgaagaggacgtgtaccctggctgatatcttggaccttcatctgctaaatgacaggaagaaatttgccataaaaggaaatgatggacccaacaggtagcttatactcccttcatgttttgacctctagagaagacttcaagtctttacagccaaacgggagaggcagccaccctccatgtgcctcccctagaaaaatccatctggatttggggcctggggaagggcactgtgagggcggccgagtacagcatcctcgctgccgtgtggtaagagtgacatctggtggctgccatgctcaggctcagtgctcttccatcaaccctgcaagggcaatggaggacttcggagaccacttaggtgccccaggtggaagggaccatgcagatgaaggaaatggagctcacgatggggaatgggggtttgatttgctcaaagaccttctagataatcttgagattagacttagtttcctggattctaggacagggttcttgtgtcctgcttatttcctttatcgttctttctaatcaaagtttgagatatacaaaaggccacatggaacatatgtgtagttattcagcataatgatgaaaagaaaagctatgggtccttctagaatccaactagaacactgaaattcttacatgcctctgggtactcctcttgtctcccatcccctctgcatttatcctgaagttttgtgttttccattcccctgctttttaaaaatacttttatcttaaatgtatatatccttaaacaatatactgtataatttgtttgctttcctgatcctttctaagaaattatttacatggattttctctctccaaagaagatggtgacaactcacaaagatacctgcttttccccagaactatagctttgctgtaatgtactaacattgaggatttctggaagagagagagccatggcatgacagccttatcagagggtagcctcaagctaagatcttaaaaaataagtactgatttaaattatatttagaaggcaattcacacatccaccttagattttttaaaaattcattcattcattgaaaaacatttcctgattgattagtttgattgtcctcatacactaatgatgcccaggaatctctccacattctgcttgtaatccacaggaatcattatttcaggatgagggaaaggcaattctgaataattgacctgaactttcttaggggccctcaatcttaacgatgggctcaggcactatattttataaaaagaaaataaataagacataatatctcacaaatattagtaggacaattaaatagatcatctgaaatcaggtgtagtggaaagtcaaggatggcagttgccatgctgcactgagccccccttatacttagctcttgctgagttaagagggaaccatgagtgtgagaaagactaacaagtgagtgaaaaactagacagtaataccaggaggaaggccaagaaatgtatcactaatttcttgtttgatttcagagctggaaacaacttctggtggattcctgtagtgggccctttggttggtgctgtcattggaggcctcatctatgttcttgtcattgaaatccaccatccagagcctgactcagtctttaagacagaacaatctgaggacaaaccagagaaatatgaactcagtgtcatcatgtagtggcatgctcagctctggatttgcagtcagtttgggattctcttcagaaagatggcatctaagtgtctgtgttcttgtaagcctgaggtggaatccacccagttttgtctgctagccatatgggacatctaattggaaaagcatctgcataaaagtttggaaacaatgaccacttctctaccattgtcccccacccccaccccccagaataacgctgactgtcccctgaaacagccttctctcctgccctgtttatttcatcctcgatgggaattcttgctaggtaagcactaataactcggcatcttgacgatagtcccatttgggtggtttcagctgcactatctgtatgaaatggtgtcaccaaaacccttttcttcagtatcgacaaagattacattctgagtaccaaccaaaccctaaattgaaagacaaaactatggtttcagtcaacatattcatgaattagggagctaatgggttaagcttccagttcccgctatgctactggatttgtataaatactgatattctccaaacctagtggtgtagggagcaagagaatgcagctggaaggcacaaggggaggacattgtggcattcagaaactgcaggagacaagatgaatttgagaagccaaatggaatttttaatggaaaccatttatcagattaatctcttgctctcctgcattttagaggacaccaattaatttcctggtctttagtatataataacctaaaataccattgtaacctcagtcatgaaaaatacatcactctgtctttttagctcaaatgtattttcctaattgcccacttgagaacagacatttgacaagttatatcaacgactgtgcttgtccattattttacacatgccctagaagccaaaactgaaagccactggatcctggtctagctgaatcttcagagtgggaggtctccaaaaagatattaccttattgggcttaacaattcacaaggcactttcacacccattatctaatttaatcctcataatgactatgtgaggcaaatgccacattgcccatttttcagataaagaaacaaaatcttagggaagataagttgagttgtccaagagcacactgaaagttgaatgttatctaatgcattcctctacctttcagaagatcagtagctggctgacaatctttgccaaatcttccttgctagccagaagtggaattggcagcttctagaatatgtacacctctggacaaaatgttcctcaatcttaagatacaaagaccctcattgtctgggtctattcccacacttactgagtacagatgaaggaaagtggtagcaatttaatcataactttcatttgctgaaaaacattatgagaaggcctcccttcctaagccacctctggtcttgctaagtcttgatcttgcttcctgccagcaccaaacattacattcaggggatttcctctggctcagtcttttccccttgaagttctctaatagatgttacttttgacaaaagatcgcctatgagttacaagcaccaggggatgctctacatcaagggatgcaccttcagtcaaactgtcaaaaagcccagaattcccaaaggcattaggtttcccaactgctttgtgctgatatcagaacagcagaaattaaatgtgaaatgtttctgatgacttatgttctacaatctatggacatacgggatttttttttcttgctttgaagctacctggatatttcctatttgaaataaaattgttcggtcattgttgg

SEQ ID NO: 1201 - DNA, 336 bp, Homo sapiens
tttaaagatacatctcttttgagcttgtttttatatcctctgggcatggccggaggaactgctagatatagatttaaatcttatacatatattggataagcatattgacttttaaaagatatcgaagttaatagctacatcagtctgtttggggtgactgctttatagatagagggattcaagcctattaaaaaaacagccacttgagcacatcaagtttctttttatacctgactctcttttcatcaagataaacattctaaactgttatccaaggatgccatgaaaatgatcattcctccttctctccctgctcagatacacactctctctttc

SEQ ID NO: 1202 - DNA, 336 bp, Homo sapiens; identical to SEQ ID NO: 1201

SEQ ID NO: 1203 - DNA, 10558 bp, Homo sapiens
gccatggttgcttgttatccgggcaatggaacgggttatgtacgtcatgttgataatccaaatggagatggaagatgtgtgacatgtatatattatcttaataaagactgggatgccaaggtatgcaacttaattgagcatttatttttttcttacaggtgtctttttctcaaaagcattaagtttcatacttctgataagactgtcacagacacagttaaaaattttcctcttaaatttgtttcagtctcaggtattaggagtggatttttgtaaaatgaaacaaatactactctatgttatacaacatgatacctgtagttaacaacgtagtgttgtgcacttaaaaatttaagagggtagactccatgttcagtgttctaaacacacacacatacacacacacacacacacacacacacgcacacacgaggttaggggaagggaaacggaactttgagaggtgatggatatgtttattaccttggttgtggtgtgtcatgagggtgtgcgtatatatccaaactcatcaaattgtaaatgttaaagatatgcatttttgtatatcagttatacctcaaaaccatataaaaaagtactgatatatcttaaaaagtggattcatttattttcagatgttagagcacttatctaaaatctaacttttttagaaaggtgacctttattaaaatattttccttttaatagtttttagaaaaacatttctgagaacagttgttttataatggcttttgggggagattatctatggataattgttaaggattatttgctatgttattcttggcatttttgtaaaaatattatatggcattgagttgtttaattgaatattggaggcaggattcagtctttccctgattattaaaaaactggaagtttatcagtactgacaagccctgtaaaaccaattagaatgtacaatatatttaatctctcttgttttaaatatatatttccttaatattagcctgagtctcattaaatttaaatgatttttaaaaaatatgtcatatattactacactagagactgtacagactaattttttggttgattttttaaaatcttaagtataacattcaaatagaaaagtggcttgtatagttcagtggattttcacaaagtgaacatacctgtgtagccagggtgcctttttttgttgtttttaagtcaaataacctttaaaaaacctctttctctgcatcccccaaaacacacaaatggaaactgcctgagtcttaaatgtgcaaaaacctaatcctgccctaaaaagtgttttaagtttagaatatgctcacagtgcttcactaatctttctaaaacacactgatttaaagagttttctctgccctagtccaggttcaaaatggagctgacctttctgctgagtatatattgaggcatgtcaacaagcatggtttttctgttacagctttcaaagtttgaagtagagaaataaattttgtaattgaatttgagcccaaggcacaaaacagatgggtgtaactttagttaaaatttaaaaattgactttttttcagattttgtgaatagctagaaagctagaactgtgtttcatcagcttctaacttctagattttgttaggctttttctaggctgatcttataatttctataatacttagtcagggtcattaatgtgtaggttttaaattaggacataggcagagaaacgtccctagtgtttttgtgtgtagaatagaaattttccatgctagattgcactgaatatgtagtgtgtcagttgttctggatgctagggatgtagcagaaacggaattagccctggcagagcttaggatctattggaggatacagatcagaaagattgacagttacagatagttatgcaaagtgtcaagacagattgctatggagcacacaggagggccacctaattcagaggaggaagagtggaagtgtcaagtagccatttcacttaaaacattttcagcaggtcacctgtggtactcccaatgacttgagtcaaagggaagggagcaggaaaaaaggaaagaagacatgttctcagtttggaggttctttagatgtttgcatagtagcctggggaatcactctgaacaacactggaacctgaggaaggttggcaagggtatcaaagtagctagaatttaacttacctgacagtgagcctgataaaccttttctttaactatagattctaggtttaggctcaaacgccatgttgtcctgaccaggtgttagagtttctttaaattttaagagtctacctgcttaggagtgtagttattcaagagtaaggagctacttggttggttgggttttgcctatccccagatcgtaaaccccgcaaggacaaagtctgtctgcattattccctactctgcacccagagcccaccacagttcccagtgcgatttgatgcctagttggtgtttaggtaaataataatcctttatgggtagaatcaagtttcacaagcaggtagtcatctgtgcatcaggcccagtctggaaagggagagccacaggttctaatgaactatatgctgatggtgatggtgacgacgacaataatgatggtcataataaatgatgacactttctactgatatactgaattatttaagtaagaggtatttgtgactatcctattgtttattgaattttaaagtatggtaaactatttgacataatttatttctaataataattttgtcaaaatttcttgaaatctatctatttgaagggtgggttaagcaaatcattaacatacaaaaataaacgtttagtagttttaaaagctttcaagcatcattttaagacttttaaattcagataacattcttgtgtttcatcagatatttataaaaatccctaaaatggctggggacagtggctcacacctgtaataccagcactttgggaggccgaggtgggcagatcacctgaggtcaggagttcgagtccagcctggccaacatggtgaaaacccatctctactaaaaatgcaaaaattagctggacatggtggcgcatgcctgtaatcccagctactcgcgatgctgagacaggagaattgcttgaacctaggaggcggaggttgcagtgagctgagattgtgccactgcactccagcctgggtgacagcgagactccatctcaataaataaataaatatccctaaaataagaactaaatttgtccttgcatcagtgcatatacttttaaaattgcagctcatcttcatactttattgagacgtatttgtgaataatccaattaagacattgaaattgtctctttttttccccctaaatttaatcttgtagcatttttggttactcctgcttacatatttggctcttttcctaggtaagtggaggtatacttcgaatttttccagaaggcaaagcccagtttgctgacattgaacccaaatttgatagactgctgtttttctggtctgaccgtcgcaaccctcatgaagtacaaccagcatatgctacaaggtagtattccttttcagaaaaaattggtttagagtatggtaggacaggagggaatctgtagagtaaacgtgaaagctttctaatgagtattttcctgccaggtacttttcacagtcattttaatttgaataattgtataagatttatgttgcacagtcatctgaattcaaataattatataagactcattaacagttagtactaaatgtgtctttctttgcacagccactctgaagaaagggaagcacaggccttcccatctttctagcactctctccgtgctttgtgcatctcttaactactatccatgctttgatttttgtaagagtattttacttgggagagagaaagatcaagaaggaaaagggttttttaaaaggtggtgagggacaacataggaaaatggatacagagtagaaaaatcagaggtaaccagagagtagaagtgaagagaaaaacagaagaaagaaaagtagagaacaggttaccatgtgtgggagttaatgttagaaaaatgatcctattagctttacaaataatgagcatctgtttcattatactttttctacaaggtatttgcaacctattatatttagtgctttatttcaaatgcttttttaaaaaccatttatcctgactcaattaaaatgctctggctgtgaaaacaagatattgtagacattatcatgaaagtaaatatttgtagaaaaatagcacattaaaaaaaaatacttattttttattatggaaaggtcttggaacattctgatagtgagcttccggcattcatttgctgtatctggcttaggagatgctagggtggcaagaagaggcacaggcttagatgcgctgggtggagagttggctttagtaatgatggttgactctaacgacttgattatcagctgtgccttttttcttcctgccttctgaggtgtgttgcctgcatcctaattcacgtactgagtagcaagctaagcaggttgtagctggagattgtaagaaatcctgaatggaaaccaaagaaagactgtcacatcacatgatgtgcccttttcaatcccatgtctcttcccagtggcatcccagtgctgtctctgccccctgctgcttctgtaaagattttctgacacagtaactgcctcatagaccttcctttttatgaaatcctgagtttggtttggttacgtcctttttagatgaataaataacagatacttgggagtttatagtaaataaatgccagatggcatggaggctaagtgctacaggagttgaggaacgaaggtggtgctacattggagagacgggcaagtgcgctttgaagggagaggctcagctggcctaggtgaggagaggcaaggggtgcagtcgtgttagtaaagttctgggggaaaaggcgtagttgttcaagttaaggcatggaaaatcatgcgacgaaaaggattcttgaagtagaatcctattctgatcttatctagaatgggtgataaggctggaaagttagaatgacataaggtaagttgttgatccagatattagaattctgattgctaagtgactaaaagtttagggcatgggcaaaagatacataaaattatgtatctgagccctttcctatttccaaggccacccaaaagtagaagaagccacatggtaagaaaggtagtggaactctggaaagagcagagtctggtctggaagtcaggagacctccttagacctcagctctgtgattcaccagtggtggggtctgtaaacgtcaggctcccagttgtccaaactcccagactctttacttcaaaatacattatgtgatttttcattctgtcatattactggctgtatgtctgataaatgttgccttttcccctgtgtccactggccacaatccacaatatatttgaactaattgctatattctgcccaggaactggtgatttgtagcgtactttcacttcctatagcgtttatacattttccccattatttgtatcagaaagtatgtcttttgtagtatttaataaactagagatgcctcacttattggtggaatgaaatattctaagtcagattttcagaaaaatgaagtttagacaaagtttaaacacaaaacacagtataattgctttgattaaaatccttaaaaattcttagcataatttaactgtcaaggttataattgtaaacatccatcattactctttgctataatgtagtgatgtccccagagactgttgaaactgttagcctgcaatgccctgagtccttttatctgtttcttttctgttcttttagtacttgtgctattgataatgtgctttttctgtaacagccattcttttacccttttattgtctctctttttttttagagggaggctcactctgtcacctaggctggagtgcagtggcatgatctcggctcactgcaacctccgcctccccgggttcaagcgattctcctgcctctcagcctcctgagtagctagggctacaggcatgtgccaccatgcacggctaattttttttttcttttttttagtagagatggggtttcaccctattggccaggttggtctcgaagtcctgacttcatgatccacccacttcggcctcccgaagtgctgggattacaggcgtgagccactgtgcccggcctattgtctctttctgatctgcagttcccttgcaaaaaataagtagttgaaataagtattaagaaagtcacaaaaactcatcaacttcagacatcaattttagtctcccctggttactgtataaataagctgttaaatttatcctttgatatcattccagtttaggcataattttggcattacaagttttaatataccattgcagcaaaataccactttttccccgcagtgtgatcattcttatcctattctaaattttcttttaggtacgcaataactgtttggtattttgatgcagatgagagagcacgagctaaagtaaaatatctaacaggtaaacgtcatttggggccaggatatattggtacagaaataccctgcaatcaggtgatgctttcaggaaactcaagcatagtctttgttaacaccatgaatacttactttttgttttttatcagatttcttatttgcctcattttttaagaagacataagtcatcttcactgttatctttaaccaaaaaaattgtcaaaggatgtggaaaatttgaggcaaagaagtctgagtaaattattcacatacaaactgagttttctgtgattatccttttcagtcaaaggccacttaactctaggtaacggccatatggtttcctctcattcactccttaaattaataccctttccttttcaaatggatgtgctctaaacagtactctaggtcttccatgttaaatgtagacatgaagaaaattaatacaaagaattatgaattcaaatgccaaaatcagtaaatgacacagacatgtagattccatatctgctaatggtgtacataggtcagcactcttgtactgaacctgaagatcctttaattatgccagttccccttctcttccacttatggactgcctctccaagagcagggggtctgtttcccatctgatggaccacttaccttcttttctttaactctactttctatctccaaaaatccactgagtattcacattactgattagctgtgttttccagagccattgctaatcgcacgtcgaccttacataaaaatggaatattcatgcattttctatgtatttttaaagccattatttgtggcacaagctcagtgtgctttcagagacactgaacactctgttgaagaaactcaaatggcttttaaaataaaaagacaaaatcattatctctgtgtagaggatggttttatccttgaaggtttactatttgaaacctcatcacaatagaatgctgagggaagtttttggaagtacaagcgtgatagttctcagatgatgtttgcaaagttgaaatattgtccatactcttaggaattcagtggaatgcagtagcagaagctctctggtgcttagtgaatgaatgaaaattttttttttttttaccttgcaggtgaaaaaggtgtgagggttgaactcaataaaccttcagattcggtcggtaaagacgtcttctagagcctttgatccagcaataccccacttcacctacaatattgttaactatttgttaacttgtgaatacgaataaatgggataaagaaaaatagacaaccagttcgcattttaataaggaaacagaaacaactttttgtgttgcatcaaacagaagattttgactgctgtgactttgtactgcatgatcaacttcaaatctgtgattgcttacaggaggaagataagctactaattgaaaatggtttttacatctggatatgaaataagtgccctgtgtagaatttttttcattcttatattttgccagatctgttatctagctgagttcatttcatctctcccttttttatatcaagtttgaatttgggataatttttctatattaggtacaatttatctaaactgaattgagaaaaaattacagtattattcctcaaaataacatcaatctatttttgtaaacctgttcatactattaaattttgccctaaaagacctcttaataatgattgttgccagtgactgatgattaattttattttacttaaaataagaaaaggagcactttaattacaactgaaaaatcagattgttttgtagtccttccttacactaatttgaactgttaaagattgctgctttttttttgacattgtcaataacgaaacctaattgtaaaacagtcaccatttactaccaataacttttagttaatgttttacaaggaaaaagacacaagaagagtttaaatttttttgttttgttttgtttttttgagacagtcttgctctgttacccaggctggaggggagtggtgcattcttggctcactgcaacctccgcctcccaggttcaagcaatcctcccacctcagcctcccaactagctgggactgcaggcacacaccaccatgcctgactaatttttgtatgtttagtagagacggggttttgccatgttgcctaggctggggtttaagttaaattttttaaaaaactaaagtgactggcactaagtgaacttgagattatcctcagcttcaagttcctaagataagggctttcttaagctttcaggtgtatgtatcctctagatgtagacaataatgtcccatttctaagtcttttccttttgcttctccttaaattgattgtacttccaaatttgctgttatgtttttttcctaatactgtgatctatctgatctgcagacaagaaccttgtctctgttgaagagcatcaaggggagattatgtacacattgaaactgaagtgtggtgttactgacggaatgtgcagtaactcctcagatatctgttaaggcatttcccagatgtgatgccagccttcttacctgtactgaaagatgcttagcttagaaaaaaacaaaacagatgcaaaatcagataattttattttgtttcatgggttttcttatttactttttaaacaaggaaggaatattagaaaatcacacaaggcctcacatacatgttatttaaagaatgaattgggacggatgtcttagacttcactttcctaggctttttagcaaaacctaaagggtggtatccatattttgcgtgaattatgggtgtaagaccttgcccacttaggttttctatctctgtccttgatcttctttgccaaaatgtgagtatacagaaattttctgtatatttcaacttaagacatttttagcatctgtatagtttgtattcaatttgagaccttttctatgggaagctcagtaatttttattaaaagattgccattgctattcatgtaaaacatggaaaaaaattgtgtagtgaagccaacagtggacttaggatgggattgaatgttcagtatagtgatctcacttaggagaatttgcaggagaaagtgatagtttattgttttttcctcgcccatattcagttttgttctacttcctccccttccttccagatgataacatcacatctctacagtaagtgcctctgccagcccaacccaggagcgcaagttgtctttgccatctggtctatagtacagtgcgcggcgttaggccacaactcaaaagcattatcttttttagggttagtagaaattgttttatgttgatgggaggtttgtttgattgtcaaaatgtacagccacagccttttaatttgggagcccctgttgtcattcaaatgtgtacctctacagttgtaaaaagtattagattctactatctgtgggttgtgcttgccagacaggtcttaaattgtatattttttggaaaagtttatatactctcttaggaatcattgtgaaaagatcaagaaatcaggatggccatttatttaatatccattcatttcatgttagtgggactattaacttgtcaccaagcaggactctatttcaaacaaaatttaaaactgtttgtggcctatatgtgtttaatcctggttaaagataaagcttcataatgctgtttttattcaacacattaaccagctgtaaaacacagacctttatcaagagtaggcaaagattttcaggattcatatacagatagactataaagtcatgtaatttgaaaagcagtgtttcattatgaaagagctctcaagttgcttgtaaagctaatctaattaaaaagatgtataaatgttgttgaaacattatggtggttatttccagctgtcttttttgtttttcaatcctttatcatacattggctttccgaatgatccctttcatcagataaagcttttctggcttagtctaggacatttgttataactttttgtaaatgataatgaaggaaagagaacagtaaacataggagttcaacaattttagaaacatccctggggtcattggactgtctgtg

SEQ ID NO: 1204 - DNA, 10554 bp, Homo sapiens
gccatggttgcttgttatccgggcaatggaacgggttatgtacgtcatgttgataatccaaatggagatggaagatgtgtgacatgtatatattatcttaataaagactgggatgccaaggtatgcaacttaattgagcatttatttttttcttacaggtgtctttttctcaaaagcattaagtttcatacttctgataagactgtcacagacacagttaaaaattttcctcttaaatttgtttcagtctcaggtattaggagtggatttttgtaaaatgaaacaaatactactctatgttatacaacatgatacctgtagttaacaacgtagtgttgtgcacttaaaaatttaagagggtagactccatgttcagtgttctaaacacacacacatacacacacacacacacacacacacgcacacacgaggttaggggaagggaaacggaactttgagaggtgatggatatgtttattaccttggttgtggtgtgtcatgagggtgtgcgtatatatccaaactcatcaaattgtaaatgttaaagatatgcatttttgtatatcagttatacctcaaaaccatataaaaaagtactgatatatcttaaaaagtggattcatttattttcagatgttagagcacttatctaaaatctaacttttttagaaaggtgacctttattaaaatattttccttttaatagtttttagaaaaacatttctgagaacagttgttttataatggcttttgggggagattatctatggataattgttaaggattatttgctatgttattcttggcatttttgtaaaaatattatatggcattgagttgtttaattgaatattggaggcaggattcagtctttccctgattattaaaaaactggaagtttatcagtactgacaagccctgtaaaaccaattagaatgtacaatatatttaatctctcttgttttaaatatatatttccttaatattagcctgagtctcattaaatttaaatgatttttaaaaaatatgtcatatattactacactagagactgtacagactaattttttggttgattttttaaaatcttaagtataacattcaaatagaaaagtggcttgtatagttcagtggattttcacaaagtgaacatacctgtgtagccagggtgcctttttttgttgtttttaagtcaaataacctttaaaaaacctctttctctgcatcccccaaaacacacaaatggaaactgcctgagtcttaaatgtgcaaaaacctaatcctgccctaaaaagtgttttaagtttagaatatgctcacagtgcttcactaatctttctaaaacacactgatttaaagagttttctctgccctagtccaggttcaaaatggagctgacctttctgctgagtatatattgaggcatgtcaacaagcatggtttttctgttacagctttcaaagtttgaagtagagaaataaattttgtaattgaatttgagcccaaggcacaaaacagatgggtgtaactttagttaaaatttaaaaattgactttttttcagattttgtgaatagctagaaagctagaactgtgtttcatcagcttctaacttctagattttgttaggctttttctaggctgatcttataatttctataatacttagtcagggtcattaatgtgtaggttttaaattaggacataggcagagaaacgtccctagtgtttttgtgtgtagaatagaaattttccatgctagattgcactgaatatgtagtgtgtcagttgttctggatgctagggatgtagcagaaacggaattagccctggcagagcttaggatctattggaggatacagatcagaaagattgacagttacagatagttatgcaaagtgtcaagacagattgctatggagcacacaggagggccacctaattcagaggaggaagagtggaagtgtcaagtagccatttcacttaaaacattttcagcaggtcacctgtggtactcccaatgacttgagtcaaagggaagggagcaggaaaaaaggaaagaagacatgttctcagtttggaggttctttagatgtttgcatagtagcctggggaatcactctgaacaacactggaacctgaggaaggttggcaagggtatcaaagtagctagaatttaacttacctgacagtgagcctgataaaccttttctttaactatagattctaggtttaggctcaaacgccatgttgtcctgaccaggtgttagagtttctttaaattttaagagtctacctgcttaggagtgtagttattcaagagtaaggagctacttggttggttgggttttgcctatccccagatcgtaaaccccgcaaggacaaagtctgtctgcattattccctactctgcacccagagcccaccacagttcccagtgcgatttgatgcctagttggtgtttaggtaaataataatcctttatgggtagaatcaagtttcacaagcaggtagtcatctgtgcatcaggcccagtctggaaagggagagccacaggttctaatgaactatatgctgatggtgatggtgacgacgacaataatgatggtcataataaatgatgacactttctactgatatactgaattatttaagtaagaggtatttgtgactatcctattgtttattgaattttaaagtatggtaaactatttgacataatttatttctaataataattttgtcaaaatttcttgaaatctatctatttgaagggtgggttaagcaaatcattaacatacaaaaataaacgtttagtagttttaaaagctttcaagcatcattttaagacttttaaattcagataacattcttgtgtttcatcagatatttataaaaatccctaaaatggctggggacagtggctcacacctgtaataccagcactttgggaggccgaggtgggcagatcacctgaggtcaggagttcgagtccagcctggccaacatggtgaaaacccatctctactaaaaatgcaaaaattagctggacatggtggcgcatgcctgtaatcccagctactcgcgatgctgagacaggagaattgcttgaacctaggaggcggaggttgcagtgagctgagattgtgccactgcactccagcctgggtgacagcgagactccatctcaataaataaataaatatccctaaaataagaactaaatttgtccttgcatcagtgcatatacttttaaaattgcagctcatcttcatactttattgagacgtatttgtgaataatccaattaagacattgaaattgtctctttttttccccctaaatttaatcttgtagcatttttggttactcctgcttacatatttggctcttttcctaggtaagtggaggtatacttcgaatttttccagaaggcaaagcccagtttgctgacattgaacccaaatttgatagactgctgtttttctggtctgaccgtcgcaaccctcatgaagtacaaccagcatatgctacaaggtagtattccttttcagaaaaaattggtttagagtatggtaggacaggagggaatctgtagagtaaacgtgaaagctttctaatgagtattttcctgccaggtacttttcacagtcattttaatttgaataattgtataagatttatgttgcacagtcatctgaattcaaataattatataagactcattaacagttagtactaaatgtgtctttctttgcacagccactctgaagaaagggaagcacaggccttcccatctttctagcactctctccgtgctttgtgcatctcttaactactatccatgctttgatttttgtaagagtattttacttgggagagagaaagatcaagaaggaaaagggttttttaaaaggtggtgagggacaacataggaaaatggatacagagtagaaaaatcagaggtaaccagagagtagaagtgaagagaaaaacagaagaaagaaaagtagagaacaggttaccatgtgtgggagttaatgttagaaaaatgatcctattagctttacaaataatgagcatctgtttcattatactttttctacaaggtatttgcaacctattatatttagtgctttatttcaaatgcttttttaaaaaccatttatcctgactcaattaaaatgctctggctgtgaaaacaagatattgtagacattatcatgaaagtaaatatttgtagaaaaatagcacattaaaaaaaaatacttattttttattatggaaaggtcttggaacattctgatagtgagcttccggcattcatttgctgtatctggcttaggagatgctagggtggcaagaagaggcacaggcttagatgcgctgggtggagagttggctttagtaatgatggttgactctaacgacttgattatcagctgtgccttttttcttcctgccttctgaggtgtgttgcctgcatcctaattcacgtactgagtagcaagctaagcaggttgtagctggagattgtaagaaatcctgaatggaaaccaaagaaagactgtcacatcacatgatgtgcccttttcaatcccatgtctcttcccagtggcatcccagtgctgtctctgccccctgctgcttctgtaaagattttctgacacagtaactgcctcatagaccttcctttttatgaaatcctgagtttggtttggttacgtcctttttagatgaataaataacagatacttgggagtttatagtaaataaatgccagatggcatggaggctaagtgctacaggagttgaggaacgaaggtggtgctacattggagagacgggcaagtgcgctttgaagggagaggctcagctggcctaggtgaggagaggcaaggggtgcagtcgtgttagtaaagttctgggggaaaaggcgtagttgttcaagttaaggcatggaaaatcatgcgacgaaaaggattcttgaagtagaatcctattctgatcttatctagaatgggtgataaggctggaaagttagaatgacataaggtaagttgttgatccagatattagaattctgattgctaagtgactaaaagtttagggcatgggcaaaagatacataaaattatgtatctgagccctttcctatttccaaggccacccaaaagtagaagaagccacatggtaagaaaggtagtggaactctggaaagagcagagtctggtctggaagtcaggagacctccttagacctcagctctgtgattcaccagtggtggggtctgtaaacgtcaggctcccagttgtccaaactcccagactctttacttcaaaatacattatgtgatttttcattctgtcatattactggctgtatgtctgataaatgttgccttttcccctgtgtccactggccacaatccacaatatatttgaactaattgctatattctgcccaggaactggtgatttgtagcgtactttcacttcctatagcgtttatacattttccccattatttgtatcagaaagtatgtcttttgtagtatttaataaactagagatgcctcacttattggtggaatgaaatattctaagtcagattttcagaaaaatgaagtttagacaaagtttaaacacaaaacacagtataattgctttgattaaaatccttaaaaattcttagcataatttaactgtcaaggttataattgtaaacatccatcattactctttgctataatgtagtgatgtccccagagactgttgaaactgttagcctgcaatgccctgagtccttttatctgtttcttttctgttcttttagtacttgtgctattgataatgtgctttttctgtaacagccattcttttacccttttattgtctctctttttttttagagggaggctcactctgtcacctaggctggagtgcagtggcatgatctcggctcactgcaacctccgcctccccgggttcaagcgattctcctgcctctcagcctcctgagtagctagggctacaggcatgtgccaccatgcacggctaattttttttttcttttttttagtagagatggggtttcaccctattggccaggttggtctcgaagtcctgacttcatgatccacccacttcggcctcccgaagtgctgggattacaggcgtgagccactgtgcccggcctattgtctctttctgatctgcagttcccttgcaaaaaataagtagttgaaataagtattaagaaagtcacaaaaactcatcaacttcagacatcaattttagtctcccctggttactgtataaataagctgttaaatttatcctttgatatcattccagtttaggcataattttggcattacaagttttaatataccattgcagcaaaataccactttttccccgcagtgtgatcattcttatcctattctaaattttcttttaggtacgcaataactgtttggtattttgatgcagatgagagagcacgagctaaagtaaaatatctaacaggtaaacgtcatttggggccaggatatattggtacagaaataccctgcaatcaggtgatgctttcaggaaactcaagcatagtctttgttaacaccatgaatacttactttttgttttttatcagatttcttatttgcctcattttttaagaagacataagtcatcttcactgttatctttaaccaaaaaaattgtcaaaggatgtggaaaatttgaggcaaagaagtctgagtaaattattcacatacaaactgagttttctgtgattatccttttcagtcaaaggccacttaactctaggtaacggccatatggtttcctctcattcactccttaaattaataccctttccttttcaaatggatgtgctctaaacagtactctaggtcttccatgttaaatgtagacatgaagaaaattaatacaaagaattatgaattcaaatgccaaaatcagtaaatgacacagacatgtagattccatatctgctaatggtgtacataggtcagcactcttgtactgaacctgaagatcctttaattatgccagttccccttctcttccacttatggactgcctctccaagagcagggggtctgtttcccatctgatggaccacttaccttcttttctttaactctactttctatctccaaaaatccactgagtattcacattactgattagctgtgttttccagagccattgctaatcgcacgtcgaccttacataaaaatggaatattcatgcattttctatgtatttttaaagccattatttgtggcacaagctcagtgtgctttcagagacactgaacactctgttgaagaaactcaaatggcttttaaaataaaaagacaaaatcattatctctgtgtagaggatggttttatccttgaaggtttactatttgaaacctcatcacaatagaatgctgagggaagtttttggaagtacaagcgtgatagttctcagatgatgtttgcaaagttgaaatattgtccatactcttaggaattcagtggaatgcagtagcagaagctctctggtgcttagtgaatgaatgaaattttttttttttttaccttgcaggtgaaaaaggtgtgagggttgaactcaataacctttcagattcggtcggtaaagacgtcttctagagcctttgatccagcaataccccacttcacctacaatattgttaactatttgttaacttgtgaatacgaataaatgggataaagaaaaatagacaaccagttcgcattttaataaggaaacagaaacaactttttgtgttgcatcaaacagaagattttgactgctgtgactttgtactgcatgatcaacttcaaatctgtgattgcttacaggaggaagataagctactaattgaaaatggtttttacatctggatatgaaataagtgccctgtgtagaatttttttcattcttatattttgccagatctgttatctagctgagttcatttcatctctcccttttttatatcaagtttgaatttgggataatttttctatattaggtacaatttatctaaactgaattgagaaaaaattacagtattattcctcaaaataacatcaatctatttttgtaaacctgttcatactattaaattttgccctaaaagacctcttaataatgattgttgccagtgactgatgattaattttattttacttaaaataagaaaaggagcactttaattacaactgaaaaatcagattgttttgtagtccttccttacactaatttgaactgttaaagattgctgcttttttttgacattgtcaataacgaaacctaattgtaaaacagtcaccatttactaccaataacttttagttaatgttttacaaggaaaaagacacaagaagagtttaaatttttttgttttgttttgtttttttgagacagtcttgctctgttacccaggctggaggggagtggtgcattcttggctcactgcaacctccgcctcccaggttcaagcaatcctcccacctcagcctcccaactagctgggactgcaggcacacaccaccatgcctgactaatttttgtatgtttagtagagacggggttttgccatgttgcctaggctggggtttaagttaaattttttaaaaaactaaagtgactggcactaagtgaacttgagattatcctcagcttcaagttcctaagataagggctttcttaagctttcaggtgtatgtatcctctagatgtagacaataatgtcccatttctaagtcttttccttttgcttctccttaaattgattgtacttccaaatttgctgttatgtttttttcctaatactgtgatctatctgatctgcagacaagaaccttgtctctgttgaagagcatcaaggggagattatgtacacattgaaactgaagtgtggtgttactgacggaatgtgcagtaactcctcagatatctgttaaggcatttcccagatgtgatgccagccttcttacctgtactgaaagatgcttagcttagaaaaaaacaaaacagatgcaaaatcagataattttattttgtttcatgggttttcttatttactttttaaacaaggaaggaatattagaaaatcacacaaggcctcacatacatgttatttaaagaatgaattgggacggatgtcttagacttcactttcctaggctttttagcaaaacctaaagggtggtatccatattttgcgtgaattatgggtgtaagaccttgcccacttaggttttctatctctgtccttgatcttctttgccaaaatgtgagtatacagaaattttctgtatatttcaacttaagacatttttagcatctgtatagtttgtattcaatttgagaccttttctatgggaagctcagtaatttttattaaaagattgccattgctattcatgtaaaacatggaaaaaaattgtgtagtgaagccaacagtggacttaggatgggattgaatgttcagtatagtgatctcacttaggagaatttgcaggagaaagtgatagtttattgttttttcctcgcccatattcagttttgttctacttcctccccttccttccagatgataacatcacatctctacagtaagtgcctctgccagcccaacccaggagcgcaagttgtctttgccatctggtctatagtacagtgcgcggcgttaggccacaactcaaaagcattatcttttttagggttagtagaaattgttttatgttgatgggaggtttgtttgattgtcaaaatgtacagccacagccttttaatttgggagcccctgttgtcattcaaatgtgtacctctacagttgtaaaaagtattagattctactatctgtgggttgtggttgccagacaggtcttaaattgtatattttttggaaaagtttatatactctcttaggaatcattgtgaaaagatcaagaaatcaggatggccatttatttaatatccattcatttcatgttagtgggactattaacttgtcaccaagcaggactctatttcaaacaaaatttaaaactgtttgtggcctatatgtgtttaatcctggttaaagataaagcttcataatgctgtttttattcaacacattaaccagctgtaaaacacagacctttatcaagagtaggcaaagattttcaggattcatatacagatagactataaagtcatgtaatttgaaaagcagtgtttcattatgaaagagctctcaagttgcttgtaaagctaatctaattaaaaagatgtataaatgttgttgaaacattatggtggttatttccagctgtcttttttgtttttcaatcctttatcatacattggctttccgaatgatccctttcatcagataaagcttttctggcttagtctaggacatttgttataactttttgtaaatgataatgaaggaaagagaacagtaaacataggagttcaacaattttagaaacatccctggggtcattggactgtctgtg

SEQ ID NO: 1205 - DNA, 2915 bp, Homo sapiens
ggttgaactcaataaaccttcagattcggtcggtaaagacgtcttctagagcctttgatccagcaataccccacttcacctacaatattgttaactatttgttaacttgtgaatacgaataaatgggataaagaaaaatagacaaccagttcgcattttaataaggaaacagaaacaactttttgtgttgcatcaaacagaagattttgactgctgtgactttgtactgcatgatcaacttcaaatctgtgattgcttacaggaggaagataagctactaattgaaaatggtttttacatctggatatgaaataagtgccctgtgtagaatttttttcattcttatattttgccagatctgttatctagctgagttcatttcatctctcccttttttatatcaagtttgaatttgggataatttttctatattaggtacaatttatctaaactgaattgagaaaaaattacagtattattcctcaaaataacatcaatctatttttgtaaacctgttcatactattaaattttgccctaaaagacctcttaataatgatggttgccagtgactgatgattaattttattttacttaaaataagaaaaggagcactttattacaactgaaaaacagattgttttgtagtccttccttacactaatttgaactgttaaagattgctgcttttttttgacattgtcaataacgaaacctaattgtaaaacagtcaccatttactaccaataacttttagttaatgttttacaaggaaaaagacacaagaagagtttaaatttttttgttttgttttgtttttttgagacagtcttgctctgttacccaggctggaggggagtggtgcattcttggctcactgcaacctccgcctcccaggttcaagcaatcctcccacctcagcctcccaactagctgggactgcaggcacacaccaccatgcctgactaatttttgtatgtttagtagagacggggttttgccatgttgcctaggctggggtttaagttaaattttttaaaaaactaaagtgactggcactaagtgaacttgagattatcctcagcttcaagttcctaagataagggctttcttaagctttcaggtgtatgtatcctctagatgtagacaataatgtcccatttctaagtcttttccttttgcttctccttaaattgattgtacttccaaatttgctgttatgtttttttcctaatactgtgatctatctgatctgcagacaagaaccttgtctctgttgaagagcatcaaggggagattatgtacacattgaaactgaagtgtggtgttactgacggaatgtgcagtaactcctcagatatctgttaaggcatttcccagatgtgatgccagccttcttacctgtactgaaagatgcttagcttagaaaaaaacaaaacagatgcaaaatcagataattttattttgtttcatgggttttcttatttactttttaaacaaggaaggaatattagaaaatcacacaaggcctcacatacatgttatttaaagaatgaattgggacggatgtcttagacttcactttcctaggctttttagcaaaacctaaagggtggtatccatattttgcgtgaattatgggtgtaagaccttgcccacttaggttttctatctctgtccttgatcttctttgccaaaatgtgagtatacagaaattttctgtatatttcaacttaagacatttttagcatctgtatagtttgtattcaatttgagaccttttctatgggaagctcagtaatttttattaaaagattgccattgctattcatgtaaaacatggaaaaaaattgtgtagtgaagccaacagtggacttaggatgggattgaatgttcagtatagtgatctcacttaggagaatttgcaggagaaagtgatagtttattgttttttcctcgcccatattcagttttgttctacttcctccccttccttccagatgataacatcacatctctacagtaagtgcctctgccagcccaacccaggagcgcaagttgtctttgccatctggtctatagtacagtgcgcggcgttaggccacaactcaaaagcattatcttttttagggttagtagaaattgttttatgttgatgggaggtttgtttgattgtcaaaatgtacagccacagccttttaatttgggagcccctgttgtcattcaaatgtgtacctctacagttgtaaaaagtattagattctactatctgtgggttgtggttgccagacaggtcttaaattgtatattttttggaaaagtttatatactctcttaggaatcattgtgaaaagatcaagaaatcaggatggccatttatttaatatccattcatttcatgttagtgggactattaacttgtcaccaagcaggactctatttcaaacaaaatttaaaactgtttgtggcctatatgtgtttaatcctggttaaagataaagcttcataatgctgtttttattcaacacattaaccagctgtaaaacacagacctttatcaagagtaggcaaagattttcaggattcatatacagatagactataaagtcatgtaatttgaaaagcagtgtttcattatgaaagagctctcaagttgcttgtaaagctaatctaattaaaaagatgtataaatgttgttgaaacattatggtggttatttccagctgtcttttttgtttttcaatcctttatcatacattggctttccgaatgatccctttcatcagataaagcttttctggcttagtctaggacatttgttataactttttgtaaatgataatgaaggaaagagaacagtaaacataggagttcaacaattttagaaacatccctggggtcattggactgtctgtg

SEQ ID NO: 1206 - DNA, 1016 bp, Homo sapiens
gatcaaaatacctgtttatatatctgttatttaaagaaaaattttccacagtgttttgttattttccagcgtttcttagaacatttgggaattacactaaaatatagctgggtggattgaagtaaagggcaaatgagtttgagatgaagtttgagatgtgcttttttatatacaaaaagcacatcttccaccttaaacagttgtatgagacctaaatgaaatacagtgtgcaaagtaccttacaatgcatggaacaaagtaggccttcaacgaggattattgccctttcctttaacaatatgatagcataattgcagagagagaaaattggggcaatgagctttgaatagctaacggttttatcagttgtaaatgtgaatcatttggaagcaggagtgttgtcttattaatgacaggtcttattttatagcttagatttaaattaagtcactggtgcaaggcacttcatcagattattttcccaaagtgcaaaagtgcatgtgatccaagaaagagagctgtatttgggtatgaactgcaatgatacatatttatgtcatatctaataacataattgtatgttggattttttcaattagtttataaatattcagaagtaactagtctccattgcttcaaaagataattgtttagacttctcaggtcatgaatttatccctcagattatgtttttggtttgaattttatctgaaccatggcgatgctcaagtatgtaccatgggaccaatgggaccaatgagatgtgtgaagggcatggcctcatgagctggaaatagtttcataagtagaacacactaaatgtcagccacttcacaagatggggagagcctaaacagctgcaagtagctaaagctctttttattgaataattactaaacagttgtcaaaaattattgataatttttgctctgaacaagatgtcattggggtcagaaagttactagatagggccttcattgagattaggatgttttctgccaaaattattccaaatg

SEQ ID NO: 1207 - DNA, 1016 bp, Homo sapiens; identical to SEQ ID NO: 1206

SEQ ID NO: 1208 - DNA, 416 bp, Homo sapiens
cagtaaatgacacagacatgtagattccatatctgctaatggtgtacataggtcagcactcttgtactgaacctgaagatcctttaattatgccagttccccttctcttccacttatggactgcctctccaagagcagggggtctgtttcccatctgatggaccacttaccttcttttctttaactctactttctatctccaaaaatccactgagtattcacattactgattagctgtgttttccagagccattgctaatcgcacgtcgaccttacataaaaatggaatattcatgcattttctatgtatttttaaagccattatttgtggcacaagctcagtgtgctttcagagacactgaacactctgttgaagaaactcaaatggcttttaaaataaaaagacaaaatcatta

SEQ ID NO: 1209 - DNA, 1016 bp, Homo sapiens; identical to SEQ ID NO: 1206

SEQ ID NO: 1210 - DNA, 1121 bp, Homo sapiens
gtcttgatcttgttaccgaaatgcattctgtgtaatttcaacgtagactacgttcctgagtctgatgatgtcattgtaaataatcattcctcatgttgctctcacgggtttgacattggaggatagatgtgccatcaactttaaatagagtttccatcttttgtcagctctgcatgtcatacagcaagatggaacacaggttgcaagaaagaaccaacgttattcctgacattctattgatgtgttttgagcagcaatgtgtaaccaggtgtttctgcttctaatcttgattctgctgatgaccatttttatactttatggcaaagcctcattgcctcagtttcctgtctggaaaatgagttcatcatctacctcttgggcaattgagagttttcattttgtgtcttttaaacatctggaaaatggaaaacactgagggctaaggataatgatattgtttaatgtaatttgtcatcagaccggcctcctgctcactatttctttttttttagatgctgtttttttagaatattaaattaaaggagtgctgttaatatgtaatcttcaactagttccatggaggaaagtgatgttttatgaattagagcttaaattcctatctaatttctgaagactgcattcttttcaaagacttgaaattaaactcaggaggatacattttgtttgttctagggggaaacgtaatagaatggtatgagatgaattctatccttttacaataattattactataatattgaagtattctatgcctttctgaaacactttattcagaaaagatcattttttggcttccttttaaaaataagcttgaagtagggaagcatttgcttcttagattttaaatgtagtcttattatgctgaggaaaatctttagttgaaagaataattcattacagatttttgatgaagggaagaaattaattatgttgctggaagactgtctacaaataatcaaaatatttaaatgtaatgtattcaagttgttattaaaaagttactgaatgttatctgaagatgtgaaatgtgtagtcaagtaaaaagttggcgtatactttcttgggctgcatatccaatttaattaaaaaattaaatctca

SEQ ID NO: 1211 - DNA, 1121 bp, Homo sapiens; identical to SEQ ID NO: 1210

SEQ ID NO: 1212 - DNA, 498 bp, Homo sapiens
ttgcctaactgctgttgcccacgttgaagctaaagagtaaaaacctattcatgaacaaagaaggcaggtgagacccggtaacaaactgtctctcttcccactttctctttcttattaatttggcaggatctcccttcccattttgtcaacatggttgaatttgtgtgttggggttgttagggcatgggaattcctggtttgctttctctattgcatgcttgttcatgttaactctttggggagcagaatgagatacatatgcatccatggttatgatggaaaaaagcatgcaaaatccatttttagagagagagagaaagagaaaggtgggggtgggggagcacaaagatcagaagagtactatgctgatattcaagatatagtacagatagctttctgtgtacctatccatctacctattcatctgggctattgattgactcccacagcagtaaagaataattacgcagttattcttctggttatgttttaatttca

SEQ ID NO: 1213 - DNA, 498 bp, Homo sapiens; identical to SEQ ID NO: 1212

SEQ ID NO: 1214 - DNA, 3200 bp, Homo sapiens
gttgtttttcagcatattctgtctttctcctcagtcaaggaccaacctaccttttcttttctagtgctgaggaatgtaaacaagtttgctgggccttgcgagacttcaccaggttgtttcgatagctcacactcctgcactgtgcctgtcacccaggtgaggatacatagttcccagcttttgtccggactgtcggactgttggggatgcctgggaatggggataggttttaatgcctatcatgggaccagtcttatagctagagtcagggaaggactcagcagtttaactgtggtgaacagctggaatatacagggcccggattttcttgggcctgggcagccagtaattgtcagtgtctttggggtaccattttcacctccataagaaagtaactgttacacagtgcattgaaacattttcttcccccttccccttacagacacttctaagatggtaagtgtacatggcaacaaacaaataagtatttttaacctggccactttggcgaaaacaacctcaagttgactgttatatgtggtgccagtctcctaaaactgaccctccagatgtaatgagcaaagagcttattcttatcacttttatgacctgaatgctgaagtgccaggttttgaccagggcaggaggtatgaattgaatatcccttatccgaaatgcttgggatttcggaggaaaaaacactttcagaagtgtttttcaattttggattttttgggattttggaatatttgcagaatgcacaccagttgagcattcctaatccaaaaatccaaaatccaaaatgctccaatgctcattcgcttgagggtcatatcagcgttcaaaaagtttcagctgttagggatgcttggcccttacaggagaggaggagcatctttggctcccgatgagcacttttctccacgtgctttccgtctcctggttctgaagcaaagcaagaagcttagctgaaaggagtgggtagtagaatttgggtgccagtttcttgatggagagaagaaaggtagctctcctctaagcccaccctttgatgtctcaaggtgagtttcttctcccaggaggcaattcttgatgaatctgtagcactcactggtagtttctgtgttaaatgcattcataggtaaaagtgatgttcagcagtgccttgccacacccaaaatcatttctcaactttgattgttttaatgagtaataatatcatttgggatgtcctggttttgcatggtgtctgggttagctgacattgatacacctcataaggttgctcatggacagctgtaggtgttcatggttaacttttattgtgcccttactgtgtgtcagggcactgttttaagtgttttagatgtattaactaagataatcctcatctgcttttctggatttgttactatttttcccattttacaaatgaggaaattgaggttcaacaatgtttaacaatttgcctgacagttattcgtggagccagaattcacatgtagatattctggtaccagagtcctcactttgaaccactccgcttaatacagtatcctttcgatagcatctaaattggtgttttgttttgttttgttttcaactgttattagtaggcaaagccttctttcaaaataaaatcgacatgaagcctgtgggatttagcagactgaggcaaagcttccctggttgctttggaatgggaggcctggacctgctggctctttgccctcctgacacatcatcccttgtttccacagcacactcagcattggaagcacactgcagacggtgtctcattaaagcagtagctcccttgaacccacaagttaaaacgccagacttttatttatttgtttattttttctgagttcttattggcagacttcagaatgaggtacctgaggaaatatagaaacctctgccttaaggttgattttactaaatgctctattttctggtgcagttattgactgtcttatctcttttgtcaggaatgtcttttttaattagaagacaggaagaaaacaaaaaccagactgtgtcccacaatcagaaacctccgttgtggcagaggggccttcaccgccaccagggtgtcccgccagacagggagagactccagccttctgaggccatcctgaggagttcctgtttgggggtgtgagggaaaatcagcgcggattttaaaaagatggctgtggcctgcccggcgtggtgggaggggagctggtttcctggtgaactttctaaaaggaaaaataattttaagtaaagaaaaaagaaaaaaaaggaagactaaacagaaaccagaactgaaacattcacctggtagcaaatgacacatgcacgcacacacacatacacgcacaagcgccagtgcgcacgtgtacacagaaaaacaaaaggacaagctttctgtgaaacaaaatatttacttagggataatgtggggattcacatgaattaaatagctgcaattggaagaagagggtcagggtcatttgttcaggttttctattgttttgtcctctctttcctctcctacccttccttctctttctctctcccctccttttaaatgcaaatgagtagaaatttcttctaccttccccagctgtttcttcccacctttagagttgtttagacaaggaggagtaagcaaggaacttgttctgctttctatcgtggtcacattggtgatgctcgggacctgccagggtcagaatttatggatatctgaaccctgaccccgttcattctctcagtccacttccaatccacatcagtttgttgtctgccttggagagaagagccaaaactggggtgggcgggtgggtggggagtgcaggatataaatgtgtaagtttttgttttttaaggtttttttcttagtgaattattcacccacagacatgagagaaaaaaagagggagggtgtgtggagaaaaaatgtttacagggctaacaagggatgatgtgtcatttagtatgttactaaaaagtgtggaaatgacttgattttaaggggagggtgaggccgaagagggaagcccaaagcagatcttaatgtttcaaaggagtgcagcccttcacagccatcagatatgagggcactgttctgtctggtgttgtagccatctcaagaacaaatcaacagcaacaaaagagaaagaataaatttttaaaatttaaccagt

SEQ ID NO: 1215 - DNA, 3200 bp, Homo sapiens; identical to SEQ ID NO: 1214

SEQ ID NO: 1216 - DNA, 337 bp, Homo sapiens
tttatttccaaaagtttccttgaacccctaggtaatacctgtttcctccctcttcccatccatccccatttccacataaccactggtttgttttctatcactgtagattagtttgcattttcctgagtttttaataaatggaatcataacagtctgttatggcaattgggctttgagctaatacctgcagagctgtattctaatgtgatagatctggcagtgttgttgatatactgacacttctctgccttttctttgcctgtcactttaactttttcactcctgggcataaatcctcaagctacagaacaataggaattggtgaaacaaatcttcc

SEQ ID NO: 1217 - DNA, 337 bp, Homo sapiens; identical to SEQ ID NO: 1216

SEQ ID NO: 1218 - DNA, 3055 bp, Homo sapiens
ggagtcacctttcctcactaggagctgtttgcttcagcaaagcaggatttgaggagttggggtctgattggggaaaagcttgctgaggtggaggtggcgataagcctggacttgccctcacctcaccccacaggccaggattcgtctttgggtttcagggtgcatgtctgtcttagcactgactgcgtgccaagccctggatgttgatcaggcagacacgggctcagcccttgaggctcacagtgcggtgggttgcacaggcagcggcagctgatccctcttaccgggtctccttctcgggactcccttcagtccacttaccccgtttctgccccccaggccttctctgggcagtgactgtgagggctgacaggaaaggcatgtgcagcgtgcttgtgaggagctcagcacagagggtggggtgagggcatgtgttgctgaagtctgcatcctgaggtgcctgtggcaaaccactcttcccttctgtctcctcagttcagccaggccctggccatccggagctataccaagttcgtgatgggggtaagttgtgccagctgtccttccttcccactgccttgcggacccaagcggggcctaggaggccaaccctggtaatggctggaggcaggtcttggtacagggtgttggcgtggtgtgtccctgctccctgggccggggtgggtcactggcactcaggcctctctgggtttcagattgcagtgagcatgctgacctaccccttcctgctagttggcgacctcatggctgtgaacaactgcgggtaggtgtgcgcccctctacttgccactctacctaccaaggctgtggggtgggggagacccaccgagcccttccagcactctgccccctcccacctgctctgtgtgtaggcttggcctgccaggcaccctggcttccgctgggatttcccagcaccccctggggtaaactgtggtgtcaggggtcagggtgtggatgggtggtagcctgaaggcattccttcttgaagtggctttcccgtggctggctgtcttccactgttctctgcatctacactctccttctccggcaggctgcaagctgggctccccccttactccccagtgttcaaatcctggattcactgctggaagtacctgagtgtgcaggtgagcaagcactggacggcggaggcctttcctgttctttgctacatccttcagctgaaatggttttgtggatgcttcattgcatgcaaagataagtggtttcatggaattcaatattgtgaggagatacttggtatctataaggcatttaagttttcatcttacataatttcagaaaggatttgaggtggctaagtgtgggtttattttaagattatacatcagacaagaccttttcttctttgagtcttaaagactcttaggataaggataagagaactctggcccaggtggcaggtggtaaagcccaagaactgcttctccttcaagtaacatgggctgaaaattcgaggtctgtaaccagttgagctgagttcctgggttgttagggcggctggcattggaaaccgactcctccctcctgcaggacattcctgggcccaggagagcctgtgggtggggctgggccacgtggggaactggcagcagtaccaaccttgggttctcgtgttctgtaccgaagctacctctccgtagctggagctcttgggcccagcagtcaggggtccaggctttggccgagggcagaaccttgccttttcctggccttgatttgcctcgcagtgaaatggggcagtggcccggagggagccagaactctgagtggcctcgaggctgagaagaggacagatgggagggaagcagggaggagagccgcagttcttcccagtggccctggtcagcgtgagtgtgtctcgtcctccctatgagcactgaaagagtcctagaccacttgggctctgaagcaagaggggcaatgagcctcctctctagggctctcctacagagtagccccaaagacacccctgggcaggaaatgaaccgctcccttctgcttcaacacaggcagattctgccctccagggatgtaggccgaggccgtccaccccggagctgggtctttgagctcctggacccttctttgcctgacactggccttcctctcggagggacaaggaagcgtggcctccctttcactcaccttacttttccttctggtccagggccagctcttccgaggctccagcctgcttttccgccgggtgtcatcaggatcatgctttgccctggagtaacctgaatcatctaaaaaacacggtctcaacctggccaccgtgggtgaggcctgaccaccttgggacacctgcaagacgactccaacccaacaacaaccagatgtgctccagcccagccgggcttcagttccatatttgccatgtgtctgtccagatgtggggttgagcgggggtggggctgcacccagtggattgggtcacccggcagacctagggaaggtgaggcgaggtggggagttggcagaatccccatacctcgcagatttgctgagtctgtcttgtgcagagggccagagaatggcttatgggggcccaggttggatggggaaaggctaatggggtcagaccccaccccgtctacccctccagtcagcccagcgcccatcctgcagctcagctgggagcatcattctcctgctttgtacatagggtgtggtcccctggcacgtggccaccatcatgtctaggcctatgctaggaggcaaatggccaggctctgcctgtgtttttctcaacactacttttctgatatgagggcagcacctgcctctgaatgggaaatcatgcaactactcagaatgtgtcctcctcatctaatgctcatctgtttaatggtgatgcctcgcgtacaggatctggttacctgtgcagttgtgaatacccagaggttgggcagatcagtgtctctagtcctacccagttttaaagttcatggtaagatttgacctcatctcccgcaaataaatgtattggtgatttggagttttt

SEQ ID NO: 1219 - DNA, 18038 bp, Homo sapiens
gggagcttcggacccggaagtggcgccctgggctcgcggcggtgccgcggggatggcgggagccggagctggagccggagctcgcggcggagcggcggcgggggtcgaggctcgagctcgcgatccaccgcccgcgcaccgcgcacatcctcgccaccctcggcctgcggctcagccctcggcccgcaggatggatggcgggtcagggggcctggggtctggggacaacgccccgaccactgaggctcttttcgtggcactgggcgcgggcgtgacggcgctcagccatcccctgctctacgtgaagctgctcatccaggtgggggaccagaggcgccgtagggagatgggaggctgatgtgaaggtgacaggccaggatttggaggattggggcgggcagtcaatggcgacggatttggggagaggggtggggacggcgggtttggggggccgagtgggtgggatgggagggaagccgtgagggagttgggaacgcaggggtcacgggttttaggatacagaaaggagaccaaggggttagagtaataacagatacgggagagggtggaaggaacaagcgatttgggggagtgccaaggagggagcgatgggctggaaaaacatatttgggagataaaggagtggggacgatggacttgggatagggaagggagcgaatttggggcgagggaagaagcaatagaattgggggaggggcaagaagtttgggtgaagagatggggaggaaggttgggggcccaggcaaagtgtttagagaatgaggagcacataattggggtagaggggaacggaggctctggatttgatagagatggatttaaaacgtcttggggtggggacaaagtgggcgccagggccagaaatttaggagggaaagaaggacaccagactgggggtggacagaggagacggaggtcttgggttgcattgtgatttaatttggtgggagagtgcgaaggcaaagacttttgcaggggaatgctatcggtttaccggagatgggggctctggatttgatggcgacgacggatttggtaggaggaggggacagggtgacgcgtatggggggaggggaacagatagggccagcattgggggaggggagtggcagcgatttgtctagagaggggagctaggaggaggctttaagcggggaagggggatgacgcatttggaggaggaaatggaagtcatagttggggtcagagagaggaatcacagtgcttgtatctgggcagatgaggagaaggggcacgggagtattgaaattgggcagaagggacagtggagacataggtggcaggataggtagggactaccagaaattgagaccgaggtagggatgtctctggaacagagggatgcataggcacttggcagatttggtggtggccagcaatgcggtacagatgaagtgtgctgcttgaggagtgagctggaatgaagggcgtgtggaggtgtgagaattaggtgggtgtggctgggatgggtacagttttgatgggggtcattaggccagaattttccagttaagaagcttggggggaggaaggtaaaaattgaattggagacccatccaagatttgagttgaggcaggtgggtgtcagattttaccatctttataattgaaccgagagaatgcaaaatacaactggaatgagaaggccttgagaatgagagtaattgaaatctgggatccgaggaatggtaatagatttgtgggtgtgaccaggaatatgacaaggaatgaggagattcagtcaggggcatcaaggtgcctgactagaccctaattgtgacagatttgaaaattgttgatggcggaaggtgtagaccagactggcatttggttgtgatttgggaatgagggctgtcttacagggttaagattgtatttacagcagttgaacttgaagtttgggagataaattggtgctttggacctgagaagtgagggttctggaaactgatggaatgagactgagtgagggctaggattttagggcacaggtgggagagtctgtggagtgaaggatactggagcacaagggctcagtgtgagggaaatgaagaagtggcttcatcatttggatgatggcagatctggtttgaaagaacattgaaatgagggtggtttgggaagggaatgggggaatgaaggacaccaaagcgtgagaagaactagatggtgggcaggtaaggatggatgagccctgttgaaggaccagaggtgcctgtctgatttgaacccagctggtgttgagtgtaacatatattagggtaagatcttcaatgggtatagtttgggaatcagagtaataacttgcagaaaggcaaattactgggagtgggggtgtcaggagtggagtgacagatttggggattgtctagattaggtgcgtaagaatgcagtgccttagattagtgcatgtggctgtcaggtttgggagtcggagattttaagatgacagactgtccctgctggtatctgatatagggccacagcatttgccgtagttaggactgggttaacagatttgaggttgaaattgggtttaatgacttgggaacaaataattaaaacttgaaggcaggaggaatgggggtgagatacagccagtgtgcctatgataacccaatagaagttaagaaaatagattcaacagatttgggagccatggggatatgggataacgttacaaatttaagtatgaaattggggtcagtgggactcccaaatagtgttgactaaactggataaggacagcaaaagagcagttgtggcgatttggagtggaggaataaaggaataccacctgtatttaagagaacacagatcaagacaaaacttaattcagaacaaccttggagcttttaacccagaagggaaaaggtctagaagggaagtactcactgcctgggtcagctgactcacccctttcctcctttgctccactgggtcaaaatttttttcttttaaagacagtccccatcatagaggagtttttaaatttacaatcattaatctgttaggcatctcagaatcagatccataggagatagcctgaactttgaaaagcacttgcttgataaaggcaaaaggggacagggttgatcccaaaaagcactggaagcatacctaatccagtttacaaggtagcgctttctaacttgccacttctactgcctcccacagctgcaggccaaatcctctcccacatgtcagaggaatcgctctggtccatgggcccagctggcctgcttagagggcacagggctggtatcctggccccttgccaagggaggaaggagccttctcactccccacctaggtgctggtctccttgacaccttgcctcctccctggcagcaggggctctcacccctcgacagagacttcctgctcctcacatggatatggatggtccttcacccacccgcgggtttaataaatatttcaggctgggcgcagtggctcatgcctgtaatcccagcactttgggaggccgaggcgggtggatcacctgaggtcgggagttcgagaccagcctgaccaacatggagaaaccccgtctctactaaaaatacaaaaaatttgccgggtatggtggcgggtgcttgtattcccagctacttgggaggctggggtaggagaatcacttgaacccgggaggtggaggaggtggaggttgcggtgagctgagagcacgccattgcactccatcctgggcaacaagagtgaaactccatctcaaaaaaaaaaataaataaataaatatttcagatataagaagcatctgtacagcaagaactatcatagccctacagaaatgagggggtcgttttgtcacagggatgtagggtgattgaggtgagaacgcagctaaggatatgtttgaggagtagctggaatttgaggtaacagtttgctaagcctgggaatgggaggaatagacatggaggtgtctgcagtagatttggtaagaaatttgagtttggggtgcactttggaatagatgacttaatggctgacctgtctgaggtttgggtatgatgtattttcttattgccacatttggaattgaggttggaatgaagtttttcatctggagatgagaataactgagatttgttctgagatgggagtagggtttgcagtacatacaaatggaggtttctctactgggaatatttgggatttgaatgtaagaatgttggggtgtgggtgtgacttggattgtggttggacagtgtctgggaccaggcatttctgttgattgggagtttacgtgctgccaatggttagagacactgacgagctttctggtatgctttgatggggaaaacatgaacaagagccacattagaatttgtgggagaagagttaagcaaagggggcaagaggtgtgaggagaggtggtgaggctgaatcaccacgagactctgagcgtccctttgtctttgttaattctgaaggtgggtcatgagccgatgccccccacccttgggaccaatgtgctggggaggaaggtcctctatctgccgagcttcttcacctacggtgagtgtgcctcccaagcaggaaagcccacaccaacagaaaagaggcctcaggtggggagcaggaccagctggccccggggaactcactgcgcagcatggcacgcagtcgagctggcatggaggaggggatctaagcgtgtacagagaggacatggtgtcggggtgcgagcaggtgaaccatacagctttggtccagctcctctgcctgtagctgccagctgccagcccagacagcaggaggggacagacacaggtgcctgagagaggagccaatctaggacactggtccctattatttctgctgccccgggttgtgcctggaacatgcgtgggggtgatttccttttgtcctgtgagcagcctggccctgctactccagcaggaggcccggggggtcctcttgagtttttttcttttatcccacctgggtgtcttgtttcccctgcattcctcaggcagtgagtggtgctcactcactctggtgtctccatctgttggttacagaatggtgtgcagtgaattgcagcttcacttctgtgtgctgcgtgagtttgggtgggccacttacctgctgtggcctggctgcaccccttgtctgcaaagtaaggtcagcttctcctgcccaggccttcctgcaagctccccaactgtcatcaagaagcccaccttgctgcctctgctgcccatcacctggcccacaggtgccgtctggccagggccttttcatgttcaccctcactgtccctctcccagtccctaccctcaccagatgaccatgatgaaggccttctttaaatgtgccctttttctccgtgttcacagctggagttccattgcaggcaaatcccctccagtttcctgcacctctgctcttacctgtttggttgtctagaatattctccagaatctatctttctgttgagtaacttggggcttggcctctgtcttaccttttccatttcacatgctgttggcagaattgggtgtcatatttctcttccagttttgtccctgtgttgttgagtgcagagtctagggccaggtggaatgtgtcatcttgtgaggaaatgtgtttgtgttgttttttacttaaaaattgtcagcgtagtggagaggggaatgacagaagtaggaaggcaccccaccattgtgtagtgaggcagtatacagagaggtaaggcagccggggcagatggctgcggccctgcacggggctttttctggatctggttgcacgtgctgtgttctgagaggcgaggttagagcccagatcatctctattcatgtgacacagccattcccaaaaggacttagagcagagggaacttgacccccatcttaactgtctcttttgaggatgagcagagttctcaggtgtgcccccagcctggtttatataaatgtagctttaatctaggtgtgagcagatgtctgttggggatctctggacaccaggcctactctggagtcagagaggggacccgccatttggctctctggtacagtgtggacagtgtctgctcctctacttgtcatggctgaaagtactgcagctgtcatgacattctctggtgtagaagaaagaacttcccagagggtttcctggcactgcagaaagacccagaatgagggaggccctgggacccacagaggcccctgcaggcatttcagcacgcctccctccgctctcacttgttcctcagttctctcagaaatggagagaaatgacggtccttattccttctttttttacaggtgggcagatggaagagggtcgatgttttgctcaggatcacaaacagaggtcctgaggctccctctcctcactaggatccaccctcccccaaagcaaattttccttttgcctgttcactctgtgaagagggctccttgccaagtcacccagcatcccctcccctcctcctcctctccttccagcccaccctcatctcaggcaatcacatatacaggtaacaggtgttctcagcctcatgaaaaacccatgctagctgtgacattgaattgctgggctggcagacatctgcggaggagcaaaaggcatatttgcttcttcctgcctctgcgcggtgccagagagctaaagtcatggtctaacagggggagcatgctgtctgagagaatgttctgctagcttccagatgcacaggtttataaaaataccaccctgccatttaaaacatgtttaaaatgttgatagaaaacaatgaatcgtatccttagaaagacagaccctagtgaaagaaacactaactcacacaggtagggtctagcttccataacatttaagtttattctatggaattgttcattggtgctcctgttttagttacttctccatagacttgtttttcccttgactaatcaatgccatctggtgccaggtggtatcctgggtgtagcacagtgacagggtggagactgccctggccgtggcatgtgcagggggcgttcttgagcctgtcttctgggagccctttcttttcctttttccctcctttaggttgaagacttcatcattccctgcgggcagtttctctgtttttcctattttcttttcctcaagaaaaatgtaatttttaagtaacagaattgttttctgtgttgcagcatttaagttgctgagttgagaaatcatggctgagtttgccaagtaaagtttttaaagcaaaaaaaaaaaaaaaaaaaaaaaggagggagggagggaaggaaggaagaaaatatatgaacttgtttgtcagaaatacattttgaggcttttactaaaagaaatgggctagaagacatttgggggttagggcctgactgcttccaggtcctggacagatgttaccttctgtgcctgtagtcagcagttacctgaaggacaagccgagcctggtctgggtgtgtgtgacccaggagtgggtgcccctgaactgggtgtgactcctctgccacctctgttttcttacagccaagtacatcgtgcaagtggatggtaagatagggctgttccgaggcctgagtccccggctgatgtccaacgccctctctactgtgactcggggtagcatgaagaaggtgagcccacacaaagccaggaacagtcgcccgaggtttcctcatactcccagccacccctgcagcagccagttaccctggtcttgcctcctccttcccagaccattgggggcttcactccagccccatgggggagctcccaccccacagttctgctttcccacagctgtgacaccagatagtggctttcttttccccccaagctccagacctggaggttacctgaggtgggcccagccaatagacactgcagaggaaatatttggagctggttcctgccgcccaagtccccgaagagttccatggaagaggcgtagctgaacttggttctttcccttctctgtttcaggttttccctccagatgagattgagcaggtttccaacaaggatgatatgaagacttccctgaagaaagttgtgaaggaggtgggtgttgagagttggagagggagaggtgcgtggaggggagcctgatgatttctcacccccaagttgggcgggtcattgacaagtcgaagagttgggtccttgtgtatgcatgggtgggatggtaagggaagaagccctggcctggatgtgccgggaaccccggaaagccttctcagccattgttgggcctagcctgggacccgacagcactcctgggtgggggactggggagtgggcaacaggtggagccatccttggcagaccgaccccatgtgcagtccctgggacaggtttctccctcctgagcacttgtagctcccctcgagggccagttccagagacaggccgagggtggcgagtccccaccccatgctctcttccagacctcctacgagatgatgatgcagtgtgtgtcccgcatgttggcccaccccctgcatggtaagccaccccccttcccccgagactgtatctaagctggcgtcgggggcgtggggtgaggggcgccccctcgtggactgtacatagacagccgtagacctgttgggaagtggtagtggggttgggggtattctactggaacccacctcactgaggagagattggaattctttccaaagggaggtggggctcttcccaggcagtagaaatggcatgctgtggtcatggggtgtaacagggaatccgaaaggccctcttcctctcctgctctctgaataggccacgttgttcagtggccactctgcacctggcacccggtggctggagcattatgaagtgtggcccaccacatcacctgtgtgtgttttcttttttttcctcagtcatctcaatgcgctgcatggtccagtttgtgggacgggaggccaagtacaggtgggtaactcttgggactggcagagtggccctgttaccctttcagagtcggccagggcaggccgtgctgggattggttgctgcaccttttctgccctagtgctgtgtgagttcagcctgctgcctggcttctgaggaatgtggcagtggcttcaatagtctgtccagggtcattttctcttcgtcatctcttatcaagggcagccctagatgagcctagatgcctttgcagaggggtgagtgggattgtagtcagcttggattaggatttctggccccagagctgattctgccacttaggactgagctggggtctccttttggactcccgaagtaatgctctaacgatttttccggccctcataggctgatagctctttttatcccctatgaagaagccatccaccccatgggcttggggctcatcccttccattgtgtaccagaccctcacctagatctgctgcgtgcagccctgggcaggtgccaggggcatatgtgttgacacggaggtgggtcttggaggcatgtgtgaaggacacacctgggttgcccttcctctcttaagattctcatttcctggggtcggtgttttttgcagctgtcctgcggggccaccatcccaggaagctcagctgccatggtgcctcattttggggtcattaatgggaaattggcccattcccctagactgattatgaggttggtagttgggaccagaagggtataatctggccaccactgttctgagtggtggggccgggcctggcagggctgggatgatctgggaccggggctacccagggctttgccttccactggctccctctgttagtaggttgttattgagcttccttggcatttcacacccaagaacccacagcctgtcctctcatccagcttgtcctctcatctctaacagggtgcagtggccagggcatgagtccccggctccctgctgaggagtgccagatgtcttctcctaggctggttccagtgcctcctcctgcagggccctgtattctttctctgccctctgggaaagtacttctctttgcttactaccccctcctactcttactcttgggcgggcctgtgggctcctctgctagagggttgtttaaccagagataagtgtgagggccgggtaagagaagggcctgccgcctctgcagcagtggcccaagttaggagatgcattcctaaactcctatctcccagaaaacaccagtagaggactgctagtgggctgctcccatgggtggttgggcttccccagtctccatgaactgtgtaaactcctcctcaccctgaacaagcgctctttgcctttctacttggttcttcatggtaatagtcctccccatccctgccaggactggctggatttgagcagaactggtgggctcagccccacaccaacgggtgggcttctggtaggtgactgcatgaccctgtatctctgtcttgccttcttcacagtggtgtgctgagctccattgggaagattttcaaagaggaagggctgctgggattcttcgtgtacgtgagtttatacaccccataactggccacgggcatggctctgctaacaggtgtgtcctcaacctctcagaccgcagctgctggcctgggacttcactacatggccctgccctagcctgagtgctgcagccagctctccagagctccatagcgtgtccaagctgcttagcccttttcaggccatggctcatgtaaaagtggaactgtgtgtctagtacatgggggagatgaactgaccagccccactgggcctcatccagttgtggtgggtgtggggctggtcttcatgagctaagtcactgcatagtccttggcctcactgctaaaacatgactgaaaatctgacttggactgagggtggagctctggaagctcacaggctgaccacagccagtggattctgtttgacattgcttttctgacaaattagttgttgccgttaacatttaagatatgttgcacaaaaatccacatgtctggcatctcttgaaaagccagaaaatcttgtcctgctgagcggttctttctgtagagcatccatcggccaggacccaggacctgcttctttggcagggcacatggtctccgagggccgcagacaccctgtacttcgtcacgtcacatccagtgtacttcacctctaaagaaagcacatactgaaaagactaagttcagaaagaataaggtgcagacagaagccaggcttgatgagttgtattttgatttgccgttttaaggtctaggcagtgacatacatgctgataagtatgtcacaaacgtggtagacacatggtatacaacagtatccgctgtactagatacagggctccatattattcataagaagtctttatatcatggttttcccggtttgtgagatgttttttatttatggccccttgtttaaccaattagtgactacttgtaggtgcatgtgtgtgtatatgatatagaaatatatatacggttctcagcaggaggtgattttgctccccggggaacatcggcagtgtccggagacatcttgtggttgtcacaactggcatctagtgggtagaggccagagacgctgctaaacatcctacagtacacaggacagccccgcaacaaagacttattcagtcaggtgtcgttgcttgcatctgtgatcccagttagttgggattagtctcagtggtttctgcagctgtcaggagaccaaggcgggaggattacttgaggccaggagttcaagaccagcctgagcaacatagtgagacttctgtctctacaaaaatgtttttaaaaattagttggccgtggcggcatgcacctgtagtcctagctacccgggaggctgaggtgggaggatggcttgagcccaggagttggagactgcagtgagctatgattgcaccactgcactccagcctgggtgatagagtgagaccctgtctcttggggaaaaaaaaaattattcagcccaaaatgtcaatagtgccaaggttgagaaactctgatttatattcacacacacacatatatgtatgtgtaagtatttatacatacatatatttgcacatgtacctggtaacaaaccaacatttgtgacatacctatcagcatgtatgtcaccgcctagaccttaaaacagcaagtcaaaaaacaactcatcaagcctggcttctgggttctgtctgtgctttattctttctgaacatagtcttttcagtatgtgctttctttagaggtgaagtaagttggatgtgaggtgacaaagtgcagggcatctgtggccctcagggaccatgtgccctgccaaaggggcagccccgggaccccagccaatggctgctctacagaaacagccacccatcttgaaacactgcacatgaccacctctggcatttttcacactgcgtagttctcttctggtgtttgaataggattcccgcacaacagatgcctactctttgggttctttctccccatgtgattttggaacaggtgatactcatacatgttacagtgcatagaaagcaccaaagggtatagcacaaagtcaatctgagcacaggcagggacgacaagattagaaattgcattcacagaggttccttttattaatactcttcatagatgtattacatatattcttttgagtttttcaaatataagatttttttttttaattcaaaaacaaaaattctgcttctcctcccaggagacagccatccttctcctggcgagcctcccagggcactctgtacctaaacaagcaaacacattgtaaaaaacacaagaggcacatgggactcactgacctcaaactggccttttgccctcagcactgcatcttggggaaccttccttagcagtttatagagctgtttatcctaaaggccatcacttaaaaagttagccctccttgtaaatgcttgcatagaatctttttgatagaatattttcaggggcaaagagaacagatgcattgagcagtgtgtcttctgagagttggttaggtaaagaggccaggagaaaattaccaacacgtcggcactcttattatctgcatttggaaattccaaatttggcagtattcacatcttgatccctggcttctgtggtttgaaaactgcttgagactgttagctaatttatggcatccaaagcggcatagaacacctccccatgggaaaaggagcactatcttcccagtgtgcatagctgctggaccctgcaggcctcctttctaaggctgtgccattggatatgctaagattttgagctcggaacatccctgcctgcttcctgggtgtggagcccccaggaactgctcctctccctctcctgctcatctctgcttaccttgttttttagtggattaatccctcacctcctgggcgatgtggttttcttgtggggctgtaacctgctggcccacttcatcaatgcctacctggtggatgacagcgtgagtgacaccccaggggggctgggaaacgaccagaatccaggttcccaggttggttggaacaaggacttgtccttctttccgtgtgctgctgatgcccagggtctgggacaaactcaaggattctgggattctcagcatcaggccgggagggtgagagaggacctctcattatccctggagtcatctttgtctaaggggagaacggcctcaagaggcgagattccagattagtacccagacctgggaggaattaatggaatgcttgtccctgggcgccttagaaacagaccccagcttatctaaggctgctccgaggcagtgacccaactagggctcaggaagtcagaagatagaccagctaatagtgatcacctcttgacctttgtgtcacgtcttttgctttttaaaacccttttgtgaacgttatggcctttgatctgacggcatcctagttgtgaagggaacagggcaggtataatgttcgtttaccaatacagaaatcgagacccagagatcacaaattctggagaggctctgggctctccagagtcactcagctggaactgacagggctggaattagatccctggccaggccaagggtgcattcctctgagttttttcagatctgctaggaagtgtacagtccgatacaccctcctattttgttagctgtggtctacacagcctagtatacatagacctttcagcaggtcgggtcaggcataggaaggcctggtccttctacacagcacttgttgaggaaggccatccaggtacctgaggggttgactggttctgcctgaaccaagataagaggtagggagcagcgatggctgggaattgcagtgtccagacattctcacagtggggatcaccttcaagaaggatggcattccttcttgaagtggctttccctcccaggaggctaggagggcctggggacgtgtctgccagaatcacctgggtgggaagggggtcatgttcagcatgtgtgtgtgtgtggtacatgtctgttctgtgtggtgaggagtgccccatcccagatgggagcctctgcttgcagggagactggccacttgacctgggcaggtgagtcttcactggcctttcgatgtaagcaaattaaagtggctccatagagacccaccccatctgcaatcacagtggtacattcctgcagttctgccccttctcggggggccttgtgggtgggtaagctgctgctgtcacatacagagcaagggtggccaggagtgcaccgctaagtggtttctcatctaggtgggcagctgtctgaccagaggctgccgtgcttacatcagcaacaacagcagtcaacagatttgtctaaagtgtttttcgagtgcttttctgtatgtggcttaaaggccgaggtgaggctgccgggctgtcaaagccactcaagcagacatctgagcaaatctctgaccaagaacccaggccatcgatctggtgggatggccgctccacaggaagctgagggtgggggagtcacctttcctcactaggagctgtttgcttcagcaaagcaggatttgaggagttggggtctgaagggggaaaagcttgctgaggtggaggtggcgataagcctggacttgccctcacctcaccccacaggccaggattcgtctttgggtttcagggtgcatgtctgtcttagcactgactgcgtgccaagccctggatgttgatcaggcagacacgggctcagcccttgaggctcacagtccggtgggttgcacaggcagcggcagctgatccctcttaccgggtctccttctcgggactcccttcagtccacttaccccgtttctgccccccaggccttctctgggcagtgactgtgagggctgacaggaaaggcatgtgcagcgtgcttgtgaggagctcagcacagagggtggggtgagggcatgtgttgctgaagtctgcatcctgaggtgcctgtggcaaaccactcttcccttctgtctcctcagttcagccaggccctggccatccggagctataccaagttcgtgatgggggtaagttgtgccagctgtccttccttcccactgccttgcggacccaagcggggcctaggaggccaaccctggtaatggctggaggcaggtcttggtacagggtgttggcgtggtgtgtccctgctccctgggccggggtgggtcactggcactcaggcctctctgggtttcagattgcagtgagcatgctgacctaccccttcctgctagttggcgacctcatggctgtgaacaactgcgggtaggtgtgcgcccctctacttgccactctacctaccaaggctgtggggtgggggagacccaccgagcccttccagcactctgccccctcccacctgctctgtgtgtaggcttggcctgccaggcaccctggcttccgctgggatttcccagcaccccctggggtaaactgtggtgtcaggggtcagggtgtggatgggtggtagcctgaaggcattccttcttgaagtggctttcccgtggctggctgtcttccactgttctctgcatctacactctccttctccggcaggctgcaagctgggctccccccttactccccagtgttcaaatcctggattcactgctggaagtacctgagtgtgcaggtgagcaagcactggacggcggaggcctttcctgttctttgctacatccttcagctgaaatggttttgtggatgcttcattgcatgcaaagataagtggtttcatggaattcaatattgtgaggagatacttggtatctataaggcatttaagttttcatcttacataatttcagaaaggatttgaggtggctaagtgtgggtttattttaagattatacatcagacaagaccttttcttctttgagtcttaaagactcttaggataaggataagagaactctggcccaggtggcaggtggtaaagcccaagaactgcttctccttcaagtaacatgggctgaaaattcgaggtctgtaaccagttgagctgagttcctgggttgttagggcggctggcattggaaaccgactcctccctcctgcaggacattcctgggcccaggagagcctgtgggtggggctgggccacgtggggaactggcagcagtaccaaccttgggttctcgtgttctgtaccgaagctacctctccgtagctggagctcttgggcccagcagtcaggggtccaggctttggccgagggcagaaccttgccttttcctggccttgatttgcctcgcagtgaaatggggcagtggcccggagggagccagaactctgagtggcctcgaggctgagaagaggacagatgggagggaagcagggaggagagccgcagttcttcccagtggccctggtcagcgtgagtgtgtctcgtcctccctatgagcactgaaagagtcctagaccacttgggctctgaagcaagaggggcaatgagcctcctctctagggctctcctacagagtagccccaaagacacccctgggcaggaaatgaaccgctcccttctgcttcaacacaggcagattctgccctccagggatgtaggccgaggccgtccaccccggagctgggtctttgagctcctggacccttctttgcctgacactggccttcctctcggagggacaaggaagcgtggcctccctttcactcaccttacttttccttctggtccagggccagctcttccgaggctccagcctgcttttccgccgggtgtcatcaggatcatgctttgccctggagtaacctgaatcatctaaaaaacacggtctcaacctggccaccgtgggtgaggcctgaccaccttgggacacctgcgagacgactccaacccaacaacaaccagatgtgctccagcccagccgggcttcagttccatatttgccatgtgtctgtccagatgtggggttgagcgggggtggggctgcacccagtggattgggtcacccggcagacctagggaaggtgaggcgaggtggggagttggcagaatccccatacctcgcagatttgctgagtctgtcttgtgcagagggccagagaatggcttatgggggcccaggttggatggggaaaggctaatggggtcagaccccaccccgtctacccctccagtcagcccagcgcccatcctgcagctcagctgggagcatcattctcctgctttgtacatagggtgtggtcccctggcacgtggccaccatcatgtctaggcctatgctaggaggcaaatggccaggctctgcctgtgtttttctcaacactacttttctgatatgagggcagcacctgcctctgaatgggaaatcatgcaactactcagaatgtgtcctcctcatctaatgctcatctgtttaatggtgatgcctcgcgtacaggatctggttacctgtgcagttgtgaatacccagaggttgggcagatcagtgtctctagtcctacccagttttaaagttcatggtaagatttgacctcatctcccgcaaataaatgtattggtgatttggagttttt

SEQ ID NO: 1220 - DNA, 13540 bp, Homo sapiens
aggtgggtcatgagccgatgccccccacccttgggaccaatgtgctggggaggaaggtcctctatctgccgagcttcttcacctacggtgagtgtgcctcccaagcaggaaagcccacaccaacagaaaagaggcctcaggtggggagcaggaccagctggccccggggaactcactgcgcagcatggcacgcagtcgagctggcatggaggaggggatctaagcgtgtacagagaggacatggtgtcggggtgcgagcaggtgaaccatacagctttggtccagctcctctgcctgtagctgccagctgccagcccagacagcaggaggggacagacacaggtgcctgagagaggagccaatctaggacactggtccctattatttctgctgccccgggttgtgcctggaacatgcgtgggggtgatttccttttgtcctgtgagcagcctggccctgctactccagcaggaggcccggggggtcctcttgagtttttttcttttatcccacctgggtgtcttgtttcccctgcattcctcaggcagtgagtggtgctcactcactctggtgtctccatctgttggttacagaatggtgtgcagtgaattgcagcttcacttctgtgtgctgcgtgagtttgggtgggccacttacctgctgtggcctggctgcaccccttgtctgcaaagtaaggtcagcttctcctgcccaggccttcctgcaagctccccaactgtcatcaagaagcccaccttgctgcctctgctgcccatcacctggcccacaggtgccgtctggccagggccttttcatgttcaccctcactgtccctctcccagtccctaccctcaccagatgaccatgatgaaggccttctttaaatgtgccctttttctccgtgttcacagctggagttccattgcaggcaaatcccctccagtttcctgcacctctgctcttacctgtttggttgtctagaatattctccagaatctatctttctgttgagtaacttggggcttggcctctgtcttaccttttccatttcacatgctgttggcagaattgggtgtcatatttctcttccagttttgtccctgtgttgttgagtgcagagtctagggccaggtggaatgtgtcatcttgtgaggaaatgtgtttgtgttgttttttacttaaaaattgtcagcgtagtggagaggggaatgacagaagtaggaaggcaccccaccattgtgtagtgaggcagtatacagagaggtaaggcagccggggcagatggctgcggccctgcacggggctttttctggatctggttgcacgtgctgtgttctgagaggcgaggttagagcccagatcatctctattcatgtgacacagccattcccaaaaggacttagagcagagggaacttgacccccatcttaactgtctcttttgaggatgagcagagttctcaggtgtgcccccagcctggtttatataaatgtagctttaatctaggtgtgagcagatgtctgttggggatctctggacaccaggcctactctggagtcagagaggggacccgccatttggctctctggtacagtgtggacagtgtctgctcctctacttgtcatggctgaaagtactgcagctgtcatgacattctctggtgtagaagaaagaacttcccagagggtttcctggcactgcagaaagacccagaatgagggaggccctgggacccacagaggcccctgcaggcatttcagcacgcctccctccgctctcacttgttcctcagttctctcagaaatggagagaaatgacggtccttattccttctttttttacaggtgggcagatggaagagggtcgatgttttgctcaggatcacaaacagaggtcctgaggctccctctcctcactaggatccaccctcccccaaagcaaattttccttttgcctgttcactctgtgaagagggctccttgccaagtcacccagcatcccctcccctcctcctcctctccttccagcccaccctcatctcaggcaatcacatatacaggtaacaggtgttctcagcctcatgaaaaacccatgctagctgtgacattgaattgctgggctggcagacatctgcggaggagcaaaaggcatatttgcttcttcctgcctctgcgcggtgccagagagctaaagtcatggtctaacagggggagcatgctgtctgagagaatgttctgctagcttccagatgcacaggtttataaaaataccaccctgccatttaaaacatgtttaaaatgttgatagaaaacaatgaatcgtatccttagaaagacagaccctagtgaaagaaacactaactcacacaggtagggtctagcttccataacatttaagtttattctatggaattgttcattggtgctcctgttttagttacttctccatagacttgtttttcccttgactaatcaatgccatctggtgccaggtggtatcctgggtgtagcacagtgacagggtggagactgccctggccgtggcatgtgcagggggcgttcttgagcctgtcttctgggagccctttcttttcctttttccctcctttaggttgaagacttcatcattccctgcgggcagtttctctgtttttcctattttcttttcctcaagaaaaatgtaatttttaagtaacagaattgttttctgtgttgcagcatttaagttgctgagttgagaaatcatggctgagtttgccaagtaaagtttttaaagcaaaaaaaaaaaaaaaaaaaaaaaggagggagggagggaaggaaggaagaaaatatatgaacttgtttgtcagaaatacattttgaggcttttactaaaagaaatgggctagaagacatttgggggttagggcctgactgcttccaggtcctggacagatgttaccttctgtgcctgtagtcagcagttacctgaaggacaagccgagcctggtctgggtgtgtgtgacccaggagtgggtgcccctgaactgggtgtgactcctctgccacctctgttttcttacagccaagtacatcgtgcaagtggatggtaagatagggctgttccgaggcctgagtccccggctgatgtccaacgccctctctactgtgactcggggtagcatgaagaaggtgagcccacacaaagccaggaacagtcgcccgaggtttcctcatactcccagccacccctgcagcagccagttaccctggtcttgcctcctccttcccagaccattgggggcttcactccagccccatgggggagctcccaccccacagttctgctttcccacagctgtgacaccagatagtggctttcttttccccccaagctccagacctggaggttacctgaggtgggcccagccaatagacactgcagaggaaatatttggagctggttcctgccgcccaagtccccgaagagttccatggaagaggcgtagctgaacttggttctttcccttctctgtttcaggttttccctccagatgagattgagcaggtttccaacaaggatgatatgaagacttccctgaagaaagttgtgaaggaggtgggtgttgagagttggagagggagaggtgcgtggaggggagcctgatgatttctcacccccaagttgggcgggtcattgacaagtcgaagagttgggtccttgtgtatgcatgggtgggatggtaagggaagaagccctggcctggatgtgccgggaaccccggaaagccttctcagccattgttgggcctagcctgggacccgacagcactcctgggtgggggactggggagtgggcaacaggtggagccatccttggcagaccgaccccatgtgcagtccctgggacaggtttctccctcctgagcacttgtagctcccctcgagggccagttccagagacaggccgagggtggcgagtccccaccccatgctctcttccagacctcctacgagatgatgatgcagtgtgtgtcccgcatgttggcccaccccctgcatggtaagccaccccccttcccccgagactgtatctaagctggcgtcgggggcgtggggtgaggggcgccccctcgtggactgtacatagacagccgtagacctgttgggaagtggtagtggggttgggggtattctactggaacccacctcactgaggagagattggaattctttccaaagggaggtggggctcttcccaggcagtagaaatggcatgctgtggtcatggggtgtaacagggaatccgaaaggccctcttcctctcctgctctctgaataggccacgttgttcagtggccactctgcacctggcacccggtggctggagcattatgaagtgtggcccaccacatcacctgtgtgtgttttcttttttttcctcagtcatctcaatgcgctgcatggtccagtttgtgggacgggaggccaagtacaggtgggtaactcttgggactggcagagtggccctgttaccctttcagagtcggccagggcaggccgtgctgggattggttgctgcaccttttctgccctagtgctgtgtgagttcagcctgctgcctggcttctgaggaatgtggcagtggcttcaatagtctgtccagggtcattttctcttcgtcatctcttatcaagggcagccctagatgagcctagatgcctttgcagaggggtgagtgggattgtagtcagcttggattaggatttctggccccagagctgattctgccacttaggactgagctggggtctccttttggactcccgaagtaatgctctaacgatttttccggccctcataggctgatagctctttttatcccctatgaagaagccatccaccccatgggcttggggctcatcccttccattgtgtaccagaccctcacctagatctgctgcgtgcagccctgggtaggtgccaggggcatatgtgttgacacggaggtgggtcttggaggcatgtgtgaaggacacacctgggttgcccttcctctcttaagattctcatttcctggggtcggtgttttttgcagctgtcctgcggggccaccatcccaggaagctcagctgccatggtgcctcattttggggtcattaatgggaaattggcccattcccctagactgattatgaggttggtagttgggaccagaagggtataatctggccaccactgttctgagtggtggggccgggcctggcagggctgggatgatctgggaccggggctacccagggctttgccttccactggctccctctgttagtaggttgttattgagcttccttggcatttcacacccaagaacccacagcctgtcctctcatccagcttgtcctctcatctctaacagggtgcagtggccagggcatgagtccccggctccctgctgaggagtgccagatgtcttctcctaggctggttccagtgcctcctcctgcagggccctgtattctttctctgccctctgggaaagtacttctctttgcttactaccccctcctactcttactcttgggcgggcctgtgggctcctctgctagagggttgtttaaccagagataagtgtgagggccgggtaagagaagggcctgccgcctctgcagcagtggcccaagttaggagatgcattcctaaactcctatctcccagaaaacaccagtagaggactgctagtgggctgctcccatgggtggttgggcttccccagtctccatgaactgtgtaaactcctcctcaccctgaacaagcgctctttgcctttctacttggttcttcatggtaatagtcctccccatccctgccaggactggctggatttgagcagaactggtgggctcagccccacaccaacgggtgggcttctggtaggtgactgcatgaccctgtatctctgtcttgccttcttcacagtggtgtgctgagctccattgggaagattttcaaagaggaagggctgctgggattcttcgtgtacgtgagtttatacaccccataactggccacgggcatggctctgctaacaggtgtgtcctcaacctctcagaccgcagctgctggcctgggacttcactacatggccctgccctagcctgagtgctgcagccagctctccagagctccatagcgtgtccaagctgcttagcccttttcaggccatggctcatgtaaaagtggaactgtgtgtctagtacatgggggagatgaactgaccagccccactgggcctcatccagttgtggtgggtgtggggctggtcttcatgagctaagtcactgcatagtccttggcctcactgctaaaacatgactgaaaatctgacttggactgagggtggagctctggaagctcacaggctgaccacagccagtggattctgtttgacattgcttttctgacaaattagttgttgccgttaacatttaagatatgttgcacaaaaatccacatgtctggcatctcttgaaaagccagaaaatcttgtcctgctgagcggttctttctgtagagcatccatcggccaggacccaggacctgcttctttggcagggcacatggtctccgagggccgcagacaccctgtacttcgtcacgtcacatccagtgtacttcacctctaaagaaagcacatactgaaaagactaagttcagaaagaataaggtgcagacagaagccaggcttgatgagttgtattttgatttgccgttttaaggtctaggcagtgacatacatgctgataagtatgtcacaaacgtggtagacacatggtatacaacagtatccgctgtactagatacagggctccatattattcataagaagtctttatatcatggttttccggtttgtgagatgttttttatttatggccccttgtttaaccaattagtgactacttgtaggtgcatgtgtgtgtatatgatatagaaatatatatacggttctcagcaggaggtgattttgctccccggggaacatcggcagtgtccggagacatcttgtggttgtcacaactggcatctagtgggtagaggccagagacgctgctaaacatcctacagtacacaggacagccccgcaacaaagacttattcagtcaggtgtcgttgcttgcatctgtgatcccagttagttgggattagtctcagtggtttctgcagctgtcaggagaccaaggcgggaggattacttgaggccaggagttcaagaccagcctgagcaacatagtgagacttctgtctctacaaaaatgtttttaaaaattagttggccgtggcggcatgcacctgtagtcctagctacccgggaggctgaggtgggaggatggcttgagcccaggagttggagactgcagtgagctatgattgcaccactgcactccagcctgggtgatagagtgagaccctgtctcttggggaaaaaaaaaattattcagcccaaaatgtcaatagtgccaaggttgagaaactctgatttatattcacacacacacatatatgtatgtgtaagtatttatacatacatatatttgcacatgtacctggtaacaaaccaacatttgtgacatacctatcagcatgtatgtcaccgcctagaccttaaaacagcaagtcaaaaaacaactcatcaagcctggcttctgggttctgtctgtgctttattctttctgaacatagtcttttcagtatgtgctttctttagaggtgaagtaagttggatgtgaggtgacaaagtgcagggcatctgtggccctcagggaccatgtgccctgccaaaggggcagccccgggaccccagccaatggctgctctacagaaacagccacccatcttgaaacactgcacatgaccacctctggcatttttcacactgcgtagttctcttctggtgtttgaataggattcccgcacaacagatgcctactctttgggttctttctccccatgtgattttggaacaggtgatactcatacatgttacagtgcatagaaagcaccaaagggtatagcacaaagtcaatctgagcacaggcagggacgacaagattagaaattgcattcacagaggttccttttattaatactcttcatagatgtattacatatattcttttgagtttttcaaatataagatttttttttttaattcaaaaacaaaaattctgcttctcctcccaggagacagccatccttctcctggcgagcctcccagggcactctgtacctaaacaagcaaacacattgtaaaaaacacaagaggcacatgggactcactgacctcaaactggccttttgccctcagcactgcatcttggggaaccttccttagcagtttatagagctgtttatcctaaaggccatcacttaaaaagttagccctccttgtaaatgcttgcatagaatctttttgatagaatattttcaggggcaaagagaacagatgcattgagcagtgtgtcttctgagagttggttaggtaaagaggccaggagaaaattaccaacacgtcggcactcttattatctgcatttggaaattccaaatttggcagtattcacatcttgatccctggcttctgtggtttgaaaactgcttgagactattagctaatttatggcatccaaagcggcatagaacacctccccatgggaaaaggagcactatcttcccagtgtgcatagctgctggaccctgcaggcctcctttctaaggctgtgccattggatatgctaagattttgagctcggaacatccctgcctgcttcctgggtgtggagcccccaggaactgctcctctccctctcctgctcatctctgcttaccttgttttttagtggattaatccctcacctcctgggcgatgtggttttcttgtggggctgtaacctgctggcccacttcatcaatgcctacctggtggatgacagcgtgagtgacaccccaggggggctgggaaacgaccagaatccaggttcccaggttggttggaacaaggacttgtccttctttccgtgtgctgctgatgcccagggtctgggacaaactcaaggattctgggattctcagcatcaggccgggagggtgagagaggacctctcattatccctggagtcatctttgtctaaggggagaacggcctcaagaggcgagattccagattagtacccagacctgggaggaattaatggaatgcttgtccctgggcgccttagaaacagaccccagcttatctaaggctgctccgaggcagtgacccaactagggctcaggaagtcagaagatagaccagctaatagtgatcacctcttgacctttgtgtcacgtcttttgctttttaaaacccttttgtgaacgttatggcctttgatctgacggcatcctagttgtgaagggaacagggcaggtataatgttcgtttaccaatacagaaatcgagacccagagatcacaaattctggagaggctctgggctctccagagtcactcagctggaactgacagggctggaattagatccctggccaggccaagggtgcattcctctgagttttttcagatctgctaggaagtgtacagtccgatacaccctcctattttgttagctgtggtctacacagcctagtatacatagacctttcagcaggtcgggtcaggcataggaaggcctggtccttctacacagcacttgttgaggaaggccatccaggtacctgaggggttgactggttctgcctgaaccaagataagaggtagggagcagcgatggctgggaattgcagtgtccagacattctcacagtggggatcaccttcaagaaggatggcattccttcttgaagtggctttccctcccaggaggctaggagggcctggggacgtgtctgccagaatcacctgggtgggaagggggtcatgttcagcatgtgtgtgtgtgtggtacatgtctgttctgtgtggtgaggagtgccccatcccagatgggagcctctgcttgcagggagactggccacttgacctgggcaggtgagtcttcactggcctttcgatgtaagcaaattaaagtggctccatagagacccaccccatctgcaatcacagtggtacattcctgcagttctgccccttctcggggggccttgtgggtgggtaagctgctgctgtcacatacagagcaagggtggccaggagtgcaccgctaagtggtttctcatctaggtgggcagctgtctgaccagaggctgccgtgcttacatcagcaacaacagcagtcaacagatttgtctaaagtgtttttcgagtgcttttctgtatgtggcttaaaggccgaggtgaggctgccgggctgtcaaagccactcaagcagacatctgagcaaatctctgaccaagaacccaggccatcgatctggtgggatggccgctccacaggaagctgagggtgggggagtcacctttcctcactaggagctgtttgcttcagcaaagcaggatttgaggagttggggtctgaagggggaaaagcttgctgaggtggaggtggcgataagcctggacttgccctcacctcaccccacaggccaggattcgtctttgggtttcagggtgcatgtctgtcttagcactgactgcgtgccaagccctggatgttgatcaggcagacacgggctcagcccttgaggctcacagtccggtgggttgcacaggcagcggcagctgatccctcttaccgggtctccttctcgggactcccttcagtccacttaccccgtttctgccccccaggccttctctgggcagtgactgtgagggctgacaggaaaggcatgtgcagcgtgcttgtgaggagctcagcacagagggtggggtgagggcatgtgttgctgaagtctgcatcctgaggtgcctgtggcaaaccactcttcccttctgtctcctcagttcagccaggccctggccatccggagctataccaagttcgtgatgggggtaagttgtgccagctgtccttccttcccactgccttgcggacccaagcggggcctaggaggccaaccctggtaatggctggaggcaggtcttggtacagggtgttggcgtggtgtgtccctgctccctgggccggggtgggtcactggcactcaggcctctctgggtttcagattgcagtgagcatgctgacctaccccttcctgctagttggcgacctcatggctgtgaacaactgcgggtaggtgtgcgcccctctacttgccactctacctaccaaggctgtggggtgggggagacccaccgagcccttccagcactctgccccctcccacctgctctgtgtgtaggcttggcctgccaggcaccctggcttccgctgggatttcccagcaccccctggggtaaactgtggtgtcaggggtcagggtgtggatgggtggtagcctgaaggcattccttcttgaagtggctttcccgtggctggctgtcttccactgttctctgcatctacactctccttctccggcaggctgcaagctgggctccccccttactccccagtgttcaaatcctggattcactgctggaagtacctgagtgtgcaggtgagcaagcactggacggcggaggcctttcctgttctttgctacatccttcagctgaaatggttttgtggatgcttcattgcatgcaaagataagtggtttcatggaattcaatattgtgaggagatacttggtatctataaggcatttaagttttcatcttacataatttcagaaaggatttgaggtggctaagtgtgggtttattttaagattatacatcagacaagaccttttcttctttgagtcttaaagactcttaggataaggataagagaactctggcccaggtggcaggtggtaaagcccaagaactgcttctccttcaagtaacatgggctgaaaattcgaggtctgtaaccagttgagctgagttcctgggttgttagggcggctggcattggaaaccgactcctccctcctgcaggacattcctgggcccaggagagcctgtgggtggggctgggccacgtggggaactggcagcagtaccaaccttgggttctcgtgttctgtaccgaagctacctctccgtagctggagctcttgggcccagcagtcaggggtccaggctttggccgagggcagaaccttgccttttcctggccttgatttgcctcgcagtgaaatggggcagtggcccggagggagccagaactctgagtggcctcgaggctgagaagaggacagatgggagggaagcagggaggagagccgcagttcttcccagtggccctggtcagcgtgagtgtgtctcgtcctccctatgagcactgaaagagtcctagaccacttgggctctgaagcaagaggggcaatgagcctcctctctagggctctcctacagagtagccccaaagacacccctgggcaggaaatgaaccgctcccttctgcttcaacacaggcagattctgccctccagggatgtaggccgaggccgtccaccccggagctgggtctttgagctcctggacccttctttgcctgacactggccttcctctcggagggacaaggaagcgtggcctccctttcactcaccttacttttccttctggtccagggccagctcttccgaggctccagcctgcttttccgccgggtgtcatcaggatcatgctttgccctggagtaacctgaatcatctaaaaaacacggtctcaacctggccaccgtgggtgaggcctgaccaccttgggacacctgcaagacgactccaacccaacaacaaccagatgtgctccagcccagccgggcttcagttccatatttgccatgtgtctgtccagatgtggggttgagcgggggtggggctgcacccagtggattgggtcacccggcagacctagggaaggtgaggcgaggtggggagttggcagaatccccatacctcgcagatttgctgagtctgtcttgtgcagagggccagagaatggcttatgggggcccaggttggatggggaaaggctaatggggtcagaccccaccccgtctacccctccagtcagcccagcgcccatcctgcagctcagctgggagcatcattctcctgctttgtacatagggtgtggtcccctggcacgtggccaccatcatgtctaggcctatgctaggaggcaaatggccaggctctgcctgtgtttttctcaacactacttttctgatatgagggcagcacctgcctctgaatgggaaatcatgcaactactcagaatgtgtcctcctcatctaatgctcatctgtttaatggtgatgcctcgcgtacaggatctggttacctgtgcagttgtgaatacccagaggttgggcagatcagtgtctctagtcctacccagttttaaagttcatggtaagatttgacctcatctcccgcaaataaatgtattggtgatttggagttttt

SEQ ID NO: 1221 - DNA, 309 bp, Homo sapiens
gagtgtcctcctcctcccgtcctgggaaacctcatccaatgggcaaagctgaaagggcctctgacaggcctttggggacctccttatatatatccttacgtatatacccaagataattggaaacttaacgttcacacaaaaactggtatatgaatgcttagtagtattattcgtagtagctcaggagtggaaacagcctgagtgtccgatgacaaataaaatggaaatgttctatagaatgtaatgaatattccatagaatggaatattacttggcaataaaaatgaatgaagttccgattcatgctac

SEQ ID NO: 1222 - DNA, 577 bp, Homo sapiens
tccgttcaaacagaaacttttattgcgaacccccaaaactagcacggttctgttgtaggtgttgttgcagagtgtcgggcacgtttacaaacaggaacagggcacttgctgtcctatcttcctcgcagggttcttgtgacgattacacttaaatcaacacgtataaagcattttaaaaagtgcctgtcacatagtccctgcaatttaaggtctagttgtgattattcacttgtattaactaagaatcaactacaggcgcctagcagtgcctgcatgtgctcacactgaggcactcactaaaaccctcaggatctagtgagggagacagtcaaatactttagagcaaaacaaattttacaaccacggactctgaggaaggcgtgcgaaggctccacagctggggagggtgcccacagtcgccgaggggacatctggatttgctctggttgggagagcattcctggcagaggagatggaaaatgcgatcggacaaagaggctgggaccgcggaggggatcgggctcggggtcggggctcgtcctgcagcaggagattcagctcgcgcagagttccacgc

SEQ ID NO: 1223 - DNA, 147 bp, Homo sapiens
ggtcccagctactcgggaggcttaggcaggagaatggcgtgaacccaggaggtggagcttgcagtgagccgagatcgcgccactgcactccagcctgggcgacagagcgagactccatctcaaaaaaaaaaaaaaaaaaaaattgtg

SEQ ID NO: 1224 - DNA, 153 bp, Homo sapiens
cccagctactcgggaggctgaggcaggagaatggcgtgaacccgggaggcggagcttgcagtgagccgagatcgcgccactgcactccagcctgggcgacagagcgagactccgtctcaaaaaaaaaaaaaaaaaaaagaaagcagtggggcc

SEQ ID NO: 1225 - DNA, 1433 bp, Homo sapiens
aacagatggaccattgacaatccatatatttagaaatgatcaaacctaatgttttccttttttaagatgaaagtaaacataaatagagatggtatttttttctgcaattctctttttatacatcttatatctctttgcagattacagttctatatttgacttcccataacatgtcacaggacatgtgctttaaatcccccacaagttgttctcttgtggatatagtctaggtcttctgggttgtcccaaaatatgatgtgcacagacacaaacatattctgtatattggttttgattaacacagaatgcagtgggatttccttcctattatcattatatttcccttaatgcagtccaagattatgtattagtgtctaaagaagtataccacattcttaggtcttttagaaagtatcatctgcctctttggactctgggctatctttactaattcatctcaagtattatttttgtctcttcttttcatctaagactaaatattctccactctgctgttctactcagattaatgtatggccatatggcagtagacttctttatacttagtgctttctcaattttaagatgtttgaatattacactgatgcagaagttatttcataagcatagctttttcttgtgtggggtggaaagggaagaggattaaatcactgcctcacttgagcacatacatagctggaaaatgtgtggaaagtttcttgatgttgagaaaaaaagacagtgtcttgttaatcaataaattccgtttatttttcttttactatgtcctttactatatcataactgtagccttgctatatcctgaactcctcacaaaggccttctctgagccaactaaattaatgataaagaattgtaattcttggctgggtgctgtagttcacgcctgtaatcccagcactttgggtcactgaggtgggcagatcacctgaggtcaggagttcaagaccagcctggccaacatggcgaaaccccatctctactaaaagtacaaacattagctgggcatggtggcatgcacttgtagtcccagctactcgggaggctaaggcaggagaatgacttgaaccctggaggcggaggttgcagtgagccaagattgcaccactgcactccagcctgggcaacagagcgagactccatctcaagaaaagaaaaaaaaaattgtaattcttatacccttgctctgcttctttatcattgtgtaattttaaaaacaactgacatatattatacaggtacttgtttattgtctatttctaccactaaaatggaagctccaactgctattagattaatttccctcccaggtccaattttgattatgttactctgaccaagctgatcttttctcttcaatctagaccttttaactaccttcaaaaatacaataaatataattattctagact

SEQ ID NO: 1226 - DNA, 1434 bp, Homo sapiens
aacagatggaccattgacaatccatatatttagaaatgatcaaacctaatgttttcccttttttaagatgaaagtaaacataaatagagatggtatttttttctgcaattctctttttatacatcttatatctctttgcagattacagttctatatttgacttcccataacatgtcacaggacatgtgctttaaatcccccacaagttgttctcttgtggatatagtctaggtcttctgggttgtcccaaaatatgatgtgcacagacacaaacatattctgtatattggttttgattaacacagaatgcagtgggatttccttcctattatcattatatttcccttaatgcagtccaagattatgtattagtgtctaaagaagtataccacattcttaggtcttttagaaagtatcatctgcctctttggactctgggctatctttactaattcatctcaagtattatttttgtctcttcttttcatctaagactaaatattctccactctgctgttctactcagattaatgtatggccatatggcagtagacttctttatacttagtgctttctcaattttaagatgtttgaatattacactgatgcagaagttatttcataagcatagctttttcttgtgtggggtggaaagggaagaggattaaatcactgcctcacttgagcacatacatagctggaaaatgtgtggaaagtttcttgatgttgagaaaaaaagacagtgtcttgttaatcaataaattccgtttatttttcttttactatgtcctttactatatcataactgtagccttgctatatcctgaactcctcacaaaggccttctctgagccaactaaattaatgataaagaattgtaattcttggctgggtgctgtagttcacgcctgtaatcccagcactttgggtcactgaggtgggcagatcacctgaggtcaggagttcaagaccagcctggccaacatggcgaaaccccatctctactaaaagtacaaacattagctgggcatggtggcatgcacttgtagtcccagctactcgggaggctaaggcaggagaatgacttgaaccctggaggcggaggttgcagtgagccaagattgcaccactgcactccagcctgggcaacagagcgagactccatctcaagaaaagaaaaaaaaaattgtaattcttatacccttgctctgcttctttatcattgtgtaattttaaaaacaactgacatatattatacaggtacttgtttattgtctatttctaccactaaaatggaagctccaactgctattagattaatttccctcccaggtccaattttgattatgttactctgaccaagctgatcttttctcttcaatctagaccttttaactaccttcaaaaatacaataaatataattattctagact

SEQ ID NO: 1227 - DNA, 577 bp, Homo sapiens
ctgaggtgatatattttgactatttttgacatatacaacctgcttatgtggtattttttactattaataaatgctaaatatcaaaccttctgtttagctcttagttgacatgaatttatagaccaaggtaaaggttaacacactacattgttataacctatattaacaaagaattaatactcttctatgtaatatttttagcagaattattttgttgaaaagtgccaagtgtttgtttcctctttgttcttcccctttttgttgtaaaattgtttcactttgtagcaaatgatgaaaacattattattttctaagtgttatgcaaatctttataatatcagtatacattaaatatctacctatttagtattctttctctagtaagagcttaccttctgtgcattctgaaatgtacaactttttatgtacaaaaatgtctgttttagcattatgaggaaatgaatgcctatacagtggtctccccttatctatgttcttgtgttccacagtttagttacctgcagtctgaaaatattaagtggaaaattccaaaaataaactacttataggttttaaa

SEQ ID NO: 1228 - DNA, 196 bp, Homo sapiens
aaccccgtttctactaaaaatacaaaaaattagccgggcgtggtggtgggcgcctgtagtcccagctactcgggaggctgaggcaggagaatggcgtgaacctgggaggcggagcttgcagtgagccgagatcgtgccactgcactccagcctgggtgacaaatggggactccgtctcaaaaaaaaaaaaaaaaaa

SEQ ID NO: 1229 - DNA, 577 bp, Homo sapiens; identical to SEQ ID NO: 1227

SEQ ID NO: 1230 - DNA, 196 bp, Homo sapiens; identical to SEQ ID NO: 1228

SEQ ID NO: 1231 - DNA, 4454 bp, Homo sapiens
atgattaatcactaaacaggtattgcataaaatagcaattttcagctctggattttggggaagggagtagaggctggaaatgtaggtggagagtcaggctggggagagatgccacattcgcaacattgggttttttacaatagtactgcatctatctctgtgcaggagtctaaaagtggttggaagctacatttaggattatttaaaataacatactgccttatttttatctctgtagcaacaactttttgtaagaaaaatagctagttccatgatcttttgccttttgaaaaggagagatctattttaaactctttgcaggctcctcgaagttccttttcttgctgttgagtagcaggtagaatctctagttcatggaggtctgacggatccatggtcccgtgctggtccatgtgctgccctctgcttccgtccctcatccttgccactctcaacagtcttccccgacaacccttaggaagacaagggcttggaggagggggaggactgagtgtccctggcatgttctgattaatcctattcattgtcaagtacagctttttaatgaactgattcattactgagagtaggtctcatgcaaatccctagtttgtatcctgtggatttaatttctaacaatttcctcatttcaacacaactccattgtaccatgggctttgtgattttgttctaatatagagcttgacctcacattttaagactataagatgaatactaaaaaaacgaaatccttaaaataaaaaataaactagaagaacatgtaggtggatattcaactcctctctaaaggaagaagggttgtccacacataaaagttttggaagagactgggtttagtggctcacgcctgtaatcttagcactttgggaggctgaggtaggaggatcacttgagcccaagagttcgagaccagcctgggcaacataatgataccctgtctctacaaaaattaaaattagccaggcatggtaatgcacacctgttgtcacctgtggttgggaggctgagtgggaggatcgcttgagcccagaaggttgaggcttcagggagccatgattgcaccactgcactccagtgtaggtgacagagcaagaccctgtctccaaaaaaaaaaaaaaaaaaaaagaaattctggaagaaatgacagaggaaatcactgataaatttcgaaacataagtttgtgcaatatcagagacaaatttaacaaatatgtaaaatttgcctccattatgagttaatataaaactatgaagagttcaggagattataaaaagagacaaagacaaccaggagaaaacagataacttaatactttttaaaaaaacaccaggctaacaaaaaagaaatatatagttgactaaataaatatagcacaatatatttaaccctacaaatttcaactaatgcaatgaaaacataatagcagcttttcaactgttattattaccagaaagaaaaatattttaaaatgctattgtggttttggtgagggaacatttttcatgccctgttgtttgagagtagaattcagtgcaccctttctggaaagcagtttggtaacctgtaatacttcttttaaaaaaaaattcatcctcttgtctaaaaatttctcctctagaaacttaaagataatagtcaagtgaaaacacatttatgggcagtgtttaaagttttgtgagtgaaactgttgataagaacctattacaatggttaagccacctggaacattctattgatatattatgcagccttggaaaatagtacttttaaggaatgttaataagatgggcaatacaaaactgaatgaaaatccaatacagaattctgcctacataacatgatccaaattttgcctaaagtttgcctaaaacgtgcatagcaaaagaatttcgggaactacaccagaatgttagcatgggtccatcatttctgagctgtggtgttactggcatgactcttgtttttcttgtttattcttttatgttatattaaggtgaccacctgttcccgttggcctggtactgccctggttttagcactggaagtcctactctggacaattaatgattcgtgtgtgtgtgtgtgtgtgtgtgtgtgtgtgtgtacacattaaggtgaggttgtgcccatttgaaaggaagggccaaagataaagtgacaagctcatggggcctgtgtggtagtcaggcagtagatttttttttttttttttgagatggagtctcgctctgtcacccaggctggagtgcagtggcatgaacctggctcactgcagcctctgcctcccaggctcaagcgattctcccacctcacctgcccaagtagctgggactacaggcatgcacccccacacccagctaattttattttgcattttttgtagagacggggttttacatgttgcctaggctggtctcaaactcctgagctcaagtgatccactaccttggcctcccaaagtgctgggattacaggcatgagccactgtgcttggcccagggagtagattttctgatgataaaattaacgtgacttgttctagaaaatacagggaaagagtaaatgtgcaaagacttaaatagcatttacatgtagcccacagtgctctaaatgcttttggtggttcacagtttaatcatcataaccctatgaactagatactgttgttgcatccccatttacagaggcatagagacatggagtaattcacccatagccacacagcccttgacagaatctggatttgaactcaggcagttcggatccagagtctgggccattgaccacctcctgcatctctgtagatccccgactccagcctctcctcttgctgcctctctcaacagtaacgatgctgttactccccacgccaaacctctgggctggccaggctcactccagtcccacagtcattgccaggactgcctttgaccttacacagaggaaacatcttccacctgtcgggagggagccggggcggggatttccatggcagagttactgttctctggtgatagagttctttcagttttgctacatggtcttgtggcaaaggactgggtgcaggtgcagccttggttatttctggaaacacttctccttttcttttattttgccaggtctggctcatcagtcaccttcctctcagaaaggtgattttggctcctctgcccagaccatcaaacatttctggaggtgtcacaagcttccgtgagggttctggtctctgcgaattgcaggaagaatccaaacataggaaaggggtgatgtgtatcagggtgtccatcctcagctttgctccacaaagaccctcacacttgcacattgttttgttaacagtattatctctgagtagtgggtttattgtttttgcttacctgttttaaacacttcttcaacaaacttgctttactttccattttttaaaagtgtatttcaattttttattaataatgccattttactcctgcaaaatttctcactccttcaaagtctgtgtatggcaaagatcttcctaaccatcattcaagttagagcaactccatttctgtatcaaaaagaaatacctttagttattgtctgaacttgtcagaatttctgagaacgatgccagaaattctataattgttttgtcacattaattgaacaatgagagggcaccagcattcctcactcatgaggtagaagcaccacatctacatttctttttagctatgggtgatgtttttgcttttaaatcttagaaatctgttaataaacaaataacacaacaaagtttggggtacttccttgtggggactgggatgcttaagctaaaacaaagtttaaatttggactgtgtgtgttatgtttcgcagaatctatatgtttctcaaaagtgggtgtcaccctccttcctcccccaacacacccttcaggggtaagaggagaagtaatgtagaaaaattaactgtttctccactgtaaaagtagggtgtctttagaatgtttcatgttcaaaggaaagattgtgcttctcccaaggcaaggtgttcccttaaaaaaaaaaaaaaaaaaggttgagcatgtctttgtattgctgtctctggaagaggaaatgaggcatctcttggggtgagaacaagggagaattgaactctcgggcctggccagatggattcctcacactggcacagagctgtgaagggaagggcctttcatcctccagaggaaagagggctggggtctcagaggccagagcatagggacaggcaggagtcctgcagccctgatgcctgcccctcccagtacagaatctctgtcctgacccccacctgttgaacctttcaaatcccagtgactcgccagctttctctgtggatattggctgaattggtggcttgtgtggctgcctgggagagcaatttacccctgagccaaggagggggtgggc

SEQ ID NO: 1232 - DNA, 1569 bp, Homo sapiens
cccacgccaaacctctgggctggccaggctcactccagccccacagtcattgccaggactgcctttgaccttacacagaggaaacatcttccacctgtcgggagggagccggggcggggatttccatggcagagttactgttctctggtgatagagttctttcagttttgctacatggtcttgtggcaaaggactgggtgcaggtgcagccttggttatttctggaaacacttctccttttcttttattttgccaggtctggctcatcagtcaccttcctctcagaaaggtgattttggctcctctgcccagaccatcaaacatttctggaggtgtcacaagcttccgtgagggttctggtctctgcgaattgcaggaagaatccaaacataggaaaggggtgatgtgtatcagggtgtccatcctcagctttgctccacaaagaccctcacacttgcacattgttttgttaacagtattatctctgagtagtgggtttattgtttttgcttacctgttttaaacacttcttcaacaaacttgctttactttccattttttaaaagtgtatttcaattttttattaataatgccattttactcctgcaaaatttctcactccttcaaagtctgtgtatggcaaagatcttcctaaccatcattcaagttagagcaactccatttctgtatcaaaaagaaatacctttagttattgtctgaacttgtcagaatttctgagaacgatgccagaaattctataattgttttgtcacattaattgaacaatgagagggcaccagcattcctcactcatgaggtagaagcaccacatctacatttctttttagctatgggtgatgtttttgcttttaaatcttagaaatctgttaataaacaaataacacaacaaagtttggggtacttccttgtggggactgggatgcttaagctaaaacaaagtttaaatttggactgtgtgtgttatgtttcgcagaatctatatgtttctcaaaagtgggtgtcaccctccttcctcccccaacacacccttcaggggtaagaggagaagtaatgtagaaaaattaactgtttctccactgtaaaagtagggtgtctttagaatgtttcatgttcaaaggaaagattgtgcttctcccaaggcaaggtgttcccttaaaaaaaaaaaaaaaaaaggttgagcatgtctttgtattgctgtctctggaagaggaaatgaggcatctcttggggtgagaacaagggagaattgaactctcgggcctggccagatggattcctcacactggcacagagctgtgaagggaagggcctttcatcctccagaggaaagagggctggggtctcagaggccagagcatagggacaggcaggagtcctgcagccctgatgcctgcccctcccagtacagaatctctgtcctgacccccacctgttgaacctttcaaatcccagtgactcgccagctttctctgtggatattggctgaattggtggcttgtgtggctgcctgggagagcaatttacccctgagccaaggagggggtgggc

SEQ ID NO: 1233 - DNA, 787 bp, Homo sapiens
ctcatccagagatgcactgggcacagggaaagctttttttttcaagtagcagctgctattcattgaaatgttacaattttcctgccttagtatttcacacgtccttatactcctcataacattttttgcttgtgtagttttagccccatttcagaaatgaggaacccaggttcagaaggtttagaagcttgctcaagaccccccagctattaggtgccagagctgcaactggaatgcagctttgactccattgtgggtttctgttccattatcaagagtagcctgacagttggcaataacaatgactgaatgaatgaataaatgaattctccaaagaaaatagttcatgtttccctagtatgagggaatacttgagatagttgttttgagaagggggccacagaccaggagacaccaataagtctttctcatttctggtaaatcgctttataatgaccgttattataaagtgtaaaaacaacaacaacaaaaaataataggcgcagtggttcacacctataatcctagcactttgggaggcagaggcgggcggatcatttgaggtcaggagttcgagaccagcctggccaacatgatgaaaccctgtctctactaaaaacacaaaaattagccgggcggtagtggcacgtgcctgtgtagtcacagctactcgggaggctgaggcaggagaatcacttgaacccgggaggtgaaggttgcagtgagccgagattgtgccactgcactccagcctgggagacagagccagactccatctcaaaaaaaa

SEQ ID NO: 1234 - DNA, 622 bp, Homo sapiens
gtatgcacacaaatacctaacctttccaatgtaggccctagttacttccaaaataatttagaagtgtttacagatatgttttgacgattttgctatgatttttcatttattggtatcagaattgaatatatttagctgttgctctctgctaagtaaactgagacctaggtgtgcttaccattgttttctgtgaaaaccagctgatccgtgttacaaatgactgttttagctatggaaacaagacacctctgtgaatatgattccttgtgtggtgggcatcactagagagcaatgactgtattccctaaagagaaagtgcgagagcggcagtacagaccaaggcagaggtggctgaggagattgttccggtcagcaatgtagaattcctgcccctgtgttctgtgaccccaacagagggagccagcacccactgtgcacctcccacacagcccacactgcacaaggcatttagacagtgccttaaattcactccatcaatactgtgagagccccactggcttcccctttggggttttagacatttagggtattcactgaatactttacgttgaagtgtttttctataacattagaaccaggttcaacttaaaaaaaaaaaaaa

(The sequence listing continues in the following parts.)

What is claimed is:

1. An isolated nucleic acid molecule comprising a first polynucleotide sequence at least 95% identical to a second polynucleotide sequence selected from the group consisting of:
(a) a polynucleotide fragment of SEQ ID NO:X as referenced in Table 1A;
(b) a polynucleotide encoding a full length polypeptide of SEQ ID NO:Y or a full length polypeptide encoded by the cDNA Clone ID in ATCC Deposit No:Z corresponding to SEQ ID NO:Y as referenced in Table 1A;
(c) a polynucleotide encoding a polypeptide fragment of SEQ ID NO:Y or a polypeptide fragment encoded by the cDNA Clone ID in ATCC Deposit No:Z corresponding to SEQ ID NO:Y as referenced in Table 1A;
(d) a polynucleotide encoding a polypeptide fragment of SEQ ID NO:Y or a polypeptide fragment encoded by the cDNA Clone ID in ATCC Deposit No:Z corresponding to SEQ ID NO:Y as referenced in Table 1A, wherein said fragment has biological activity;
(e) a polynucleotide encoding a polypeptide domain of SEQ ID NO:Y as referenced in Table 1B;
(f) a polynucleotide encoding a polypeptide domain of SEQ ID NO:Y as referenced in Table 2;
(g) a polynucleotide encoding a predicted epitope of SEQ ID NO:Y as referenced in Table 1B; and
(h) a polynucleotide capable of hybridizing under stringent conditions to any one of the polynucleotides specified in (a)-(g), wherein said polynucleotide does not hybridize under stringent conditions to a nucleic acid molecule having a nucleotide sequence of only A residues or of only T residues.

2. The isolated nucleic acid molecule of claim 1, wherein the polynucleotide fragment comprises a nucleotide sequence encoding a secreted form of SEQ ID NO:Y or a secreted form of the polypeptide encoded by the cDNA Clone ID in ATCC Deposit No:Z corresponding to SEQ ID NO:Y, as referenced in Table 1A.

3. The isolated nucleic acid molecule of claim 1, wherein the polynucleotide fragment comprises a nucleotide sequence encoding the sequence identified as SEQ ID NO:Y or the polypeptide encoded by the cDNA sequence included in ATCC Deposit No:Z, which is hybridizable to SEQ ID NO:X, as referenced in Table 1A.

4. The isolated nucleic acid molecule of claim 1, wherein the polynucleotide fragment comprises the entire nucleotide sequence of SEQ ID NO:X or the cDNA sequence included in ATCC Deposit No:Z, which is hybridizable to SEQ ID NO:X, as referenced in Table 1A.

5. The isolated nucleic acid molecule of claim 2, wherein the nucleotide sequence comprises sequential nucleotide deletions from either the C-terminus or the N-terminus.

6. The isolated nucleic acid molecule of claim 3, wherein the nucleotide sequence comprises sequential nucleotide deletions from either the C-terminus or the N-terminus.

7. A recombinant vector comprising the isolated nucleic acid molecule of claim 1.

8. A method of making a recombinant host cell comprising the isolated nucleic acid molecule of claim 1.

9. A recombinant host cell produced by the method of claim 8.

10. The recombinant host cell of claim 9 comprising vector sequences.

11. A polypeptide comprising a first amino acid sequence at least 95% identical to a second amino acid sequence selected from the group consisting of:
(a) a full length polypeptide of SEQ ID NO:Y or a full length polypeptide encoded by the cDNA Clone ID in ATCC Deposit No:Z corresponding to SEQ ID NO:Y as referenced in Table 1A;
(b) a secreted form of SEQ ID NO:Y or a secreted form of the polypeptide encoded by the cDNA Clone ID in ATCC Deposit No:Z corresponding to SEQ ID NO:Y as referenced in Table 1A;
(c) a polypeptide fragment of SEQ ID NO:Y or a polypeptide fragment encoded by the cDNA Clone ID in ATCC Deposit No:Z corresponding to SEQ ID NO:Y as referenced in Table 1A;
(d) a polypeptide fragment of SEQ ID NO:Y or a polypeptide fragment encoded by the cDNA Clone ID in ATCC Deposit No:Z corresponding to SEQ ID NO:Y as referenced in Table 1A, wherein said fragment has biological activity;
(e) a polypeptide domain of SEQ ID NO:Y as referenced in Table 1B;
(f) a polypeptide domain of SEQ ID NO:Y as referenced in Table 2; and
(g) a predicted epitope of SEQ ID NO:Y as referenced in Table 1B.

12. The polypeptide of claim 11, wherein said polypeptide comprises a heterologous amino acid sequence.

13. The isolated polypeptide of claim 11, wherein the secreted form or the full length protein comprises sequential amino acid deletions from either the C-terminus or the N-terminus.

14. An isolated antibody that binds specifically to the isolated polypeptide of claim 11.

15. A recombinant host cell that expresses the isolated polypeptide of claim 11.

16. A method of making an isolated polypeptide comprising:
(a) culturing the recombinant host cell of claim 15 under conditions such that said polypeptide is expressed; and
(b) recovering said polypeptide.

17. The polypeptide produced by claim 16.

18. A method for preventing, treating, or ameliorating an immune disorder, comprising administering to a mammalian subject a therapeutically effective amount of the polypeptide of claim 11.

19. A method of diagnosing an immune disorder in a subject comprising:
(a) determining the presence or absence of a mutation in the polynucleotide of claim 1; and
(b) diagnosing the immune disorder based on the presence or absence of said mutation.

20. A method of diagnosing an immune disorder in a subject comprising:
(a) determining the presence or amount of expression of the polypeptide of claim 11 in a biological sample; and
(b) diagnosing the immune disorder based on the presence or amount of expression of the polypeptide.

21. A method for identifying a binding partner to the polypeptide of claim 11 comprising:
(a) contacting the polypeptide of claim 11 with a binding partner; and
(b) determining whether the binding partner effects an activity of the polypeptide.

22. The gene corresponding to the cDNA sequence of SEQ ID NO:X.

23. A method of identifying an activity in a biological assay, wherein the method comprises:
(a) expressing SEQ ID NO:X in a cell;
(b) isolating the supernatant;
(c) detecting an activity in a biological assay; and
(d) identifying the protein in the supernatant having the activity.

24. The product produced by the method of claim 21.
